United States Patent Application Publication US 2010/0120627 A1 - sequence listing, part 5

SEQ ID NO: 7939 - DNA, 615 bp, Homo sapiens
tatcagttgtactttcatttagaagtatgaatcatgagcaagtagtcatgcaggaaattgtatcctctgcccacccacccacagaaagggccagtgctggaatggacagaatacagcaggaagtgcatgaaggtggaaaaggggagggagctgggagcttatctccgagagcgtttgggaggataggcgcgtggagtctgttagctggaggcttctacattcctgggcctccagaacccaaacgcctgccgctgccctgccagtgaaaccaaaccggttgccttttgaaactttccactgaggccaccttggagtcagagccagcgagctcaggtctctcctggtaaccttcacacctagaggtggggggatgggggagcagtattgaaggtgaggaaaaacagcatgaaatggagcattgtcaggatagatggtgactctgtggaaaaacagaatcgggagtcccaagacctgatttaaaaatctgaactttccagtctgagcaatatagcgagaccctgtcccgtgtatgatggtgtgcacctgtagtcttgggaggctcacgtgggaggaccgctgagtagctgggacttacagatgcatgccaccacgccc

SEQ ID NO: 7940 - protein, 79 aa, Homo sapiens [sequence omitted]

SEQ ID NO: 7941 - DNA, 864 bp, Homo sapiens
aaagagcgggaaggggagtggaaggcaggggctgaagacacaggccaggcggaatgaagatgatggtggtcttgctcatgctgtcctcgctcagccggctcctgggcctcatgaggccatcatctctcaggcaatacctggactctgtgcccttgccaccctgccaggagcaacagccaaaggctagtgccgagctagaccacaaggcctgctacctgtgccacagcttgctgatgctggccggggtagttgttagctgccaggacatcactccagaccagtggggcgagctgcagctgctgtgcatgcagttggaccgccacatcagcacgcagatccgggagagcccccaggccatgcaccgcaccatgctcaaggacctggctacccagacctacatccgttggcaggagctgctgacccactgccagccccaggcccagtatttcagcccctggaaagacatctaaagggacagggtcagggcagcccagggctcctggcttcagcaggaagtgaacaggctcagggaactggaggaagcgaagcatcaaggccagaggaggccacatgctgaccagcctgatgaggcaagagcctgcccctgccaccgccccgacccctctcctctctgcaagagcctgcctctgccaccgccccgaccccctctcctctcagcaagggatgggcctctctgcctcgcccacccctcagccctcctcccagccatctcctcttccctaaggcctctgtctccatagctctggtttccctgggcctcagtcctccccaccctccttcctctgtctccctgtcactaatgtgaggtttctttgtgcacattaaagtcttctttcagcatca

SEQ ID NO: 7942 - protein, 138 aa, Homo sapiens
MKMMVVLLMLSSLSRLLGLMRPSSLRQYLDSVPLPPCQEQQPKASAELDHKACYLCHSLLMLAGVVVSCQDITPDQWGELQLLCMQLDRHISTQIRESPQAMHRTMLKDLATQTYIRWQELLTHCQPQAQYFSPWKDI

SEQ ID NO: 7943 - DNA, 1005 bp, Homo sapiens
gcacaggggtttagaattgactggtgtaggagcagaggacctggggctggatctgggcacagcaatttgcagggcactgctgggcaggagtccctgatggccaagctgctgggctctgtatctcccacaagctgcagcggaggccccatggagcaggagcagaagcacacgttggagaactgaacttgaaggacaggacttacagcattgaggtcacacagctgtcctcgctcagccggctcctgggcctcatgaggccatcatctctcaggcaatacctggactctgtgcccttgccaccctgccaggagcaacagccaaaggctagtgccgagctagaccacaaggcctgctacctgtgccacagcttgctgatgctggccggggtagttgttagctgccaggacatcactccagaccagtggggcgagctgcagctgctgtgcatgcagttggaccgccacatcagcacgcagatccgggagagcccccaggccatgcaccgcaccatgctcaaggacctggctacccagacctacatccgttggcaggagctgctgacccactgccagccccaggcccagtatttcagcccctggaaagacatctaaagggacagggtcagggcagcccagggctcctggcttcagcaggaagtgaacaggctcagggaactggaggaagcgaagcatcaaggccagaggaggccacatgctgaccagcctgatgaggcaagagcctgcccctgccaccgccccgacccctctcctctctgcaagagcctgcctctgccaccgccccgaccccctctcctctcagcaagggatgggcctctctgcctcgcccacccctcagccctcctcccagccatctcctcttccctaaggcctctgtctccatagctctggtttccctgggcctcagtcctccccaccctccttcctctgtctccctgtcactaatgtgaggtttctttgtgcacattaaagtcttctttcagcatca

SEQ ID NO: 7944 - protein, 119 aa, Homo sapiens; identical to SEQ ID NO: 546

SEQ ID NO: 7945 - DNA, 1952 bp, Homo sapiens
ggacccgaagaggggcctggccttgccagagaagctgttctggaacacgtcaggcctgagccagcaggctgcggccccagagttttcctgggggggctcaggaagctacttcaacaacctggactacttactgcaggagaagagggaacaggccctggagcaggagcgagagaggctgcttctgcaggagtgtctcaatctcaactccttggatcttgatgaagaggaagtgccactcacacccgagcacaggatgctggtggaaaagtactcagtgtccctgcagaccatcccgccggtccatccaggtgagactgtgtttctgcccaggtgtcaccccctgccatgcatcctggactcctcactcctgaagccacgcagccacctggaagggctgttcctcagctccccgccagcccaacagctctccttcctgcgcagtggcctcctgaacatcctctacctgcacatgcctgactgcccggtatccctgctccagtggctgttccagctgctgacatggcctccagaaacatctttgggagcctttggtcttctgtgggatctcattgtggatggaatcttccttcagcctgatgaagacaagcacctgtggtgcccctcactgcaagaagtcagggaggcattccacagcctgggtgcccacagtcctgccctgtaccctctggggcccttttggcacggtggcagggtgcttccaggcgaggctggcctgaatgagaatgaggagcaggacgctccccaagagattgccttggacatcagcctgggccacatctacaagtttctggcgctgtgtgcccaggcccagccgggggcctacactgatgagaacctcatgggactgattgagctgctgtgccgcaccagcctggacgtggggctccgcctgctgcccaaagttgacctccagcagcttctcctcttgctcctggagaacatccgggagtggccagggaagctccaggaactgtgctgcaccctgagctgggtgtctgaccaccaccacaacctgctggccctcgtgcagttcttcccagacatgacctcccggagcaggcggcttcgaagccagctcagccttgtggtcattgctcgaatgctgggccagcaggagatgctccctctctggcaagagaagacccagctgtcctcgctcagccggctcctgggcctcatgaggccatcatctctcaggcaatacctggactctgtgcccttgccaccctgccaggagcaacagccaaaggctagtgccgagctagaccacaaggcctgctacctgtgccacagcttgctgatgctggccggggtagttgttagctgccaggacatcactccagaccagtggggcgagctgcagctgctgtgcatgcagttggaccgccacatcagcacgcagatccgggagagcccccaggccatgcaccgcaccatgctcaaggacctggctacccagacctacatccgttggcaggagctgctgacccactgccagccccaggcccagtatttcagcccctggaaagacatctaaagggacagggtcagggcagcccagggctcctggcttcagcaggaagtgaacaggctcagggaactggaggaagcgaagcatcaaggccagaggaggccacatgctgaccagcctgatgaggcaagagcctgcccctgccaccgccccgacccctctcctctctgcaagagcctgcctctgccaccgccccgaccccctctcctctcagcaagggatgggcctctctgcctcgcccacccctcagccctcctcccagccatctcctcttccctaaggcctctgtctccatagctctggtttccctgggcctcagtcctccccaccctccttcctctgtctccctgtcactaatgtgaggtttctttgtgcacattaaagtcttctttcagcatca

SEQ ID NO: 7946 - protein, 434 aa, Homo sapiens
MLVEKYSVSLQTIPPVHPGETVFLPRCHPLPCILDSSLLKPRSHLEGLFLSSPPAQQLSFLRSGLLNILYLHMPDCPVSLLQWLFQLLTWPPETSLGAFGLLWDLIVDGIFLQPDEDKHLWCPSLQEVREAFHSLGAHSPALYPLGPFWHGGRVLPGEAGLNENEEQDAPQEIALDISLGHIYKFLALCAQAQPGAYTDENLMGLIELLCRTSLDVGLRLLPKVDLQQLLLLLLENIREWPGKLQELCCTLSWVSDHHHNLLALVQFFPDMTSRSRRLRSQLSLVVIARMLGQQEMLPLWQEKTQLSSLSRLLGLMRPSSLRQYLDSVPLPPCQEQQPKASAELDHKACYLCHSLLMLAGVVVSCQDITPDQWGELQLLCMQLDRHISTQIRESPQAMHRTMLKDLATQTYIRWQELLTHCQPQAQYFSPWKDI

SEQ ID NO: 7947 - DNA, 908 bp, Homo sapiens
tgactgcctccttccagaccttctggcctcacccgcccacagtgagagctctctgtgacactctgagctccgaagaatccaacctgcccgagggtgggcaggattcagccatgagtgaaagagaactgggggaggaagcttggagctgcggcaggagctcgagggagatgtgggtggagacagaacggctgttttaaggtaccatataatactccgtagcacgggcagaactgaatcgatggtggggcactgaggcaatttccagttcttcactatcatgacattgctatgccaaacatccttgtcaatgaatctttgccatctagttccccagaaaacgatctagctttttgaagggtgtgcacattttaaagtcatttgcttgattttgccaaactggcctccagagggactactgaccgcatctcatgagcagggaagcatatgcctgtttcctcacatcctgccaacactgggcagcactgtcctttcggattgattctggtctgccaggcaaggaactctacgtcattgtcagggctggtttcgtgagccgttttacgcaggctttgtccattcctccatctgaccaggcagcctgcgggagctggcttcatctgaccttctgctttgaagcagcgcacacaggatgtttaatgaatagccgcaggcagtgaaggaagaggatccccagagcctgggacatcagctttcagtagagtgcaagcagttgcaggagccctgaacagaagtggggatggcatgctgctcttcccaaagctgcctgagctgccccaatggcgccacctcccaaggtggatgttcctccaagaacctcctcttccccttggctctgtttcaggtggtctgccttagtattcactttcatttttcatggttaggcccag

SEQ ID NO: 7948 - protein, 82 aa, Homo sapiens
MSREAYACFLTSCQHWAALSFRIDSGLPGKELYVIVRAGFVSRFTQALSIPPSDQAACGSWLHLTFCFEAAHTGCLMNSRRQ

SEQ ID NO: 7949 - DNA, 2259 bp, Homo sapiens
gtctgaggggttctggactgtggtcgccctgctacattaggagactacagtggcacacacactagggaaatactatgcagctgtgaaaagagtgaggtttattgtgtgtatgtgtgagaaaaacaaccacaaacaccatgccctggatggagcaaatgagaaactggctggacgaggtggatgagggggcctagggaccagcctaagaatttgcacctggccctgcaggcaatggggagcatggtaaggcagagacgtgatcatcacaggaacccccaggcatctacagagcaggcagactttggagaagaggaagaaatgcctctgccaccctccagagagaggatgaaacctgccctctcccaactgtgcacaggctgcctctctgccagccagattcccaggaaagacagaaagagatgggactgcctgctcagcactgaagcggagcccaggacaactgaagggccgacctgacttggtgtaggaggaggctacagaactatgtgaactctaagaatgggggacacatggaggggggctccttggggactggctcccacatgctaccgttcaggtgaggcctcgagctttagttttccaggacttggaaaccagaaaatcacacttccaatccccccaaagtccgtgagttctccctgggtccgttcgacaagggtgagcctgcatacactgcaaagtgcaccacgtggtagctgacacgggctggctcacaagccagcaagtatgggggaaatcagaacaaaacatccctgaaaaccccctccaaaggtgtcaccctgagctgatgtgctgtctgctgataagacctgcatggccagtttccccgagtgacggacccaatctggctgagcaccagatgatgttagagaccagggctggggaaagaaaaatccccccctttaaagatcaagccacacgcagggtggtgagatgcttacggtgagggggacctcggtggggctttgtggatggcagtctcatcaccctttccacaagcctccctcccaggcacgcgctcacaggacgagagcctgggcgggatcaccttcatcgtatggccgaatgtacattgttgatttcaagtatgttaagtgagcttatgatgagggtcccctctgctgtctcacccacttctccactcttaagaaacggcttaaggttcctgctaacagtggtaagtgaagatattgatgacaaccacactgctgatgacagcaggctccaggcagccccctggcacaggggaggaagagcactgtcctacagctcctgtgaagtctctgctcttctctgcttggcactggcgctgggctcagaggggaaggaggagagatctgtctccgaggtaccaggaagttggtgccgacaaaccaaacttggtgggggagtggaaactgtggctgggctcagtccttcttccagatttcagcatttattagggccctaactgaatgggtaaggctggcatttgcacatctgggcgcaggctgggcctgcgccagtacgtgaggggaagctctggttcgtaccagccttgagcgtgcaacacgcgcagccataggtgggtgtgctttcaggtttctcagcacggggcactcagagtcgactacaaacatctgcagaagagagacgctgccaaggggagaaggaacattgaaggtgtgaggtggttacatgtgttttttgagctgcagagaggagtgtggctgtggggagagccctgtcctccttggaaagaaatgtcagccttcccaagtgaatgcctggctggtcagagttccagaactttgtgagcccatggactaatgggcaacataatgggggtcctctaatcctcgcttttcagaggaatcacttgactaaactgctggcatctgtggctgctgttctgagctgcagcatcagctgatccccgaaactccaccactgctgccagcaaggggccacagcccgggaattcaacggcctatctattatccctgctcccctcctgggcttagcaggttagagtgagctgatggtcccaccattggactcttatgagcaaagcagcttcactggtcccacgcctggctccagggtctgtggccagcacctaggaactgggtttctgtctcggagacaccgttcaatactcattaaccttacaaggggcatgtcactggcctctacccaggtctccgcatcttcttcccccaaaagttgaaaaaataataaagttaccatctgcatggc

SEQ ID NO: 7950 - protein, 98 aa, Homo sapiens
MRGPRDQPKNLHLALQAMGSMVRQRRDHHRNPQASTEQADFGEEEEMPLPPSRERMKPALSQLCTGCLSASQIPRKDRKRWDCLLSTEAEPRTTEGPT

SEQ ID NO: 7951 - DNA, 668 bp, Homo sapiens
ggcgagctccccagctggcggcggcggcggctgtgagctggccgcttggtttggagtcggaactcaatccccagaactggatctttaggttccacgttggcggccctggatctagggacgcaactcttggggtcctcccactgcgccgcctggggagcctgctcctgcttcctttcccggctagctggccccgtcctctgaggccgtgcgaattcccgccaccctccctcaccccggagccctgcccttcccgccctatgtggccaaggcttccaggtgcgggcctcgctccacaactcaggaggcaggatcagcggctccattttacaggacagatgtcccacggcttgcagatggctgggccccaggagacggtgctagcccttcctctgagagaaggggtgcaggctgccgccaccgtgcccatcctcctgtacaacctggaggatggcttgtcagaccatcccctggaccaggggccccgctgccctgcccggcggccctgcagccctgcctcggctccagctcccacatcgccaaagaagcccaagatacaggcacctggggaaacgtttcccactgactggagccccccgcccgtggaattcctcaacccgagggtgctgcaggccagtcgggaggccccggcccagaggtgggtgggtgtg

SEQ ID NO: 7952 - protein, 136 aa, Homo sapiens
MWPRLPGAGLAPQLRRQDQRLHFTGQMSHGLQMAGPQETVLALPLREGVQAAATVPILLYNLEDGLSDHPLDQGPRCPARRPCSPASAPAPTSPKKPKIQAPGETFPTDWSPPPVEFLNPRVLQASREAPAQRWVG

SEQ ID NO: 7953 - DNA, 947 bp, Homo sapiens
atggaccctccgcccccagcctgtgcagtgcgggggctgctggcaggcagagtgccgccccaggggccctgggagctgcagggcatattgctgctgagccagaatgagctgtaccgccagatcctgctgctgatgcacctgctgccgcaagacctgctgctgctaaagccctgccagtcttcctactgctactgtcaggaggtgctggacaggctcatccaatgcgggctcctggttgctgaggagcttgtcagagaacaatggctccgggtccggccagcctgtgacacagggcaacggcgactgagcagaaagctgctgtggaaaccgaggaggtggtggggagctgcactcaccccggcctgtcccctccagctcagccagcagtcacactgcccagatttctttcttttcctctgccgcctgctcagcccgctgctcaaggcctttgcacaggctgccgccttcctccgccagggccagctgcccgatactgagtcgggctacacagaccagctgttccagttcctgcaggccaccgcccaggaagaagggatcttcgagtgtgcggacccaaagcttgccatcagtgctatctggaccttcagagacctaggggttctgcagcagacgccgagccctgcaggccccaggctccacctatcccctacttttgccagccaggacaatcaggaaaaactagaacagttcatccggcagttcatttgtagctagaactgtgaggaggagcctgtgctgagacttctcagccccagaacacagctgtgtcctagagccagaagatggagaggaggctgcaaacccttagctgctctataaatataatcattgaggcttgattgtcccttgccatctcttgctttttccctcctttgatgtgataaacaaggggacgagacgagttgtcttttccccagcccagcagc

SEQ ID NO: 7954 - protein, 244 aa, Homo sapiens
MDPPPPACAVRGLLAGRVPPQGPWELQGILLLSQNELYRQILLLMHLLPQDLLLLKPCQSSYCYCQEVLDRLIQCGLLVAEELVREQWLRVRPACDTGQRRLSRKLLWKPRRWWGAALTPACPLQLSQQSHCPDFFLFLCRLLSPLLKAFAQAAAFLRQGQLPDTESGYTDQLFQFLQATAQEEGIFECADPKLAISAIWTFRDLGVLQQTPSPAGPRLHLSPTFASQDNQEKLEQFIRQFICS

SEQ ID NO: 7955 - DNA, 1017 bp, Homo sapiens
ctgtgttacccaggctggttttgaactcctgagcttaatcagttctcacctgttttgccctcccaaagtgctatgattacaggtgtgagccaccacgcttggccctgcccgggagtcatttttgtatctacaggtatcttcctatgctgtagacagatgccctttcttgaggcaaaaaccctagccatttttctcttctccttcagagtctggaacatcctctcaactcattcaagtgactactgcctggtgctcttggtggggatgcagggaggcctgagaaggccagtgtctatacagaaagttctaacatagtgcactgagtcaatgtgggcactttaaagccctttcacctgccaagtcacgaagcgcccctacagttgtgtttgtaaaacactggggggtttgagggggaaaagggataactccaaggttccatctttgcatttcagatccacacaacttaaagatctgctgccgagtgaatggggaagtcgtccagagcagcaacaccaaccagatggtattcaagacagaggacctgatagcctgggtctcccagtgagtgacaagggctgtcctgccagccccgctccacctgccacacatgtggaggctgacctgagccctccacctttggctgtggccactcagccagcccctggtctcactgggtccttttgctttgctccaggtttgttaccttttacccaggggatgtcatcctaactgggacccccccaggtgtcggtgtattcaggaaacctcctgtctttctcaagaagggggatgaagtccagtgtgagattgaagaactaggtgtcatcatcaacaaggtggtgtgatggctcctgcacaggcccgacataggatgagggcatctgctcccactcagcctagcccagggaaaggcccagtggcaggtgtgggcaggtgccagccctgcaagccgcctcttctcggtagaagggagaaggacagagctctcttcaataaatgcgtcgggtcaaagcagca

SEQ ID NO: 7956 - protein, 80 aa, Homo sapiens
MITGVSHHAWPCPGVIFVSTGIFLCCRQMPFLEAKTLAIFLFSFRVWNILSTHSSDYCLVLLVGMQGGLRRPVSIQKVLT

SEQ ID NO: 7957 - DNA, 1305 bp, Homo sapiens
acaggacgcgcccgcttctcgctggagtgcgcaccgagcggcagtgacttcgccgctgctgtagttccccggctggatgcggtgactggtgccagtgctcaggcgcccgctgcccttgacctcccgccccgcgagccctaactcagcgcaggaggaccggctgccgccgccgccgccgccaggctctgatgctggtgtctggtagaagaagattactcacagctctgctgcaggctcagaagtggccctttcaaccctccagagacatgagactagtgcagttccgggcaccccacctggtggggcctcacttgggcctggagacagggaatggtggaggggttatcaacctcaatgcctttgaccccacactcccaaagacgatgacgcagttcctagagcagggagaggccaccctctcagtggcaagaagagccttggctgcccagttgccagtcctaccatggtcggaggtaaccttcctggctccagtcacatggccagataaggtggtgtgtgtgggcatgaattatgtggaccactgcaaagaacagaacgtgcccgtgcccaaggagcccatcatcttcagcaagtttgccagctccatcgtggggccctatgatgaggtggtcctcccaccacagagccaggaggtagattgggaagtggagctggccgtggtcattggaaagaaaggcaagcacatcaaggccacagatgccatggcccacgtggccggcttcactgtggctcatgacgtgagtgctcgtgactggctaacaagacgcaatgggaaacagtggctgctgggaaaaaccttcgacaccttctgccctctgggccctgccttggtgaccaaggacagtgtagcagatccacacaacttaaagatctgctgccgagtgaatggggaagtcgtccagagcagcaacaccaaccagatggtattcaagacagaggacctgatagcctgggtctcccagtttgttaccttttacccaggggatgtcatcctaactgggacccccccaggtgtcggtgtattcaggaaacctcctgtctttctcaagaagggggatgaagtccagtgtgagattgaagaactaggtgtcatcatcaacaaggtggtgtgatggctcctgcacaggcccgacataggatgagggcatctgctcccactcagcctagcccagggaaaggcccagtggcaggtgtgggcaggtgccagccctgcaagccgcctcttctcggtagaagggagaaggacagagctctcttcaataaatgcgtcgggtcaaagcagca

SEQ ID NO: 7958 - protein, 314 aa, Homo sapiens; identical to SEQ ID NO: 548

SEQ ID NO: 7959 - DNA, 641 bp, Homo sapiens
atgggataacagctttgagatcccttgccacaggtgttggtgtcacccgtgatctaacctcctgtatggccaaatcccctgcccccataggccacagatgccatggcccacgtggccggcttcactgtggctcatgacgtgagtgctcgtgactggctaacaagacgcaatgggaaacagtggctgctgggaaaaaccttcgacaccttctgccctctgggccctgccttggtgaccaaggacagtgtagcagccaccagttctcccatgggcttccttcccaagccccctagagggaacacaactgcagaggatgtgaaactgcatgcgtgaagtaaattacaaagaacactgagctgatgggtggatcgggcttcctgcggctgccaccatctgaaataatctaagttgagcatcatggagcatagctatcgcaaggcccaggcattttccacactacagatgaaagccagtgtgactcacccagccactgtggaaacaacagcattgaccacacacagtgaggggacagcgccaggttggaggcagtgtgccagagggcagagcgcagcctcttaacacacagccacccacaactgtggtggaggtggggggtgtccacatgggccagccatgccagg

SEQ ID NO: 7960 - protein, 76 aa, Homo sapiens
MAHVAGFTVAHDVSARDWLTRRNGKQWLLGKTFDTFCPLGPALVTKDSVAATSSPMGFLPKPPRGNTTAEDVKLHA

SEQ ID NO: 7961 - DNA, 1238 bp, Homo sapiens
gttccccggctggatgcggtgactggtgccagtgctcaggcgcccgctgcccttgacctcccgccccgcgagccctaactcagcgcaggaggaccggctgccgccgccgccgccgccagcagagccaagcacagtgggaactttcagaaagcactggttgaaggaacgctggaatccctgggacttactgcgtagcatgtagtagttgctcctctacaaaagtttcaccttatgaagtatagcaggctctgatgctggtgtctggtagaagaagattactcacagctctgctgcaggctcagaagtggccctttcaaccctccagagacatgagactagtgcagttccgggcaccccacctggtggggcctcacttgggcctggagacagggaatggtggaggggttatcaacctcaatgcctttgaccccacactcccaaagacgatgacgcagttcctagagcagggagaggccaccctctcagtggcaagaagagccttggctgcccagttgccagtcctaccatggtcggaggtaaccttcctggctccagtcacatggccagataaggtggtgtgtgtgggcatgaattatgtggaccactgcaaagaacagaacgtgcccgtgcccaaggagcccatcatcttcagcaagtttgccagctccatcgtggggccctatgatgaggtggtcctcccaccacagagccaggtcagtgcctccccactgccctccctagtcactgggcccatcacaagggcattctgagctcagtattgagcctactggagccacctctcgctcagtagtgcattcaacagaaactctacaggattatacacacagtagtaacactggccttggaaaaaaaaagttaatgtacgtgttttcctggttacaaaagcaatacaccttcactgtagataaaacagagataaacatttaaaaattacgtcacccataatcccactgcccatggctcggaatattaatgtttttctgtctaccttcccagtgtttctccactcctgtatatgtttatactgtacatatacttaccttttacttaagactccatcaggagcattttttcatgccattaaatattctccctgacatatttaggttaccttggagttttgtgatgtacagggtagtttatattcctgagtaccttactgctggatacttgtttccagtttttggtttctataaataaatgtcgcaatgaacatc

SEQ ID NO: 7962 - protein, 172 aa, Homo sapiens
MLVSGRRRLLTALLQAQKWPFQPSRDMRLVQFRAPHLVGPHLGLETGNGGGVINLNAFDPTLPKTMTQFLEQGEATLSVARRALAAQLPVLPWSEVTFLAPVTWPDKVVCVGMNYVDHCKEQNVPVPKEPIIFSKFASSIVGPYDEVVLPPQSQVSASPLPSLVTGPITRAF

SEQ ID NO: 7963 - DNA, 1159 bp, Homo sapiens
gggcgcgcgagagctgctagggcggtttctctgcctcgggcctgttgggcagggccggctaaggtgcgcgtgctcgctggttctaacccttctgttgggcgtttctgctgagaggcgggaggcgctgagagtctgtgcggaggtccgtggacagactgctttgctcgttgttgctcttcggaggcggcgatccccgaaggcgagctgaaatacggctgcaggctacaatttgcagccgacgattatggaagacggcaagcgggagaggtggcccaccctcatggagcgcttgtgctcggatggcttcgcatttccccaataccccattaaaccgtatcatctgaagaggatccacagagctgtcttacatggtaatctagagaaactgaagtaccttctgctcacgtattatgacgccaataagagagacaggaaggaaaggaccgccctacatttggcctgtgccactggccaaccggaaatggtacatctcctggtgtccagaagatgtgagcttaacctctgcgaccgtgaagacaggacacctctgatcaaggctgtacaactgaggcaggaggcttgtgcaactcttctgctgcaaaatggcgccaatccaaatattacggatttctttggaaggactgctctgcactacgctgtgtataatgaagatacatccatgatagaaaaacttctttcacatggtacaaatattgaagaatgcagcaaggtataggtcaaccaatgttattttcaaactatctgaaatgcatttattttaacattgacacatgtaagggtcaatttttcatatttggaagctcaaacattccttgaatgaaaatattttgaaatgccttaactgtctaagattttactttaaatattggaacttttaaagaagcattatagggaacagccttttttcatgcacttatggtaaataactataaaaacaaatgaattacaataaatttataattcatgacaactgaatttgggaaaggtaatagttaagtgtttttccactaaattactttttttctaatcagtgtgaagtgacacaggaaagtaaaattgtcccttataaataggctttattttaaatgtcaaagaaaattaaagaatttcacaataaatgtacatgttgttgctgttg

SEQ ID NO: 7964 - protein, 163 aa, Homo sapiens
MEDGKRERWPTLMERLCSDGFAFPQYPIKPYHLKRIHRAVLHGNLEKLKYLLLTYYDANKRDRKERTALHLACATGQPEMVHLLVSRRCELNLCDREDRTPLIKAVQLRQEACATLLLQNGANPNITDFFGRTALHYAVYNEDTSMIEKLLSHGTNIEECSKV

SEQ ID NO: 7965 - DNA, 2899 bp, Homo sapiens
ggctaaggtgcgcgtgctcgctggttctaacccttctgttgggcgtttctgctgagaggcgggaggcgctgagagtctgtgcggaggtccgtggacagactgctttgctcgttgttgctcttcggaggcggcgatccccgaaggcgagctgaaatacggctgcaggctacaatttgcagccgacgattatggaagacggcaagcgggagaggtggcccaccctcatggagcgcttgtgctcggatggcttcgcatttccccaataccccattaaaccgtatcatctgaagaggatccacagagctgtcttacatggtaatctagagaaactgaagtaccttctgctcacgtattatgacgccaataagagagacaggaaggaaaggaccgccctacatttggcctgtgccactggccaaccggaaatggtacatctcctggtgtccagaagatgtgagcttaacctctgcgaccgtgaagacaggacacctctgatcaaggctgtacaactgaggcaggaggcttgtgcaactcttctgctgcaaaatggcgccaatccaaatattacggatttctttggaaggactgctctgcactacgctgtgtataatgaagatacatccatgatagaaaaacttctttcacatggtacaaatattgaagaatgcagcaagtgtgaatatcagccactgttatttgctgtgagtcgaagaaaagtgaaaatggtggaatttttattaaagaaaaaagcaaatgtaaatgccattgattatcttggcagatcagccctcatacatgctgttactcttggagaaaaagatatagtcattcttcttctgcagcacaatattgatgtgctttctcgagatgcgtttcgaaagattgcaggagattatgccattgaggctaagaatagagtcatttttgatctaatttatgaatacgaaagaaagagatatgaagatcttcctataaatagcaatccagtgtcttctcagaaacaaccagccttgaaggctacaagtggcaaggaagattctatttcaaatatagccacagaaataaaggatggacaaaaatctgggacagtgtcttctcagaaacaaccggccttgaaggatacaagtgacaaggatgattctgtttcgaacacagccacagaaataaaagatgaacaaaaatctgggacagtgcttcctgctgttgaacagtgtttaaacaggagtctctacagacctgatgctgttgcacagcctgtgacagagaatgagttttctttggaatctgagattatttcaaaactatacatcccaaagagaaagattatttctccacgatctataaaagatgtgcttcctcctgttgaagaggctgttgacaggtgtctctacctactggaccgttttgcacagcctgtgacaaaggataagtttgctttggaatctgagaatatttcagaaccatactttacgaacagaaggactatttctcaacaatctgcagaaaatttagatgctgcatgtggcattgacaaaacagaaaatggaaacatgtttgaagaccaaaatgttgataaggaaggaaaagcactaccagcaactggacaaaaagcaaatgtgtctcctgagcaaccgcctttattcacgaatcttctgagcgacctcctttatccacgcttactctgaaagaggcagatcccagttcaaaagcagccatgagaaggaaggattcaccacctccaggaaaagtgtcttctcagaaacaaccagctgagaaggctacaagtgacgacaaagattctgtttcaaatatagccacagaaataaaggagggaccaatatctgggacagtgtcttctcagaaacaaccagctgagaaggctacaagtgacgagaaagattctgtttcaaatatagccacagaaataaagaagggacaacaatctgggacagtgtctcctcagaaacaatcggcctggaaggttatatttaaaaagaaagtttctcttttgaatattgccacaagaataatgggtggtgggaaatctggaacagtgtcttctcagaaacaaccagcctcaaaggctacaagtgacaagacagattctgctttgaatatagctacagaaataaaggatggactacagtgtgggacagtgtcttctcagaagcaaccagccttgaaggctacaactgacgaggaagattctgtttcgaatatagccacagaaataaaggatggagaaaaatctgggacagtgtcttctcagaaacaaccagccttgaaggctacaactgatgagaaagattctgtttcgaacatagccacagaaataaaggatggagaaaaatctgggacagtgtcttctcagaaaccaccagccttgacggctacaagtgacgaggaaggttctgttttgagtatagccagagaaaacaaggatggagaaaaatctaggacagtgtcttctcggaaaaaaccagccttgaaggctacaagtgatgagaaggattctttttcgaatataaccagaggaaaaaaggatggagaaatatctaggaaagtgtcttctcagaaaccaccaaccttgaagtgtcttctgagaaaccaccaggcttgaagtgtcttctcggaaaaaaccatccttggaggccacaagtgatgagaaggattctttttcgaatataaccagagaaaaaaaggatggagaaatatctaggaaagtgtcttctcagaaaccaccagccttgaagggtacaagtgacgaggaagattctgttttgggtatagccagagaaaacaaggatggagaaaaatctaggacagtgtcttctgagaaaccaccaggcttgaaggctacaagtgatgagaaagattctgttttgaatatagccagagg

SEQ ID NO: 7966 - protein, 498 aa, Homo sapiens; identical to SEQ ID NO: 550

SEQ ID NO: 7967 - DNA, 724 bp, Homo sapiens
gagaggcgggaggcgctgagagtctgtgcggaggtccgtggacagactgctttgctcgttgttgctcttcggaggcggcgatccccgaaggcgagctgaaatacggctgcaggctacaatttgcagccgacgattatggaagacggcaagcgggagaggtggcccaccctcatggagcgcttgtgctcggatggcttcgcatttccccaataccccattaaaccgtatcatctgaagaggatccacagagctgtcttacatggtaatctagagaaactgaagtaccttctgctcacgtattatgacgccaataagagagacaggaaggaaaggaccgccctacatttggcctgtgccactggccaaccggaaatggtacatctcctggtgtccagaagatgtgagcttaacctctgcgaccgtgaagacaggacacctctgatcaaggctgtacaactgaggcaggaggcttgtgcaactcttctgctgcaaaatggcgccaatccaaatattacggatttctttggaaggactgctctgcactacgctgtgtataatgaagatacatccatgatagaaaaacttctttcacatggtacaaatattgaagaatgcagcaagtgtcttctcagaaacaaccagccttgaaggctacaagtggcaaggaagattctatttcaaatatagccacagaaataaaggatggacaaaaatctgggacagg

SEQ ID NO: 7968 - protein, 170 aa, Homo sapiens
MEDGKRERWPTLMERLCSDGFAFPQYPIKPYHLKRIHRAVLHGNLEKLKYLLLTYYDANKRDRKERTALHLACATGQPEMVHLLVSRRCELNLCDREDRTPLIKAVQLRQEACATLLLQNGANPNITDFFGRTALHYAVYNEDTSMIEKLLSHGTNIEECSKCLLRNNQP

SEQ ID NO: 7969 - DNA, 737 bp, Homo sapiens
gcgctgagagtctgtgcggaggtccgtggacagactgctttgctcgttgttgctcttcggaggcggcgatccccgaaggcgagctgaaatacggctgcaggctacaatttgcagccgacgattatggaagacggcaagcgggagaggtggcccaccctcatggagcgcttgtgctcggatggcttcgcatttccccaataccccattaaaccgtatcatctgaagaggatccacagagctgtcttacatggtaatctagagaaactgaagtaccttctgctcacgtattatgacgccaataagagagacaggaaggaaaggaccgccctacatttggcctgtgccactggccaaccggaaatggtacatctcctggtgtccagaagatgtgagcttaacctctgcgaccgtgaagacaggacacctctgatcaaggctgtacaactgaggcaggaggcttgtgcaactcttctgctgcaaaatggcgccaatccaaatattacggatttctttggaaggactgctctgcactacgctgtgtataatgaagatacatccatgatagaaaaacttctttcacatggtacaaatattgaagaatgcagcaaggtataggtcaaccaatgttattttcaaactatctgaaatgcatttattttaacattgacacatgtaagggtcaatttttcatatttggaagctcaaacattccttgaatgaaaatattttgaaatgcc

SEQ ID NO: 7970 - protein, 163 aa, Homo sapiens; identical to SEQ ID NO: 7964

SEQ ID NO: 7971 - DNA, 624 bp, Homo sapiens
gcggaggtccgtggacagactgctttgctcgttgttgctcttcggaggcggcgatccccgaaggcgagctgaaatacggctgcaggctacaatttgcagccgacgattatggaagacggcaagcgggagaggtggcccaccctcatggagcgcttgtgctcggatggcttcgcatttccccaataccccattaaaccgtatcatctgaagaggatccacagagctgtcttacatggtaatctagagaaactgaagtaccttctgctcacgtattatgacgccaataagagagacaggaaggaaaggaccgccctacatttggcctgtgccactggccaaccggaaatggtacatctcctggtgtccagaagatgtgagcttaacctctgcgaccgtgaagacaggacacctctgatcaaggtatatagtagctgactctttgagcatgagatggatttggttgaagtacataggataaaatgaatttatctcattggaataccaccatataactagtaggaaatcctacggagtgtttattttgatttttcagtatttgcatgtttctcggtctaatactgacaggctgtacaactgaggcaggaggcttgtgcaactcttctg

SEQ ID NO: 7972 - protein, 108 aa, Homo sapiens
MEDGKRERWPTLMERLCSDGFAFPQYPIKPYHLKRIHRAVLHGNLEKLKYLLLTYYDANKRDRKERTALHLACATGQPEMVHLLVSRRCELNLCDREDRTPLIKVYSS

SEQ ID NO: 7973 - DNA, 362 bp, Homo sapiens
gaatatttcagaaccatactttacgaacagaaggactatttctcaacaatctgcagaaaatttagatgctgcatgtggcattgacaaaacagaaaatggaaacatgtttgaagaccaaaatgttgataaggaaggaaaagcactaccagcaactggacaaaaagcaaatgtgaatgaaaagatggcaagagaactaaagttgagaatccagaagttgaaaatatcagaagccttcatgactgtggatgacatgagtatttttagaaacgatttttctccaagtagatatctaaagtaatgattgagagcatttcctgccagcagaagcgaatgatacattttcttttctttttttttgagac

SEQ ID NO: 7974 - protein, 64 aa, Homo sapiens
MFEDQNVDKEGKALPATGQKANVNEKMARELKLRIQKLKISEAFMTVDDMSIFRNDFSPSRYLK

SEQ ID NO: 7975 - DNA, 483 bp, Homo sapiens
gataccttgcatgaaagacatggaggatgatgtagcacctgctttgacattgattctcaggtgtatgagttgctcctctgattttagatcacttttgtcctcatcattcagcatattcacattgatagtaacactgtttcattttagttttagacatatgaaaaatcataccatgattgacattgtaagggtttattttgtgaaacctgtatttcttttttttcagtgtatttctggtcatgttccagtccccagacacaaaaatcaaagcctatactaatacaggcaggagcatacagcttgatgctaacacttcatgaatgtatagataactttatcatatttacatatgagtgattatgtatcccttttgcttttcagtgtcttctcagaaacaaccagcctcaaaggctacaagtgacaagacagattctgctttgaatatagctacagaaataaaggatggactacagtgtgggacag

SEQ ID NO: 7976 - protein, 40 aa, Homo sapiens
MYPFCFSVSSQKQPASKATSDKTDSALNIATEIKDGLQCG

SEQ ID NO: 7977 - DNA, 484 bp, Homo sapiens
aagttaaagagcatgatgaatgtttgcagtataatggtgtaaatcctcttaatttgttgcatgaaagacatgtgggatcatgtagcacctgttttgacattgattctcacgtatatgagttgctcctctgattttagatcacatttgttctcatcactcggcatatccacattgagattgacacggttttattttagttttcgacacatgacaaatcttaccatgtttgaaatcgtaagggtgtatttcacagagcctgtgttcccttttttcagtgtatttctgtcatgttctgatccccagacacaaagtagaagccatcaaagcctccactaatacaagcaggaggacagaggttgatgctaacactgtgtgaatctatggataattttatcatgtttacatgtgagtgattatgtatcccttttgcttttcagtgtcttctcggaaaaaaccatccttggaggccacaagtgatgagaag

SEQ ID NO: 7978 - protein, 91 aa, Homo sapiens
MKDMWDHVAPVLTLILTYMSCSSDFRSHLFSSLGISTLRLTRFYFSFRHMTNLTMFEIVRVYFTEPVFPFFSVFLSCSDPQTQSRSHQSLH

SEQ ID NO: 7979 - DNA, 246 bp, Homo sapiens
ctcagcgtatttctgtcacgttctaatccccagaccaaaattagaagccatcaaagcatacgctaatacaggcaggaggacagaggctgatgctaacactgcatgaatgtatggataattttgtcatttttacatatgagtgattaggaatcccttttacttttcagtgtcttctgagaaaccaccaggcttgaaggctacaagtgatgagaaagattctgttttgaatatagccagaggaaaaaa

SEQ ID NO: 7980 - protein, 34 aa, Homo sapiens
VIRNPFYFSVSSEKPPGLKATSDEKDSVLNIARG

SEQ ID NO: 7981 - DNA, 400 bp, Homo sapiens
tatatttcatggagcctgtgttccctttttcagtgtatttctgtcatgttctgatccccagacacaaagtagaagccatcaaagcctccactaatacaggcaggaggacagaggttgatgctaacactgtgtgaatgtatggataactttatcatatttacatgtgagtgattatgtatcccttttgcttttcagtgtcttctcggaaaaaaccagccttgaagtgtcttctccgaaacaaccagcattgaaggctatctgtgacaaggaagattctgttccgaatatggccacggaaaaaaaggatgaacaaatatctgggacaggtaattttgcaaacacatttaatatgatgttcggtcagggtagaagagaacttctcttcaccaaataaaacagc

SEQ ID NO: 7982 - protein, 41 aa, Homo sapiens
MEPVFPFSVYFCHVLIPRHKVEAIKASTNTGRRTEVDANTV

SEQ ID NO: 7983 - DNA, 5042 bp, Homo sapiens
attgaggctaatatattatcctttggtgccatgagtggatgaagaaactttcagaaggctaaacgagtggatacaagaaacttaggcaaattattacaccacaggggtgtgagaaataatgaatattctctactaggtttcagcaaacataatccaagctgatcaatttaggacacttccactgaagagacgtgaagtgtacgttcaactgaagtgtcattgtaattgtgtgccttctcagttattgggcaagttaaagagcatgatgaatgtttgtactataatggtgtaaatccttctgatttcttgcatggaagacatgtggcatcatgtagaacctgctttgacattgattctcaattgtatgagttgctcctctgattttagatcacatttgtcctcatcacttggcatatccacattgatattgacacggttttattttagttttagacatatgacaaatcatgccatgtttgaaattgtaagtatattttgtgaagcctgtattcacctttttcagtgtatttctgtcatattccagtcccgagtcacaaagtagaaaacatcaaagcctatactaatacaggcaggaagatacatcttgatgccaacagtgcaggaatgtatggataactttatcatatttacatatgagtgattatgtatcccttttgcttttcagtgtcttgtcagaaacaaccagccttgaaggctacaagtgacaagaaagattctgtttcgaatatacccacagaaataaaggatggacaacaatctggaacagtgtcttctcagaaacaaccggcctggaaggctacaagtgtcaagaaagattctgtttcgaatatagccacagaaataaaggatggacaaatacgtgggacagtgtctcctcagaaacaatcggcccagaaggttatatttaaaaagaaagtttctcttttgaatattgccacaagaataacaggcggttggaaatctggaacagagtatcctgagaatctgcccaccttgaaggctacaattgaaaataaaaattctgttctgaatacagccaccaaaatgaaggatgtacaaacatccacaccagcagaacaagacttagaaatggcatcagagggagagcaaaagaggcttgaagaatatgaaaataaccagccacaggtgaaaaaccaaatacattctagggatgaccttgatgacataattcagtcatctcaaacagtctcagaggacggtgactcgctttgctgtaattgtaagaatgtcatattactcattgatcaacatgaaatgaagtgtaaagattgtgttcacctattgaaaattaaaaatacattttgtttatggaaaagattaataaaacttaaagataaccactgtgagcaacttagagtaaaaattcgaaaactgaaaaataaggctagtgtactacaaaagagaatatctgaaaaagaagaaataaaatcgcagttaaagcatgaaatacttgaattggaaaaagaactctgtagtttgagatttgccatacagcaagaaaaaaagaaaagaagaaatgttgaagaggtgcaccaaaaagttagggaaaagttaagaataacagaagagcaatataggatagaagctgatgtgacaaaaccaattaaaccggctctcaaatcagcagaggtggaattgaagacaggaggaaataattcaaatcaggtttctgaaactgatgaaaaagaagacctgctgcatgaaaaccgcttgatgcaagatgaaattgccaggctcaggctggaaaaagacacaataaaaaaccaaaacctggaaaagaaatacttaaaagactttgaaattgtgaaaagaaagcatgaagaccttcaaaaggctctaaaacggaatggggaaacattagcaaaaacgatagcctgttatagtggacagcttgctgctctgacagatgaaaacacaacgctccgttccaaactggagaagcaaagagagagcaggcaaagactggaaacagaaatgcaatcataccattgtagactgaatgctgctcgatgtgatcatgatcaaagtcactcatcaaaaagagaccaagagcttgctttccagggcacagtagataaatgtcgtcacttacaggaaaatttgaattctcatgttctgattctttctctgcaactttctaaagctgagagtaagtccagagtcctcaaaactgagctccattacacaggagaggctctgaaagaaaaggctttggtttttgaacacgtgcaaagtgagctaaagcaaaaacagagtcaaatgaaggacattgaaaaaatgtacaaaagtggatacaatacaatggaaaaatgcatagaaaaacaggaaagattttgtcaactaaaaaaacaaaatatgttgcttcaacagcaactggatgatgctcgcaacaaagctgacaatcaagaaaaagcaatacttaatattcaagccagatgtgatgctagagtacaaaaccttcaagctgagtgcagaaagcaccgtcttttactagaagaagacaataaaatgttggtcaatgaactgaatcattcgaaagaaaaagaatgccaatatgaaaaagagaaagcagaaagagaagtagctgtgagacagcttcaacaaaaacgagatgatgtcttaaacaaaggatcagcaacaaaagctctgctggatgcttcatcgcgtcactgcacctatttagaaaatgggatgcaggattcaaggaagaaattagaccagatgagaagtcaagtatgtatgcaactttgcacaccaacaactgttaatctgtagctagttaactaatataaagtgttttggggtactaattttagtggatggctttcttttgtatttttatgataattaatgttattaaaattttatagtggatggctttcttctgtattttccttattattaattttattaagattttattataatgcacctatatcttaatctctggctttcattctgccattttttatacatatatttttttcttaaatatttaaccttaggaaagttgagaattatgcatcatttctcacagaagttgagagagtttttttttcctgttaaacagtctatttttaatgatttctctattggcatggtgaggcaagccaggttaattcagaggataatgtctaatggaatgtttcagaaaattatcttctttttagtctctacttttctgaatgtataaagaacctgtgtatacgtatttcttagatttcaggttaacttgttcagaaaggccattttactgaataaatttttatttcgatgaaaatccttacttcctttgtattgggctcagagagcacactctgtctctatatgaatatggacagttagcatttgccaacatgtatctattttctcttatttgtagaaaaagctaaactaaaaagggggttatagaaggtcagcaaaggatgggtttgagatgtttgggttggttaagtgggcatttagacaacagggcttctcctttggcatgtttaatggacatctttgcagtttaagatgacgcttttaaattacttctctcctaatgatgacctgagtcctgctattcaatgggagagtcaataagatcctgtaggatcttatttggaactgactttgtcgattttaattttgttcctgcttgtttttaaattttcttgttgtttccctagaaaggaaagatgatgcttagttttaaatatttaaaaatgtgcaagttgctttgctataataaaactaaatgcatacatacaaaaaataaaattatagttgatgtggtagtgtttggaattcaaaatataaatgcttagcgtgaggtaatcctttatctttccacattttaccagtttgtaagtttgagtatttaattgataaaatgtaattcaaaagcaagaagaatgttgtgttttagtcctagagcaggggtctgtgaacttttctgtaaagggccagatagtgttatgtaaggctttgtgagccataagatccttgttgcaataactcggccctgcaattacagcacaaaagtagccatgaacaatatgcagactgaaggggtgtagcagtgtcccactaaaattacttacaaaaaacaggtaatgggatgatttctcctagattatgaccttttataaataaaaaagattgtgatagtctaaaatatttcatatatattttgttgattcattcatctactgatggacatttaggtcatttccaaatgtaattttttaaaattctttgtttcagtttcaagaaatacaggatcaacttacagctactataagatgtactaaggagatggaaggcgacacacaaaagtaaaatttgaagcagcacacaaaataacttgagtatttataaagcaaaagagcactgtagtatgaaaattgtatcagttatgataattagtatgtctttgtgaagccaaaaaagtttcatttgtaagctatatcgaaatacatcatttttctacattattcctaaattttgcatattatcaccaaaacacaggtagaaaatgacacagtagcccaatcgtctacttttgtgattgctaagaatttgtgtaattataccttcagaagtttgtttagaatttacatgatttaaaaaaaattacgtgtgagagtaattattttaaaatgcacattttaggcttgaagtagaacatgtgatgatgagaaaaattattaaaaaacaggatgaccaaattgagcggcttgagaaaatcctgcagcattcaagtttggtaagctgatctcttaatttctgtcatactgaaaaggaattttatttttccagtaggatgggttaaatatcccttgtccaaaatgcttgggaccaaaagtagatttttttcagattttggaatatttgtatatacctaatgaaatatcttgcggatggtacctgagtctaaacatgaaattcatttgtgtttcatatataccttatgcacatagcctgaaggtaattctctacaatgttttacagtaatt

SEQ ID NO: 7984 - protein, 717 aa, Homo sapiens
MYPFCFSVSCQKQPALKATSDKKDSVSNIPTEIKDGQQSGTVSSQKQPAWKATSVKKDSVSNIATEIKDGQIRGTVSPQKQSAQKVIFKKKVSLLNIATRITGGWKSGTEYPENLPTLKATIENKNSVLNTATKMKDVQTSTPAEQDLEMASEGEQKRLEEYENNQPQVKNQIHSRDDLDDIIQSSQTVSEDGDSLCCNCKNVILLIDQHEMKCKDCVHLLKIKNTFCLWKRLIKLKDNHCEQLRVKIRKLKNKASVLQKRISEKEEIKSQLKHEILELEKELCSLRFAIQQEKKKRRNVEEVHQKVREKLRITEEQYRIEADVTKPIKPALKSAEVELKTGGNNSNQVSETDEKEDLLHENRLMQDEIARLRLEKDTIKNQNLEKKYLKDFEIVKRKHEDLQKALKRNGETLAKTIACYSGQLAALTDENTTLRSKLEKQRESRQRLETEMQSYHCRLNAARCDHDQSHSSKRDQELAFQGTVDKCRHLQENLNSHVLILSLQLSKAESKSRVLKTELHYTGEALKEKALVFEHVQSELKQKQSQMKDIEKMYKSGYNTMEKCIEKQERFCQLKKQNMLLQQQLDDARNKADNQEKAILNIQARCDARVQNLQAECRKHRLLLEEDNKMLVNELNHSKEKECQYEKEKAEREVAVRQLQQKRDDVLNKGSATKALLDASSRHCTYLENGMQDSRKKLDQMRSQVCMQLCTPTTVNL

SEQ ID NO: 7985 - DNA, 1301 bp, Homo sapiens
ttaggtttctgaaactgatgaaaaagaagacctgctgcatgaaaaccgcttgatgcaagatgaaattgccaggctcaggctggaaaaagacacaataaaaaaccaaaacctggaaaagaaatacttaaaagactttgaaattgtgaaaagaaagcatgaagaccttcaaaaggctctaaaacggaatggggaaacattagcaaaaacgatagcctgttatagtggacagcttgctgctctgacagatgaaaacacaacgctccgttccaaactggagaagcaaagagagagcaggcaaagactggaaacagaaatgcaatcataccattgtagactgaatgctgctcgatgtgatcatgatcaaagtcactcatcaaaaagagaccaagagcttgctttccagggcacagtagataaatgtcgtcacttacaggaaaatttgaattctcatgttctgattctttctctgcaactttctaaagctgagagtaagtccagagtcctcaaaactgagctccattacacaggagaggctctgaaagaaaaggctttggtttttgaacacgtgcaaagtgagctaaagcaaaaacagagtcaaatgaaggacattgaaaaaatgtacaaaagtggatacaatacaatggaaaaatgcatagaaaaacaggaaagattttgtcaactaaaaaaacaaaatatgttgcttcaacagcaactggatgatgctcgcaacaaagctgacaatcaagaaaaagcaatacttaatattcaagccagatgtgatgctagagtacaaaaccttcaagctgagtgcagaaagcaccgtcttttactagaagaagacaataaaatgttggtcaatgaactgaatcattcgaaagaaaaagaatgccaatatgaaaaagagaaagcagaaagagaagtagctgtgagacagcttcaacaaaaacgagatgatgtcttaaacaaaggatcagcaacaaaagctctgctggatgcttcatcgcgtcactgcacctatttagaaaatgggatgcaggattcaaggaagaaattagaccagatgagaagtcaatttcaagaaatacaggatcaacttacagctactataagatgtactaaggagatggaaggcgacacacaaaagtaaaatttgaagcagcacacaaaataacttgagtatttataaagcaaaagagcactgtagtatgaaaattgtatcagttatgataattagtatgtctttgtgaagccaaaaaagtttcatttgtaagctatatcgaaatacatcatttttctacatt

SEQ ID NO: 7986 - protein, 364 aa, Homo sapiens
MQDEIARLRLEKDTIKNQNLEKKYLKDFEIVKRKHEDLQKALKRNGETLAKTIACYSGQLAALTDENTTLRSKLEKQRESRQRLETEMQSYHCRLNAARCDHDQSHSSKRDQELAFQGTVDKCRHLQENLNSHVLILSLQLSKAESKSRVLKTELHYTGEALKEKALVFEHVQSELKQKQSQMKDIEKMYKSGYNTMEKCIEKQERFCQLKKQNMLLQQQLDDARNKADNQEKAILNIQARCDARVQNLQAECRKHRLLLEEDNKMLVNELNHSKEKECQYEKEKAEREVAVRQLQQKRDDVLNKGSATKALLDASSRHCTYLENGMQDSRKKLDQMRSQFQEIQDQLTATIRCTKEMEGDTQK

SEQ ID NO: 7987 - DNA, 1338 bp, Homo sapiens
ttaggtttctgaaactgatgaaaaagaagacctgctgcatgaaaaccgcttgatgcaagatgaaattgccaggctcaggctggaaaaagacacaataaaaaaccaaaacctggaaaagaaatacttaaaagactttgaaattgtgaaaagaaagcatgaagaccttcaaaaggctctaaaacggaatggggaaacattagcaaaaacgatagcctgttatagtggacagcttgctgctctgacagatgaaaacacaacgctccgttccaaactggagaagcaaagagagagcaggcaaagactggaaacagaaatgcaatcataccattgtagactgaatgctgctcgatgtgatcatgatcaaagtcactcatcaaaaagagaccaagagcttgctttccagggcacagtagataaatgtcgtcacttacaggaaaatttgaattctcatgttctgattctttctctgcaactttctaaagctgagagtaagtccagagtcctcaaaactgagctccattacacaggagaggctctgaaagaaaaggctttggtttttgaacacgtgcaaagtgagctaaagcaaaaacagagtcaaatgaaggacattgaaaaaatgtacaaaagtggatacaatacaatggaaaaatgcatagaaaaacaggaaagattttgtcaactaaaaaaacaaaatatgttgcttcaacagcaactggatgatgctcgcaacaaagctgacaatcaagaaaaagcaatacttaatattcaagccagatgtgatgctagagtacaaaaccttcaagctgagtgcagaaagcaccgtcttttactagaagaagacaataaaatgttggtcaatgaactgaatcattcgaaagaaaaagaatgccaatatgaaaaagagaaagcagaaagagaagtagctgtgagacagcttcaacaaaaacgagatgatgtcttaaacaaaggatcagcaacaaaagctctgctggatgcttcatcgcgtcactgcacctatttagaaaatgggatgcaggattcaaggaagaaattagaccagatgagaagtcaatttcaagaaatacaggatcaacttacagctactataagatgtactaaggagatggaaggcgacacacaaaagcttgaagtagaacatgtgatgatgagaaaaattattaaaaaacaggatgaccaaattgagcggcttgagaaaatcctgcagcattcaagtttgatgctgcaggtgtttgagagctagatgaaggtatgttgccaaaatttatgaattaaattcaaatcattgatttctgaaataaactctaagtagtgaacggt

SEQ ID NO: 7988 - protein, 402 aa, Homo sapiens
MQDEIARLRLEKDTIKNQNLEKKYLKDFEIVKRKHEDLQKALKRNGETLAKTIACYSGQLAALTDENTTLRSKLEKQRESRQRLETEMQSYHCRLNAARCDHDQSHSSKRDQELAFQGTVDKCRHLQENLNSHVLILSLQLSKAESKSRVLKTELHYTGEALKEKALVFEHVQSELKQKQSQMKDIEKMYKSGYNTMEKCIEKQERFCQLKKQNMLLQQQLDDARNKADNQEKAILNIQARCDARVQNLQAECRKHRLLLEEDNKMLVNELNHSKEKECQYEKEKAEREVAVRQLQQKRDDVLNKGSATKALLDASSRHCTYLENGMQDSRKKLDQMRSQFQEIQDQLTATIRCTKEMEGDTQKLEVEHVMMRKIIKKQDDQIERLEKILQHSSLMLQVFES

SEQ ID NO: 7989 - DNA, 2831 bp, Homo sapiens
ttaggtttctgaaactgatgaaaaagaagacctgctgcatgaaaaccgcttgatgcaagatgaaattgccaggctcaggctggaaaaagacacaataaaaaaccaaaacctggaaaagaaatacttaaaagactttgaaattgtgaaaagaaagcatgaagaccttcaaaaggctctaaaacggaatggggaaacattagcaaaaacgatagcctgttatagtggacagcttgctgctctgacagatgaaaacacaacgctccgttccaaactggagaagcaaagagagagcaggcaaagactggaaacagaaatgcaatcataccattgtagactgaatgctgctcgatgtgatcatgatcaaagtcactcatcaaaaagagaccaagagcttgctttccagggcacagtagataaatgtcgtcacttacaggaaaatttgaattctcatgttctgattctttctctgcaactttctaaagctgagagtaagtccagagtcctcaaaactgagctccattacacaggagaggctctgaaagaaaaggctttggtttttgaacacgtgcaaagtgagctaaagcaaaaacagagtcaaatgaaggacattgaaaaaatgtacaaaagtggatacaatacaatggaaaaatgcatagaaaaacaggaaagattttgtcaactaaaaaaacaaaatatgttgcttcaacagcaactggatgatgctcgcaacaaagctgacaatcaagaaaaagcaatacttaatattcaagccagatgtgatgctagagtacaaaaccttcaagctgagtgcagaaagcaccgtcttttactagaagaagacaataaaatgttggtcaatgaactgaatcattcgaaagaaaaagaatgccaatatgaaaaagagaaagcagaaagagaagtagctgtgagacagcttcaacaaaaacgagatgatgtcttaaacaaaggatcagcaacaaaagctctgctggatgcttcatcgcgtcactgcacctatttagaaaatgggatgcaggattcaaggaagaaattagaccagatgagaagtcaagcttgaagtagaacatgtgatgatgagaaaaattattaaaaaacaggatgaccaaattgagcggcttgagaaaatcctgcagcattcaagtttgatgctgcaggtgtttgagagctagatgaagcatccagccaaactagactacatggagctccacagtgatcgtcttcacctccagctgtttgcatttacttcttccctctatcctacatgtgttttccttccccttcagatatcaacctatgaattgcctctaccaaaaagcctacaatattgacacaaacctgggctagtatcccttctatgtcttccaataagtgctgtcttatgcttgtcattgtatgtatgactctgtatgggaattgcctgtttgttttttcagattatagcatacagttgttgaggggcggaccgtatcatctttatcttgtaattccagtgcttgtcctagtaccttagcacatggttgctgaatacatgaacgaagagtgagaaaccagaagctctgatacttaactgccatgataatgaattcggtgtgcaactatgggcaaattatatttaatagtaattgcatattgtacatatttttcattcttattaacactgataagcttttcagcatatactgactttctcttagttaactgtgaaatcatttagataaagaatataattctttttcattctaacttctgaatttaaatctgaatcctctatagcaggggtccccaactcccaggccacacacagttccatgacctgttaggaagcaggctgcacagcaggaggtgagtggcaggcaagcgagtgaagcttcatctgtatttccagccactccctgttgctcacattatcacctgagctctgcctcctgtcagatcagcaaagccattagattctcacaggagtgaaaatcctactgtgaactgctcgttcaagggatctaggtcacatgctccttatgagactctaatgcctgatgatatgtcattgtctcctatctcttcacgatgggaccatctagttacagaaaaacaagctcaggactcccattgattctccattatgatgagttgtgtaattatttcattatgtattacaatgtagtcataataggaataaagtgcacaatagatgtaatacgcttgaatcaccatcctgaaaccatcccccaaacccccatctgtggaaaaattatctttcacaaaactgctgcctggtgccaaaaaggctggggactgctgctctatagcttctgcactagaatctactaatgagtaaaatttaaatcaataactagttttaaaagcataacaagaatatgtgctgtctggctgcagtggctcatgcctgtattctcagcactttgggaggccagtgcaggtggatcacttgaggtcaggagttcaagaccagcctggccaatatggtgaaatcctgtctctactaaaaatacaaaaattagctgggtgtggtggtgcatgcctgtagtctcagctactcgggaggctgaggtgggagaatcacttgaacccgggaggcagaggtttcagtgagccaagatcgtgccactgcactccagcctgagcaacagagtgactccatctcaaatgcaaaacaaaacagaaagaatacatgctgacgaaaaaaatctaagacaataaaattgtattactaggctgttaacatgatattttgtttcccgttaaatgtgtgacatgcaaaagtatttattaaatgaaaatattttttatct

SEQ ID NO: 7990 - protein, 341 aa, Homo sapiens
MQDEIARLRLEKDTIKNQNLEKKYLKDFEIVKRKHEDLQKALKRNGETLAKTIACYSGQLAALTDENTTLRSKLEKQRESRQRLETEMQSYHCRLNAARCDHDQSHSSKRDQELAFQGTVDKCRHLQENLNSHVLILSLQLSKAESKSRVLKTELHYTGEALKEKALVFEHVQSELKQKQSQMKDIEKMYKSGYNTMEKCIEKQERFCQLKKQNMLLQQQLDDARNKADNQEKAILNIQARCDARVQNLQAECRKHRLLLEEDNKMLVNELNHSKEKECQYEKEKAEREVAVRQLQQKRDDVLNKGSATKALLDASSRHCTYLENGMQDSRKKLDQMRSQA

SEQ ID NO: 7991 - DNA, 853 bp, Homo sapiens
actcggccctgcaattacagcacaaaagtagccatgaacaatatgcagactgaaggggtgtagcagtgtcccactaaaattacttacaaaaaacaggtaatgggatgatttctcctagattatgaccttttataaataaaaaagattgtgatagtctaaaatatttcatatatattttgttgattcattcatctactgatggacatttaggtcatttccaaatgtaattttttaaaattctttgtttcagtttcaagaaatacaggatcaacttacagctactataagatgtactaaggagatggaaggcgacacacaaaagtaaaatttgaagcagcacacaaaataacttgagtatttataaagcaaaagagcactgtagtatgaaaattgtatcagttatgataattagtatgtctttgtgaagccaaaaaagtttcatttgtaagctatatcgaaatacatcatttttctacattattcctaaattttgcatattatcaccaaaacacaggtagaaaatgacacagtagcccaatcgtctacttttgtgattgctaagaatttgtgtaattataccttcagaagtttgtttagaatttacatgatttaaaaaaaattacgtgtgagagtaattattttaaaatgcacattttaggcttgaagtagaacatgtgatgatgagaaaaattattaaaaaacaggatgaccaaattgagcggcttgagaaaatcctgcagcattcaagtttgatgctgcaggtgtttgagagctagatgaaggtatgttgccaaaatttatgaattaaattcaaatcattgatttctgaaataaactctaagtagtgaacggt

SEQ ID NO: 7992 - protein, 32 aa, Homo sapiens
MMRKIIKKQDDQIERLEKILQHSSLMLQVFES

SEQ ID NO: 7993 - DNA, 576 bp, Homo sapiens
tttgagcaagatcttaaagaaaatcagatgccttcacctgaccactgcttggtgatcccatggcactttgtacatctctccattagctctcatctcaccagcccatcattattgtatgtgctgccttctgaagcttgcagctggctacatcagtccaatgtgaataacaaaatgaagaatatcaggatgattcgagaccaggaatactacagatgtccaacacttccacctggaatccccaaagaggcccgcttttagcctccacactggttggtgacctgacatgagagaaatgacagaaatctcagaagactggcctcatgaataatcttcagtttcaatgtaacaaagcaagccttctagaaattacctgcctctgcagttcactctgctgcttcagatgaaaattttcagagttccaccacccctggagaatacagcaactgtttactgcaatcagcaatcaggatggagaattcgtgctgtgggggccaatccaggggttccctgtcatgagcagtggggagtgtgtagaacccatgagagatgggctttggtcaattaaagcttgttgaa

SEQ ID NO: 7994 - protein, 76 aa, Homo sapiens
MPSPDHCLVIPWHFVHLSISSHLTSPSLLYVLPSEACSWLHQSNVNNKMKNIRMIRDQEYYRCPTLPPGIPKEARF

SEQ ID NO: 7995 - DNA, 787 bp, Homo sapiens
atcccacatcaaaaagttaggaagaactcaaattaataacctaacatcacaactgaaagaactagagaagcaagacaaaaccccaaagctagaggaagacaagaaataactgaaaatctgagctgaactgaaagaaaccgagacatgaaaaaaagaaattcaaaagatctatgaattccgggtgatggcatcagctgagaagggaaggaagcccatgagaggacactgaagaaggagtgagcagacaataagaagcccacagaagacagagaaggaacaactagagggagaagccaaggcaggcgtgtgtgtttctccacagacactacccaaagcagtgcttcactacagtggcagacagacctgaaaattttcatctgaagcagcagagtgaactgcagaggcaggtcaccaaccagtgtggaggctaaaagcgggcctctttggggattccaggtggaagtgttggacatctgtagtattcctggtctcgaatcatcctgatattcttcattttgttattcacattggactaggagatagaatctcactatgttgaccaggctggtcttgaactcttggcacccaagcgatccttttgcctggaatcccaaagtgtcagatttactgaagaatatttcattgtaattactttttatactttataggtcaagagctctgttttaaatacaaaatttattgaatatactttttcaaacaaagtttcatgttctaatcattgtctgatttcagcattaaatgaaacacagtaaagaaagttgggctg

SEQ ID NO: 7996 - protein, 31 aa, Homo sapiens
MLTRLVLNSWHPSDPFAWNPKVSDLLKNISL

SEQ ID NO: 7997 - DNA, 576 bp, Homo sapiens
aagttaggaagaactcaaattaataacctaacatcacaactgaaagaactagagaagcaagacaaaaccccaaagctagaggaagacaagaaataactgaaaatctgagctgaactgaaagaaaccgagacatgaaaaaaagaaattcaaaagatctatgaattccggtttctccacagacactacccaaagcagtgcttcactacagtggcagacagacctgaaaattttcatctgaagcagcagagtgaactgcagaggcaggtcaccaaccagtgtggaggctaaaagcgggcctctttggggattccaggtggaagtgttggacatctgtagtattcctggtctcgaatcatcctgatattcttcattttgttattcacattggactaggagatagaatctcactatgttgaccaggctggtcttgaactcttggcacccaagcgatccttttgcctggaatcccaaagtgtcagatttactgaagaatatttcattgtaattactttttatactttataggtcaagagctctgttttaaatacaaaatttattgaatatactttttcaaac

SEQ ID NO: 7998 - protein, 31 aa, Homo sapiens; identical to SEQ ID NO: 7996

SEQ ID NO: 7999 - DNA, 2192 bp, Homo sapiens
gatctttcacctccctggttagctgtattcctaggtatcttattttttctgtgtgtagcaattatgaatgggattgtgttcttcatttgactctctgcttgacttgatgtataggactgctagtaatttttgcacattgattttgtatgctaagactttgctaaagtttatcagcagaagaagctttggggccaagactatggggctttctagatatagaaacatgtcatctgtaaacagagacagtttgacttcctgtctattcctctcttccctcctctgtttggatgcccttccagttttgcacattcagtgtaatgttggctgtgggtttgtcatggctagctctcatcattttggcacttctgactagaagggcaagaggggccagtgttgttgttacctgaaaggtaagtgcagcccacaaaaatgcagtgaagaagaagatgtattatgcatatgtttaagttaatacaattgagatatatttagcagacagaatcaatagagttgatgagtgactgactggatgtgtggggagtttatatcactcccaggtttttgacttgggcaaccgggcactcatgaaggaaaaaggggatccagggagaggaacttttctgaggactggggtagggctgaacagctgcattcgaggctggtggagggtgggctgggcatgggatgcacaaatggaaattccactgggtctgcagctcacacataggcatgaccagcatagagatagagaggccccagtgctgctgagtaactgtgattccccaggtgatggcatcagctgagaagggaaggaagcccatgagaggacactgaagaaggagtgagcagacaataagaagcccacagaagacagagaaggaacaactagagggagaagccaaggcaggcgtgtgtggtaacacataggaactgagggagaggacatttcaagatggtggggatgccatacaacaggactatgtgatggtttttggctgtgtccataggaagtcacaacaggcaagggaaagaaaccagaacccagtcatggagttaagaagtgagtcagagagtagatgggtagggacagtgaggtaaggcctctttctaaggaagtttggctgaaggatagactagctggacacatgctggctgtgtggggtagagggaggaatgatggagggtaggagagccttgagcctgcgagaagagtctcttagaatagagaagctgaagttaaagttgtggaagagagtggggataactgagtgacagataatcaggagaagaaaaggagatccagactcatgacagagagatgacctttgccaagagcacagccgtctttcacggtcacagagaggtaggacaaaatgagtggtgttcaagaattggtttgtagcacaatatttcaactatgtcctttaaaaagtttctccacagacactacccaaagcagtgcttcactacagtggcagacagacctgaaaattttcatctgaagcagcagagtgaactgcagaggcaggtcaccaaccagtgtggaggctaaaagcgggcctctttggggattccaggtggaagtgttggacatctgtagtattcctggtctcgaatcatcctgatattcttcattttgttattcacattggactaggcaggaacaaagatcaccacaactggctccccttcaactatgttagatggcaacttgccttcagtatggtgaaacacatcagttaagaccggggttgtgcatggcaggactttctacaaggacacccagtctccttaataaacatgagatgctctctttccagaatttctcttgcctgacacagcataggaagatgctgaacggccacacagtgatccattggtcagtggtgacataaggaggtcagaggggaggagtgaggagaagtagggaagactaggtggttgtaggcctccttcatctgttcattggctgtggcattaggccagctactctttgcacttctgtaaagtgagacggtcgatcttgtctgcctctctagaggatggttgcaggtgtcaaatggggtagttaggtgggagggcatttcacaaagttaaaaaatatgactttggaggcttgttatattgatgaggattataatccctgagaattcctggtatgaagaagggaaaagaagataatttgtgaaaga

SEQ ID NO: 8000 - protein, 44 aa, Homo sapiens
MSFKKFLHRHYPKQCFTTVADRPENFHLKQQSELQRQVTNQCGG

SEQ ID NO: 8001 - DNA, 715 bp, Homo sapiens
gcatgggatgcacaaatggaaattccactgggtctgcagctcacacataggcatgaccagcatagagatagagaggccccagtgctgctgagtaactgtgattccccaggtgatggcatcagctgagaagggaaggaagcccatgagaggacactgaagaaggagtgagcagacaataagaagcccacagaagacagagaaggaacaactagagggagaagccaaggcaggcgtgtgtgtttctccacagacactacccaaagcagtgcttcactacagtggcagacagacctgaaaattttcatctgaagcagcagagtgaactgcagaggcaggtcaccaaccagtgtggaggctaaaagcgggcctctttggggattccaggtggaagtgttggacatctgtagtattcctggtctcgaatcatcctgatattcttcattttgttattcacattggactaggagatagaatctcactatgttgaccaggctggtcttgaactcttggcacccaagcgatccttttgcctggaatcccaaagtgtcagatttactgaagaatatttcattgtaattactttttatactttataggtcaagagctctgttttaaatacaaaatttattgaatatactttttcaaacaaagtttcatgttctaatcattgtctgatttcagcattaaatgaaacacagtaaagaaagttgggctg

SEQ ID NO: 8002 - protein, 36 aa, Homo sapiens
MEIPLGLQLTHRHDQHRDREAPVLLSNCDSPGDGIS

SEQ ID NO: 8003 - DNA, 863 bp, Homo sapiens
aagcccatgagaggacactgaagaaggagtgagcagacaataagaagcccacagaagacagagaaggaacaactagagggagaagccaaggcaggcgtgtgtgtttctccacagacactacccaaagcagtgcttcactacagtggcagacagacctgaaaattttcatctgaagcagcagagtgaactgcagaggcaggtcaccaaccagtgtggaggctaaaagcgggcctctttggggattccaggtggaagtgttggacatctgtagtattcctggtctcgaatcatcctgatattcttcattttgttattcacattggactaggcaggaacaaagatcaccacaactggctccccttcaactatgttagatggcaacttgccttcagtatggtgaaacacatcagttaagaccggggttgtgcatggcaggactttctacaaggacacccagtctccttaataaacatgagatgctctctttccagaatttctcttgcctgacacagcataggaagatgctgaacggccacacagtgatccattggtcagtggtgacataaggaggtcagaggggaggagtgaggagaagtagggaagactaggtggttgtaggcctccttcatctgttcattggctgtggcattaggccagctactctttgcacttctgtaaagtgagacggtcgatcttgtctgcctctctagaggatggttgcaggtgtcaaatggggtagttaggtgggagggcatttcacaaagttaaaaaatatgactttggaggcttgttatattgatgaggattataatccctgagaattcctggtatgaagaagggaaaagaagataatttgtgaaaga

SEQ ID NO: 8004 - protein, 63 aa, Homo sapiens
MATCLQYGETHQLRPGLCMAGLSTRTPSLLNKHEMLSFQNFSCLTQHRKMLNGHTVIHWSVVT

SEQ ID NO: 8005 - DNA, 842 bp, Homo sapiens
cagagagtagatgggtagggacagtgaggtaaggcctctttctaaggaagtttggctgaaggatagactagctggacacatgctggctgtgtggggtagagggaggaatgatggagggtaggagagccttgagcctgcgagaagagtctcttagaatagagaagctgaagttaaagttgtggaagagagtggggataactgagtgacagataatcaggagaagaaaaggagatccagactcatgacagagagatgacctttgccaagagcacagccgtctttcacggtcacagagaggtaggacaaaatgagtggtgttcaagaattggtttgtagcacaatatttcaactatgtcctttaaaaagtttctccacagacactacccaaagcagtgcttcactacagtggcagacagacctgaaaattttcatctgaagcagcagagtgaactgcagaggcaggtcaccaaccagtgtggaggctaaaagcgggcctctttggggattccaggtggaagtgttggacatctgtagtattcctggtctcgaatcatcctgatattcttcattttgttattcacattggactaggagatagaatctcactatgttgaccaggctggtcttgaactcttggcacccaagcgatccttttgcctggaatcccaaagtgtcagatttactgaagaatatttcattgtaattactttttatactttataggtcaagagctctgttttaaatacaaaatttattgaatatactttttcaaacaaagtttcatgttctaatcattgtctgatttcagcattaaatgaaacacagtaaagaaagttgggctg

SEQ ID NO: 8006 - protein, 44 aa, Homo sapiens; identical to SEQ ID NO: 8000

SEQ ID NO: 8007 - DNA, 931 bp, Homo sapiens
cagagagtagatgggtagggacagtgaggtaaggcctctttctaaggaagtttggctgaaggatagactagctggacacatgctggctgtgtggggtagagggaggaatgatggagggtaggagagccttgagcctgcgagaagagtctcttagaatagagaagctgaagttaaagttgtggaagagagtggggataactgagtgacagataatcaggagaagaaaaggagatccagactcatgacagagagatgacctttgccaagagcacagccgtctttcacggtcacagagaggtaggacaaaatgagtggtgttcaagaattggtttgtagcacaatatttcaactatgtcctttaaaaagtttctccacagacactacccaaagcagtgcttcactacagtggcagacagacctgaaaattttcatctgaagcagcagagtgaactgcagaggcaggtcaccaaccagtgtggaggctaaaagcgggcctctttggggattccaggtggaagtgttggacatctgtagtattcctggtctcgaatcatcctgatattcttcattttgttattcacattggactaggagatagaatctcactatgttgaccaggctggtcttgaactcttggcacccaagcgatccttttgcctggaatcccaaagtgtcagatttactgaagaatatttcattgtaattactttttatactttataggtcaagagctctgttttaaatacaaaatttattgaatatactttttcaaacaaagtttcatgttctaatcattgtctgatttcagcattaaatgaaacacagtaaagaaagttgggctgatgttgttgttggtggttgtttttgtattctgattacagaactgtattttgagtgggctgaacatagagtaaatgcatcctcagctgct

SEQ ID NO: 8008 - protein, 44 aa, Homo sapiens; identical to SEQ ID NO: 8000

SEQ ID NO: 8009 - DNA, 565 bp, Homo sapiens
tttctccacagacactacccaaagcagtgcttcactacagtggcagacagacctgaaaattttcatctgaagcagcagagtgaactgcagaggcaggtcaccaaccagtgtggaggctaaaagcgggcctctttggggattccaggtggaagtgttggacatctgtagtattcctggtctcgaatcatcctgatattcttcattttgttattcacattggactaggagatagaatctcactatgttgaccaggctggtcttgaactcttggcacccaagcgatccttttgcctggaatcccaaagtgtcagatttactgaagaatatttcattgtaattactttttatactttataggtcaagagctctgttttaaatacaaaatttattgaatatactttttcaaacaaagtttcatgttctaatcattgtctgatttcagcattaaatgaaacacagtaaagaaagttgggctgatgttgttgttggtggttgtttttgtattctgattacagaactgtattttgagtgggctgaacatagagtaaatgcatcctcagctgct

SEQ ID NO: 8010 - protein, 38 aa, Homo sapiens
MKHSKESWADVVVGGCFCILITELYFEWAEHRVNASSA

SEQ ID NO: 8011 - DNA, 444 bp, Homo sapiens
ttcaactatgttagatggcaacttgccttcagtatggtgaaacacatcagttaagaccggggttgtgcatggcaggactttctacaaggacacccagtctccttaataaacatgagatgctctctttccagaatttctcttgcctgacacagcataggaagatgctgaacggccacacagtgatccattgagatagaatctcactatgttgaccaggctggtcttgaactcttggcacccaagcgatccttttgcctggaatcccaaagtgtcagatttactgaagaatatttcattgtaattactttttatactttataggtcaagagctctgttttaaatacaaaatttattgaatatactttttcaaacaaagtttcatgttctaatcattgtctgatttcagcattaaatgaaacacagtaaagaaagttgggctgatgt

SEQ ID NO: 8012 - protein, 58 aa, Homo sapiens
MATCLQYGETHQLRPGLCMAGLSTRTPSLLNKHEMLSFQNFSCLTQHRKMLNGHTVIH

SEQ ID NO: 8013 - DNA, 722 bp, Homo sapiens
acattctcctcgcccttagatccagaagcagcagttttcctggaccctccaagatgcgcttcctggccctgctcgtctgcctcctggtgctgggctttcaaggaaactcatcctcctgctgagaggaagacgttgcagcctcctcagcctccatggtgttgatggtgacagtgaaatgagttccagatccagggagatggaaccagggatttcaccatcacaaacactactttggagcctggagatgctgcacatcctcctgtgagcagaacactcactgggaccctgcacagtgtgatggccccaaacataaagctctcaaggaagctccgcctctcagcgtggaaggagaggctgcggtgccaggggatgtgtccacagagagtcgagtcaggtgggctcaggcagttgcctggagagtctttgaggaagaggacatgaggcctcagtcacaggatccagtggtgatactgtgatggcccagactccactctcctggcctgtcgcctctagagagccacccccatatcctgtaggtctagtcagagcctcttgtccagtgatggatacacctattcgtattggttcctgcagaagccaggccagtctccacagctcctgatctattttgtttcaaaccgggcctctggagtcccagacaggttcaatggcagtgggtcaggcactgatttcacactgaaaatcagccgggtggagctgaa

SEQ ID NO: 8014 - protein, 48 aa, Homo sapiens
MAQTPLSWPVASREPPPYPVGLVRASCPVMDTPIRIGSCRSQASLHSS

SEQ ID NO: 8015 - DNA, 565 bp, Homo sapiens; identical to SEQ ID NO: 8009

SEQ ID NO: 8016 - protein, 38 aa, Homo sapiens; identical to SEQ ID NO: 8010

SEQ ID NO: 8017 - DNA, 1927 bp, Homo sapiens
ggattgtgttcttcatttgactctctgcttgacttgatgtataggactgctagtaatttttgcacattgattttgtatgctaagactttgctaaagtttatcagcagaagaagctttggggccaagactatggggctttctagatatagaaacatgtcatctgtaaacagagacagtttgacttcctgtctattcctctcttccctcctctgtttggatgcccttccagttttgcacattcagtgtaatgttggctgtgggtttgtcatggctagctctcatcattttggcacttctgactagaagggcaagaggggccagtgttgttgttacctgaaaggtaagtgcagcccacaaaaatgcagtgaagaagaagatgtattatgcatatgtttaagttaatacaattgagatatatttagcagacagaatcaatagagttgatgagtgactgactggatgtgtggggagtttatatcactcccaggtttttgacttgggcaaccgggcactcatgaaggaaaaagaggatccagggagaggaacttttctgaggactggggtagggctgaacagctgcattcgaggctggtggagggtgggctgggcatgggatgcacaaatggaaattccactgggtctgcagctcacacataggcatgaccagcatagagatagagaggccccagtgctgctgagtaactgtgattccccaggtgatggcatcagctgagaagggaaggaagcccatgagaggacactgaagaaggagtgagcagacaataagaagcccacagaagacagagaaggaacaactagagggagaagccaaggcaggcgtgtgtggtaacacataggaactgagggagaggacatttcaagatggtggggatgccatacaacaggactatgtgatgatttttggctgtgtccataggaagtcacaacaggcaagggaaagaaaccagaacccagtcatggagctaagaagtgagtcagagagtagaggggtagggacagtgaggtaagtcctctttctaaggaagtttggctgaaggatagactagctggacacatgctggctgtgtggggtagagggaggaatgatggagggtaggagagccttgagcctgcgagaagagtctcttagaatagagaagctgaagttaaagttgtggaagagagtggggataactgagtgacagataatcaggagaagaaaaggagatccagactcatgacagagagatgacctttgccaagagtacagccgtctttcacggtcacagagaggtaggacaaaatgagtggtgttcaagaattggtttgtagcacaatatttcaactatgtcctttaaaaagtttctccacagacactacccaaagcagtgcttcactacagtggcagacagacctgaaaattttcatctgaagcagcagagtgaactgcagaggcaggtcaccaaccagtgtggaggctaaaagcgggcctctttggggattccaggtggaagtgttggacatctgtagtattcctggtctcgaatcatcctgatattcttcattttgttattcacattggactaggagatagaatctcactatgttgaccaggctggtcttgaactcttggcacccaagcgatccttttgcctggaatcccaaagtgtcagatttactgaagaatatttcattgtaattactttttatactttataggtcaagagctctgttttaaatacaaaatttattgaatatactttttcaaacaaagtttcatgttctaatcattgtctgatttcagcattaaatgaaacacagtaaagaaagttgggctgatgttgttgttggtggttgtttttgtattctgattacagaactgtattttgagtgggctgaacatagagtaaatgcatcctcagctgct

SEQ ID NO: 8018 - protein, 44 aa, Homo sapiens; identical to SEQ ID NO: 8000

SEQ ID NO: 8019 - DNA, 1625 bp, Homo sapiens
ggattgtgttcttcatttgactctctgcttgacttgatgtataggactgctagtaatttttgcacattgattttgtatgctaagactttgctaaagtttatcagcagaagaagctttggggccaagactatggggctttctagatatagaaacatgtcatctgtaaacagagacagtttgacttcctgtctattcctctcttccctcctctgtttggatgcccttccagttttgcacattcagtgtaatgttggctgtgggtttgtcatggctagctctcatcattttggcacttctgactagaagggcaagaggggccagtgttgttgttacctgaaaggtaagtgcagcccacaaaaatgcagtgaagaagaagatgtattatgcatatgtttaagttaatacaattgagatatatttagcagacagaatcaatagagttgatgagtgactgactggatgtgtggggagtttatatcactcccaggtttttgacttgggcaaccgggcactcatgaaggaaaaagaggatccagggagaggaacttttctgaggactggggtagggctgaacagctgcattcgaggctggtggagggtgggctgggcatgggatgcacaaatggaaattccactgggtctgcagctcacacataggcatgaccagcatagagatagagaggccccagtgctgctgagtaactgtgattccccaggtgatggcatcagctgagaagggaaggaagcccatgagaggacactgaagaaggagtgagcagacaataagaagcccacagaagacagagaaggaacaactagagggagaagccaaggcaggcgtgtgtgtttctccacagacactacccaaagcagtgcttcactacagtggcagacagacctgaaaattttcatctgaagcagcagagtgaactgcagaggcaggtcaccaaccagtgtggaggctaaaagcgggcctctttggggattccaggtggaagtgttggacatctgtagtattcctggtctcgaatcatcctgatattcttcattttgttattcacattggactaggcaggaacaaagatcaccacaactggctcgccttcaactatgttagatggcaacttgccttcagtatggtgaaacacatcagttaagaccggggttgtgcatggcaggactttctacaaggacacccagtctccttaataaacatgagatgctctctttccagaatttctcttgcctgacacagcataggaagatgctgaacggccacacagtgatccattgagatagaatctcactatgttgaccaggctggtcttgaactcttggcacccaagcgatccttttgcctggaatcccaaagtgtcagatttactgaagaatatttcattgtaattactttttatactttataggtcaagagctctgttttaaatacaaaatttattgaatatactttttcaaacaaagtttcatgttctaatcattgtctgatttcagcattaaatgaaacacagtaaagaaagttgggctgatgttgttgttggtggttgtttttgtattctgattacagaactgtattttgagtgggctgaacatagagtaaatgcatcctc

SEQ ID NO: 8020 - protein, 88 aa, Homo sapiens
MYRTASNFCTLILYAKTLLKFISRRSFGAKTMGLSRYRNMSSVNRDSLTSCLFLSSLLCLDALPVLHIQCNVGCGFVMASSHHFGTSD

SEQ ID NO: 8021 - DNA, 1543 bp, Homo sapiens
ggattgtgttcttcatttgactctctgcttgacttgatgtataggactgctagtaatttttgcacattgattttgtatgctaagactttgctaaagtttatcagcagaagaagctttggggccaagactatggggctttctagatatagaaacatgtcatctgtaaacagagacagtttgacttcctgtctattcctctcttccctcctctgtttggatgcccttccagttttgcacattcagtgtaatgttggctgtgggtttgtcatggctagctctcatcattttggcacttctgactagaagggcaagaggggccagtgttgttgttacctgaaaggtaagtgcagcccacaaaaatgcagtgaagaagaagatgtattatgcatatgtttaagttaatacaattgagatatatttagcagacagaatcaatagagttgatgagtgactgactggatgtgtggggagtttatatcactcccaggtttttgacttgggcaaccgggcactcatgaaggaaaaagaggatccagggagaggaacttttctgaggactggggtagggctgaacagctgcattcgaggctggtggagggtgggctgggcatgggatgcacaaatggaaattccactgggtctgcagctcacacataggcatgaccagcatagagatagagaggccccagtgctgctgagtaactgtgattccccaggtgatggcatcagctgagaagggaaggaagcccatgagaggacactgaagaaggagtgagcagacaataagaagcccacagaagacagagaaggaacaactagagggagaagccaaggcaggcgtgtgtgtttctccacagacactacccaaagcagtgcttcactacagtggcagacagacctgaaaattttcatctgaagcagcagagtgaactgcagaggcaggtcaccaaccagtgtggaggctaaaagcgggcctctttggggattccaggtggaagtgttggacatctgtagtattcctggtctcgaatcatcctgatattcttcattttgttattcacattggactaggcaggaacaaagatcaccacaactggctcgccttcaactatgttagatggcaacttgccttcagtatggtgaaacacatcagttaagaccggggttgtgcatggcaggactttctacaaggacacccagtctccttaataaacatgagatgctctctttccagaatttctcttgcctgacacagcataggaagatgctgaacggccacacagtgatccattgagatagaatctcactatgttgaccaggctggtcttgaactcttggcacccaagcgatccttttgcctggaatcccaaagtgtcagatttactgaagaatatttcattgtaattactttttatactttataggtcaagagctctgttttaaatacaaaatttattgaatatactttttcaaacaaagtttcatgttctaatcattgtctgatttcagcattaaatgaaacacagtaaagaaagttgggctg

SEQ ID NO: 8022 - protein, 88 aa, Homo sapiens; identical to SEQ ID NO: 8020

SEQ ID NO: 8023 - DNA, 1322 bp, Homo sapiens
ggattgtgttcttcatttgactctctgcttgacttgatgtataggactgctagtaatttttgcacattgattttgtatgctaagactttgctaaagtttatcagcagaagaagctttggggccaagactatggggctttctagatatagaaacatgtcatctgtaaacagagacagtttgacttcctgtctattcctctcttccctcctctgtttggatgcccttccagttttgcacattcagtgtaatgttggctgtgggtttgtcatggctagctctcatcattttggcacttctgactagaagggcaagaggggccagtgttgttgttacctgaaaggtaagtgcagcccacaaaaatgcagtgaagaagaagatgtattatgcatatgtttaagttaatacaattgagatatatttagcagacagaatcaatagagttgatgagtgactgactggatgtgtggggagtttatatcactcccaggtttttgacttgggcaaccgggcactcatgaaggaaaaagaggatccagggagaggaacttttctgaggactggggtagggctgaacagctgcattcgaggctggtggagggtgggctgggcatgggatgcacaaatggaaattccactgggtctgcagctcacacataggcatgaccagcatagagatagagaggccccagtgctgctgagtaactgtgattccccaggtgatggcatcagctgagaagggaaggaagcccatgagaggacactgaagaaggagtgagcagacaataagaagcccacagaagacagagaaggaacaactagagggagaagccaaggcaggcgtgtgtgtttctccacagacactacccaaagcagtgcttcactacagtggcagacagacctgaaaattttcatctgaagcagcagagtgaactgcagaggcaggtcaccaaccagtgtggaggctaaaagcgggcctctttggggattccaggtggaagtgttggacatctgtagtattcctggtctcgaatcatcctgatattcttcattttgttattcacattggactaggagatagaatctcactatgttgaccaggctggtcttgaactcttggcacccaagcgatccttttgcctggaatcccaaagtgtcagatttactgaagaatatttcattgtaattactttttatactttataggtcaagagctctgttttaaatacaaaatttattgaatatactttttcaaacaaagtttcatgttctaatcattgtctgatttcagcattaaatgaaacacagtaaagaaagttgggctg

SEQ ID NO: 8024 - protein, 88 aa, Homo sapiens; identical to SEQ ID NO: 8020

SEQ ID NO: 8025 - DNA, 1838 bp, Homo sapiens
ggattgtgttcttcatttgactctctgcttgacttgatgtataggactgctagtaatttttgcacattgattttgtatgctaagactttgctaaagtttatcagcagaagaagctttggggccaagactatggggctttctagatatagaaacatgtcatctgtaaacagagacagtttgacttcctgtctattcctctcttccctcctctgtttggatgcccttccagttttgcacattcagtgtaatgttggctgtgggtttgtcatggctagctctcatcattttggcacttctgactagaagggcaagaggggccagtgttgttgttacctgaaaggtaagtgcagcccacaaaaatgcagtgaagaagaagatgtattatgcatatgtttaagttaatacaattgagatatatttagcagacagaatcaatagagttgatgagtgactgactggatgtgtggggagtttatatcactcccaggtttttgacttgggcaaccgggcactcatgaaggaaaaagaggatccagggagaggaacttttctgaggactggggtagggctgaacagctgcattcgaggctggtggagggtgggctgggcatgggatgcacaaatggaaattccactgggtctgcagctcacacataggcatgaccagcatagagatagagaggccccagtgctgctgagtaactgtgattccccaggtgatggcatcagctgagaagggaaggaagcccatgagaggacactgaagaaggagtgagcagacaataagaagcccacagaagacagagaaggaacaactagagggagaagccaaggcaggcgtgtgtggtaacacataggaactgagggagaggacatttcaagatggtggggatgccatacaacaggactatgtgatgatttttggctgtgtccataggaagtcacaacaggcaagggaaagaaaccagaacccagtcatggagctaagaagtgagtcagagagtagaggggtagggacagtgaggtaagtcctctttctaaggaagtttggctgaaggatagactagctggacacatgctggctgtgtggggtagagggaggaatgatggagggtaggagagccttgagcctgcgagaagagtctcttagaatagagaagctgaagttaaagttgtggaagagagtggggataactgagtgacagataatcaggagaagaaaaggagatccagactcatgacagagagatgacctttgccaagagtacagccgtctttcacggtcacagagaggtaggacaaaatgagtggtgttcaagaattggtttgtagcacaatatttcaactatgtcctttaaaaagtttctccacagacactacccaaagcagtgcttcactacagtggcagacagacctgaaaattttcatctgaagcagcagagtgaactgcagaggcaggtcaccaaccagtgtggaggctaaaagcgggcctctttggggattccaggtggaagtgttggacatctgtagtattcctggtctcgaatcatcctgatattcttcattttgttattcacattggactaggagatagaatctcactatgttgaccaggctggtcttgaactcttggcacccaagcgatccttttgcctggaatcccaaagtgtcagatttactgaagaatatttcattgtaattactttttatactttataggtcaagagctctgttttaaatacaaaatttattgaatatactttttcaaacaaagtttcatgttctaatcattgtctgatttcagcattaaatgaaacacagtaaagaaagttgggctg

SEQ ID NO: 8026 - protein, 44 aa, Homo sapiens; identical to SEQ ID NO: 8000

SEQ ID NO: 8027 - DNA, 787 bp, Homo sapiens; identical to SEQ ID NO: 7995

SEQ ID NO: 8028 - protein, 31 aa, Homo sapiens; identical to SEQ ID NO: 7996

SEQ ID NO: 8029 - DNA, 1770 bp, Homo sapiens
ggattgtgttcttcatttgactctctgcttgacttgatgtataggactgctagtaatttttgcacattgattttgtatgctaagactttgctaaagtttatcagcagaagaagctttggggccaagactatggggctttctagatatagaaacatgtcatctgtaaacagagacagtttgacttcctgtctattcctctcttccctcctctgtttggatgcccttccagttttgcacattcagtgtaatgttggctgtgggtttgtcatggctagctctcatcattttggcacttctgactagaagggcaagaggggccagtgttgttgttacctgaaaggtaagtgcagcccacaaaaatgcagtgaagaagaagatgtattatgcatatgtttaagttaatacaattgagatatatttagcagacagaatcaatagagttgatgagtgactgactggatgtgtggggagtttatatcactcccaggtttttgacttgggcaaccgggcactcatgaaggaaaaagaggatccagggagaggaacttttctgaggactggggtagggctgaacagctgcattcgaggctggtggagggtgggctgggcatgggatgcacaaatggaaattccactgggtctgcagctcacacataggcatgaccagcatagagatagagaggccccagtgctgctgagtaactgtgattccccaggtgatggcatcagctgagaagggaaggaagcccatgagaggacactgaagaaggagtgagcagacaataagaagcccacagaagacagagaaggaacaactagagggagaagccaaggcaggcgtgtgtggtaacacataggaactgagggagaggacatttcaagatggtggggatgccatacaacaggactatgtgatgatttttggctgtgtccataggaagtcacaacaggcaagggaaagaaaccagaacccagtcatggagctaagaagtgagtcagagagtagaggggtagggacagtgaggtaagtcctctttctaaggaagtttggctgaaggatagactagctggacacatgctggctgtgtggggtagagggaggaatgatggagggtaggagagccttgagcctgcgagaagagtctcttagaatagagaagctgaagttaaagttgtggaagagagtggggataactgagtgacagataatcaggagaagaaaaggagatccagactcatgacagagagatgacctttgccaagagtacagccgtctttcacggtcacagagaggtaggacaaaatgagtggtgttcaagaattggtttgtagcacaatatttcaactatgtcctttaaaaagtttctccacagacactacccaaagcagtgcttcactacagtggcagacagacctgaaaattttcatctgaagcagcagagtgaactgcagaggcaggtcaccaaccagtgtggaggctaaaagcgggcctctttggggattccaggtggaagtgttggacatctgtagtattcctggtctcgaatcatcctgatattcttcattttgttattcacattggactaggagatagaatctcactatgttgaccaggctggtcttgaactcttggcacccaagcgatccttttgcctggaatcccaaagtgtcagatttactgaagaatatttcattgtaattactttttatactttataggtcaagagctctgttttaaatacaaaatttattgaatatactttttcaaac

SEQ ID NO: 8030 - protein, 44 aa, Homo sapiens; identical to SEQ ID NO: 8000

SEQ ID NO: 8031 - DNA, 2813 bp, Homo sapiens
ctcctccccaactcattctatgaggccaacatcatcttgataccaaaatctggcagatacacacacacacacacacacacacacacacacacaatcttcaggccaataccctcgatgaacatcaatgcaaaaatcctcaacaaaatactggcaaaccaaatccagcagcacatcaaaaagttaatccatcatgatcaagtatgcttcatccccaggatgcaaggttgcctcaacatacacatatcaattaatctgattcatcacatgaacaaaactaaagataaaaaccatgtggttatctcaatataagcagaaaaggctttcaataaaattcaatgcctctccatattaaaaactctaaaaaatctgggtattgaagaaacatagctcaaaatgatgagctgtttttgtatcagtatcatgctgttttggttactgtagccctgtagtatggtttgaagttgggtaacatgatgcctccagcttcgttctttttgctgaggattgcttggctattagggctcttttttttggttccatatgaattttgaaatagtttgctctagttctgtgaggaatgccgttggtaatttaatagggataacttgcatctgtaaattactttgggcagtatagccattttaatgacattaattcttcctatccatgagcatgacatgtttttccatttgtttctgtcttctctgatttctttgagcagtgttttgtaattcttctagagatctcctagagatctttcacctccctggttagctgtattcctaggtatcttattttttctgtgtgtagcaattatgaatgggattgtgttcttcatttgactctctgcttgacttgatgtataggactgctagtaatttttgcacattgattttgtatgctaagactttgctaaagtttatcagcagaagaagctttggggccaagactatggggctttctagatatagaaacatgtcatctgtaaacagagacagtttgacttcctgtctattcctctcttccctcctctgtttggatgcccttccagttttgcacattcagtgtaatgttggctgtgggtttgtcatggctagctctcatcattttggcacttctgactagaagggcaagaggggccagtgttgttgttacctgaaaggtaagtgcagcccacaaaaatgcagtgaagaagaagatgtattatgcatatgtttaagttaatacaattgagatatatttagcagacagaatcaatagagttgatgagtgactgactggatgtgtggggagtttatatcactcccaggtttttgacttgggcaaccgggcactcatgaaggaaaaagaggatccagggagaggaacttttctgaggactggggtagggctgaacagctgcattcgaggctggtggagggtgggctgggcatgggatgcacaaatggaaattccactgggtctgcagctcacacataggcatgaccagcatagagatagagaggccccagtgctgctgagtaactgtgattccccaggtgatggcatcagctgagaagggaaggaagcccatgagaggacactgaagaaggagtgagcagacaataagaagcccacagaagacagagaaggaacaactagagggagaagccaaggcaggcgtgtgtggtaacacataggaactgagggagaggacatttcaagatggtggggatgccatacaacaggactatgtgatgatttttggctgtgtccataggaagtcacaacaggcaagggaaagaaaccagaacccagtcatggagctaagaagtgagtcagagagtagaggggtagggacagtgaggtaagtcctctttctaaggaagtttggctgaaggatagactagctggacacatgctggctgtgtggggtagagggaggaatgatggagggtaggagagccttgagcctgcgagaagagtctcttagaatagagaagctgaagttaaagttgtggaagagagtggggataactgagtgacagataatcaggagaagaaaaggagatccagactcatgacagagagatgacctttgccaagagtacagccgtctttcacggtcacagagaggtaggacaaaatgagtggtgttcaagaattggtttgtagcacaatatttcaactatgtcctttaaaaagtttctccacagacactacccaaagcagtgcttcactacagtggcagacagacctgaaaattttcatctgaagcagcagagtgaactgcagaggcaggtcaccaaccagtgtggaggctaaaagcgggcctctttggggattccaggtggaagtgttggacatctgtagtattcctggtctcgaatcatcctgatattcttcattttgttattcacattggactaggcaggaacaaagatcaccacaactggctcgccttcaactatgttagatggcaacttgccttcagtatggtgaaacacatcagttaagaccggggttgtgcatggcaggactttctacaaggacacccagtctccttaataaacatgagatgctctctttccagaatttctcttgcctgacacagcataggaagatgctgaacggccacacagtgatccattgagatagaatctcactatgttgaccaggctggtcttgaactcttggcacccaagcgatccttttgcctggaatcccaaagtgtcagatttactgaagaatatttcattgtaattactttttatactttataggtcaagagctctgttttaaatacaaaatttattgaatatactttttcaaac

SEQ ID NO: 8032 - protein, 44 aa, Homo sapiens; identical to SEQ ID NO: 8000

SEQ ID NO: 8033 - DNA, 576 bp, Homo sapiens; identical to SEQ ID NO: 7997

SEQ ID NO: 8034 - protein, 31 aa, Homo sapiens; identical to SEQ ID NO: 7996

SEQ ID NO: 8035 - DNA, 576 bp, Homo sapiens; identical to SEQ ID NO: 7993

SEQ ID NO: 8036 - protein, 76 aa, Homo sapiens; identical to SEQ ID NO: 7994

SEQ ID NO: 8037 - DNA, 388 bp, Homo sapiens
tttctccacagacactacccaaagcagtgcttcactacagtggcagacagacctgaaaattttcatctgaagcagcagagtgaactgcagaggcaggtcaccaaccagtgtggaggctaaaagcgggcctctttggggattccaggtggaagtgttggacatctgtagtattcctggtctcgaatcatcctgatattcttcattttgttattcacattggactaggcaggaacaaagatcaccacaactggctcgccttcaactatgttagatggcaacttgccttcagtatggtgaaacacatcagttaagaccggggttgtgcatggcaggactttctacaaggacacccagtctccttaataaacatgagatgctctctttccag

SEQ ID NO: 8038 - protein, 38 aa, Homo sapiens
MATCLQYGETHQLRPGLCMAGLSTRTPSLLNKHEMLSF

SEQ ID NO: 8039 - DNA, 1944 bp, Homo sapiens
cagtatagccattttaatgacattaattcttcctatccatgagcatgacatgtttttccatttgtttctgtcttctctgatttctttgagcagtgttttgtaattcttctagagatctcctagagatctttcacctccctggttagctgtattcctaggtatcttattttttctgtgtgtagcaattatgaatgggattgtgttcttcatttgactctctgcttgacttgatgtataggactgctagtaatttttgcacattgattttgtatgctaagactttgctaaagtttatcagcagaagaagctttggggccaagactatggggctttctagatatagaaacatgtcatctgtaaacagagacagtttgacttcctgtctattcctctcttccctcctctgtttggatgcccttccagttttgcacattcagtgtaatgttggctgtgggtttgtcatggctagctctcatcattttggcacttctgactagaagggcaagaggggccagtgttgttgttacctgaaaggtaagtgcagcccacaaaaatgcagtgaagaagaagatgtattatgcatatgtttaagttaatacaattgagatatatttagcagacagaatcaatagagttgatgagtgactgactggatgtgtggggagtttatatcactcccaggtttttgacttgggcaaccgggcactcatgaaggaaaaagaggatccagggagaggaacttttctgaggactggggtagggctgaacagctgcattcgaggctggtggagggtgggctgggcatgggatgcacaaatggaaattccactgggtctgcagctcacacataggcatgaccagcatagagatagagaggccccagtgctgctgagtaactgtgattccccaggtgatggcatcagctgagaagggaaggaagcccatgagaggacactgaagaaggagtgagcagacaataagaagcccacagaagacagagaaggaacaactagagggagaagccaaggcaggcgtgtgtggtaacacataggaactgagggagaggacatttcaagatggtggggatgccatacaacaggactatgtgatgatttttggctgtgtccataggaagtcacaacaggcaagggaaagaaaccagaacccagtcatggagctaagaagtgagtcagagagtagaggggtagggacagtgaggtaagtcctctttctaaggaagtttggctgaaggatagactagctggacacatgctggctgtgtggggtagagggaggaatgatggagggtaggagagccttgagcctgcgagaagagtctcttagaatagagaagctgaagttaaagttgtggaagagagtggggataactgagtgacagataatcaggagaagaaaaggagatccagactcatgacagagagatgacctttgccaagagtacagccgtctttcacggtcacagagaggtaggacaaaatgagtggtgttcaagaattggtttgtagcacaatatttcaactatgtcctttaaaaagtttctccacagacactacccaaagcagtgcttcactacagtggcagacagacctgaaaattttcatctgaagcagcagagtgaactgcagaggcaggtcaccaaccagtgtggaggctaaaagcgggcctctttggggattccaggtggaagtgttggacatctgtagtattcctggtctcgaatcatcctgatattcttcattttgttattcacattggactaggcaggaacaaagatcaccacaactggctcgccttcaactatgttagatggcaacttgccttcagtatggtgaaacacatcagttaagaccggggttgtgcatggcaggactttctacaaggacacccagtctccttaataaacatgagatgctctctttccag

SEQ ID NO: 8040 - protein, 44 aa, Homo sapiens; identical to SEQ ID NO: 8000

SEQ ID NO: 8041 - DNA, 2869 bp, Homo sapiens
atgctgctcgatgtgatcatgatcaaagtcactcatcaaaaagagaccaagagcttgctttccagggcacagtagataaatgtcgtcacttacaggaaaatttgaattctcatgttctgattctttctctgcaactttctaaagctgagagtaagtccagagtcctcaaaactgagctccattacacaggagaggctctgaaagaaaaggctttggtttttgaacacgtgcaaagtgagctaaagcaaaaacagagtcaaatgaaggacattgaaaaaatgtacaaaagtggatacaatacaatggaaaaatgcatagaaaaacaggaaagattttgtcaactaaaaaaacaaaatatgttgcttcaacagcaactggatgatgctcgcaacaaagctgacaatcaagaaaaagcaatacttaatattcaagccagatgtgatgctagagtacaaaaccttcaagctgagtgcagaaagcaccgtcttttactagaagaagacaataaaatgttggtcaatgaactgaatcattcgaaagaaaaagaatgccaatatgaaaaagagaaagcagaaagagaagtagctgtgagacagcttcaacaaaaacgagatgatgtcttaaacaaaggatcagcaacaaaagctctgctggatgcttcatcgcgtcactgcacctatttagaaaatgggatgcaggattcaaggaagaaattagaccagatgagaagtcaatttcaagaaatacaggatcaacttacagctactataagatgtactaaggagatggaaggcgacacacaaaagcttgaagtagaacatgtgatgatgagaaaaattattaaaaaacaggatgaccaaattgagcggcttgagaaaatcctgcagcattcaagtttgatgctgcaggtgtttgagagctagatgaagatatggacatttctggaattaagagccccctctacattgagcacaagacagtgacgaatccacattcttcagccagaaagtcacctctgagagccaaatgtctgactatagaaaggagagtcaaagaatgataacgacatctcaggaaaattgtgaaaataatcagcagccggatgtggataaccctttcaaatttctccaggggcctccaaccacccccactggtgttctcctgctgacagtgatttcaattttttctgggctggagctccctgatggaggggcaggccaccatctttgctgtttttgcaacttagccacttcaaccttcagtctttggagtgtccaaggagaccagggggtgatgtggaccctcagcatagcacagctgctctataaaaatgaggccagactgcttttttaagcactttcccaatgccattcctcctcactgggcaaaacctccaaactggggtctccagccacctcctacaggtgtgtttgggccagcaacaagttcattcatacctccctagggcaaagcttccaaagggagcggtaggctgccatctttgctgtttcacaggcttcactgatgataactccaggtactggaaaatctgaggctactagagactggagcgggccctgggcatactgcagcagccctatggaaaagtggccagactgttacctgggttcccattcctatatcttctcactaggcaagtcttgcaggcctggacctctacctaaccccccctaccagaactgttgagccagtagcaactcagccactccctggagagagcctccaggggcaactgaaagcctctctgccactgcttctgcagtggaactgtccttgctaccctcagactgatgaaggagctaacacccttatctacaccttcaacaagctttaattgaccaaagcccatctctcatgggttctacacactccccactgctcatgacagggaacccctggattggcccccacagcacgaattctccatcctgattgctgattgcagtaaacagttgctgtattctccaggggtggtggaactctgaggagacaaacaaaagacccttggctacaaccactactaatgtcccttcctcttctgcctcaaagttaggaaagaaatataaacactgagattgccccagagctgcagtgggcagcctaggagtgccaagccatgacctacagccagcactcaagggggagagaagcacattttcagatcattgagagggaacatggctgcaactgtaaggaaacataggggagccacatgaccaagcaagagtctaccaactgaccagtaagcccaagtgccacctactggatcacatcccaaagcttcagcatcaaaaataccttactaatatactcccctctgaaaccagaaatgagaagtcagcttcaaataaagaccctgcacaaagcctcagcctggtgaaaacatccgaaaataagtctacggactgtactcaatctacactgcaattaaaggaaaacccataggtggaaatgagaagaaaccaatgcaagaactccagtaactcaaatggcctctgtgtcatatgtccttctaacaaccacaccagttctccaacaagagttcttaacctggatgaactgtctggaattacataaatataattcagaatatggataggaaaaaaaatcatcaagactcaggagaatggcaaaacccaatccaaggaaaataagaataacagtaaagtgttacaggagctgaaggataaagtagctggtataataaaaaagaacctaaccgatctgaaagcgccgaagaacacaatacaagaattccacaatgcaatcacaagtattaacagcagaaaaaaaaacctgaggaacgaatctcagaacttgaagattggttctctaaaataagatggac

SEQ ID NO: 8042 - protein, 220 aa, Homo sapiens
MKDIEKMYKSGYNTMEKCIEKQERFCQLKKQNMLLQQQLDDARNKADNQEKAILNIQARCDARVQNLQAECRKHRLLLEEDNKMLVNELNHSKEKECQYEKEKAEREVAVRQLQQKRDDVLNKGSATKALLDASSRHCTYLENGMQDSRKKLDQMRSQFQEIQDQLTATIRCTKEMEGDTQKLEVEHVMMRKIIKKQDDQIERLEKILQHSSLMLQVFES

SEQ ID NO: 8043 - DNA, 1456 bp, Homo sapiens
atgctgctcgatgtgatcatgatcaaagtcactcatcaaaaagagaccaagagcttgctttccagggcacagtagataaatgtcgtcacttacaggaaaatttgaattctcatgttctgattctttctctgcaactttctaaagctgagagtaagtccagagtcctcaaaactgagctccattacacaggagaggctctgaaagaaaaggctttggtttttgaacacgtgcaaagtgagctaaagcaaaaacagagtcaaatgaaggacattgaaaaaatgtacaaaagtggatacaatacaatggaaaaatgcatagaaaaacaggaaagattttgtcaactaaaaaaacaaaatatgttgcttcaacagcaactggatgatgctcgcaacaaagctgacaatcaagaaaaagcaatacttaatattcaagccagatgtgatgctagagtacaaaaccttcaagctgagtgcagaaagcaccgtcttttactagaagaagacaataaaatgttggtcaatgaactgaatcattcgaaagaaaaagaatgccaatatgaaaaagagaaagcagaaagagaagtagctgtgagacagcttcaacaaaaacgagatgatgtcttaaacaaaggatcagcaacaaaagctctgctggatgcttcatcgcgtcactgcacctatttagaaaatgggatgcaggattcaaggaagaaattagaccagatgagaagtcaatttcaagaaatacaggatcaacttacagctactataagatgtactaaggagatggaaggcgacacacaaaagtaaaatttgaagcagcacacaaaataacttgagtatttataaagcaaaagagcactgtagtatgaaaattgtatcagttatgataattagtatgtctttgtgaagccaaaaaagtttcatttgtaagctatatcgaaatacatcatttttctacattattcctaaattttgcatattatcaccaaaacacaggtagaaaatgacacagtagcccaatcgtctacttttgtgattgctaagaatttgtgtaattataccttcagaagtttgtttagaatttacatgatttaaaaaaaattacgtgtgagagtaattattttaaaatgcacattttaggcttgaagtagaacatgtgatgatgagaaaaattattaaaaaacaggatgaccaaattgagcggcttgagaaaatcctgcagcattcaagtttgatgctgcaggtgtttgagagctagatgaagatatggacatttctggaattaagagccccctctacattgagcacaagacagtgacgaatccacattcttcagccagaaagtcacctctgagagccaaatgtctgactatagaaaggagagtcaaagaatgataacgacatctcaggaaaattgtgaaaataatcagcagccggatgtggataaccctttc

SEQ ID NO: 8044 - protein, 182 aa, Homo sapiens
MKDIEKMYKSGYNTMEKCIEKQERFCQLKKQNMLLQQQLDDARNKADNQEKAILNIQARCDARVQNLQAECRKHRLLLEEDNKMLVNELNHSKEKECQYEKEKAEREVAVRQLQQKRDDVLNKGSATKALLDASSRHCTYLENGMQDSRKKLDQMRSQFQEIQDQLTATIRCTKEMEGDTQK

SEQ ID NO: 8045 - DNA, 2493 bp, Homo sapiens
atgctgctcgatgtgatcatgatcaaagtcactcatcaaaaagagaccaagagcttgctttccagggcacagtagataaatgtcgtcacttacaggaaaatttgaattctcatgttctgattctttctctgcaactttctaaagctgagagtaagtccagagtcctcaaaactgagctccattacacaggagaggctctgaaagaaaaggctttggtttttgaacacgtgcaaagtgagctaaagcaaaaacagagtcaaatgaaggacattgaaaaaatgtacaaaagtggatacaatacaatggaaaaatgcatagaaaaacaggaaagattttgtcaactaaaaaaacaaaatatgttgcttcaacagcaactggatgatgctcgcaacaaagctgacaatcaagaaaaagcaatacttaatattcaagccagatgtgatgctagagtacaaaaccttcaagctgagtgcagaaagcaccgtcttttactagaagaagacaataaaatgttggtcaatgaactgaatcattcgaaagaaaaagaatgccaatatgaaaaagagaaagcagaaagagaagtagctgtgagacagcttcaacaaaaacgagatgatgtcttaaacaaaggatcagcaacaaaagctctgctggatgcttcatcgcgtcactgcacctatttagaaaatgggatgcaggattcaaggaagaaattagaccagatgagaagtcaagcttgaagtagaacatgtgatgatgagaaaaattattaaaaaacaggatgaccaaattgagcggcttgagaaaatcctgcagcattcaagtttgatgctgcaggtgtttgagagctagatgaagcatccagccaaactagactacatggagctccacagtgatcgtcttcacctccagctgtttgcatttacttcttccctctatcctacatgtgttttccttccccttcagatatcaacctatgaattgcctctaccaaaaagcctacaatattgacacaaacctgggctagtatcccttctatgtcttccaataagtgctgtcttatgcttgtcattgtatgtatgactctgtatgggaattgcctgtttgttttttcagattatagcatacagttgttgaggggcggaccgtatcatctttatcttgtaattccagtgcttgtcctagtaccttagcacatggttgctgaatacatgaacgaagagtgagaaaccagaagctctgatacttaactgccatgataatgaattcggtgtgcaactatgggcaaattatatttaatagtaattgcatattgtacatatttttcattcttattaacactgataagcttttcagcatatactgactttctcttagttaactgtgaaatcatttagataaagaatataattctttttcattctaacttctgaatttaaatctgaatcctctatagcaggggtccccaactcccaggccacacacagttccatgacctgttaggaagcaggctgcacagcaggaggtgagtggcaggcaagcgagtgaagcttcatctgtatttccagccactccctgttgctcacattatcacctgagctctgcctcctgtcagatcagcaaagccattagattctcacaggagtgaaaatcctactgtgaactgctcgttcaagggatctaggtcacatgctccttatgagactctaatgcctgatgatatgtcattgtctcctatctcttcacgatgggaccatctagttacagaaaaacaagctcaggactcccattgattctccattatgatgagttgtgtaattatttcattatgtattacaatgtagtcataataggaataaagtgcacaatagatgtaatacgcttgaatcaccatcctgaaaccatcccccaaacccccatctgtggaaaaattatctttcacaaaactgctgcctggtgccaaaaaggctggggactgctgctctatagcttctgcactagaatctactaatgagtaaaatttaaatcaataactagttttaaaagcataacaagaatatgtgctgtctggctgcagtggctcatgcctgtattctcagcactttgggaggccagtgcaggtggatcacttgaggtcaggagttcaagaccagcctggccaatatggtgaaatcctgtctctactaaaaatacaaaaattagctgggtgtggtggtgcatgcctgtagtctcagctactcgggaggctgaggtgggagaatcacttgaacccgggaggcagaggtttcagtgagccaagatcgtgccactgcactccagcctgagcaacagagtgactccatctcaaatgcaaaacaaaacagaaagaatacatgctgacgaaaaaaatctaagacaataaaattgtattactaggctgttaacatgatattttgtttcccgttaaatgtgtgacatgcaaaagtatttattaaatgaaaatattttttatct

SEQ ID NO: 8046 - protein, 159 aa, Homo sapiens
MKDIEKMYKSGYNTMEKCIEKQERFCQLKKQNMLLQQQLDDARNKADNQEKAILNIQARCDARVQNLQAECRKHRLLLEEDNKMLVNELNHSKEKECQYEKEKAEREVAVRQLQQKRDDVLNKGSATKALLDASSRHCTYLENGMQDSRKKLDQMRSQA

SEQ ID NO: 8047 - DNA, 554 bp, Homo sapiens
agatggaaggcgacacacaaaagtaaaatttgaagcagcacacaaaataacttgagtatttataaagcaaaagagcactgtagtatgaaaattgtatcagttatgataattagtatgtctttgtgaagccaaaaaagtttcatttgtaagctatatcgaaatacatcatttttctacattattcctaaattttgcatattatcaccaaaacacaggtagaaaatgacacagtagcccaatcgtctacttttgtgattgctaagaatttgtgtaattataccttcagaagtttgtttagaatttacatgatttaaaaaaaattacgtgtgagagtaattattttaaaatgcacattttaggcttgaagtagaacatgtgatgatgagaaaaattattaaaaaacaggatgaccaaattgagcggcttgagaaaatcctgcagcattcaagtttgatgctgcaggtgtttgagagctagatgaaggtatgttgccaaaatttatgaattaaattcaaatcattgatttctgaaataaactctaagtagtgaacggt

SEQ ID NO: 8048 - protein, 32 aa, Homo sapiens; identical to SEQ ID NO: 7992

SEQ ID NO: 8049 - DNA, 1000 bp, Homo sapiens
atgctgctcgatgtgatcatgatcaaagtcactcatcaaaaagagaccaagagcttgctttccagggcacagtagataaatgtcgtcacttacaggaaaatttgaattctcatgttctgattctttctctgcaactttctaaagctgagagtaagtccagagtcctcaaaactgagctccattacacaggagaggctctgaaagaaaaggctttggtttttgaacacgtgcaaagtgagctaaagcaaaaacagagtcaaatgaaggacattgaaaaaatgtacaaaagtggatacaatacaatggaaaaatgcatagaaaaacaggaaagattttgtcaactaaaaaaacaaaatatgttgcttcaacagcaactggatgatgctcgcaacaaagctgacaatcaagaaaaagcaatacttaatattcaagccagatgtgatgctagagtacaaaaccttcaagctgagtgcagaaagcaccgtcttttactagaagaagacaataaaatgttggtcaatgaactgaatcattcgaaagaaaaagaatgccaatatgaaaaagagaaagcagaaagagaagtagctgtgagacagcttcaacaaaaacgagatgatgtcttaaacaaaggatcagcaacaaaagctctgctggatgcttcatcgcgtcactgcacctatttagaaaatgggatgcaggattcaaggaagaaattagaccagatgagaagtcaatttcaagaaatacaggatcaacttacagctactataagatgtactaaggagatggaaggcgacacacaaaagcttgaagtagaacatgtgatgatgagaaaaattattaaaaaacaggatgaccaaattgagcggcttgagaaaatcctgcagcattcaagtttgatgctgcaggtgtttgagagctagatgaaggtatgttgccaaaatttatgaattaaattcaaatcattgatttctgaaataaactctaagtagtgaacggt

SEQ ID NO: 8050 - protein, 220 aa, Homo sapiens; identical to SEQ ID NO: 8042

SEQ ID NO: 8051 - DNA, 5529 bp, Homo sapiens
ccttctgttgggcgtttctgcggagaggcgggaggcgctgagagtctgcgcggaggtccgtgcacagactgctttgcctgttgttgctcttcggaggcggcgatccccgaaggcgagctgaaatacggctgcaggctacaatttgcagccgacgattaaggaagacgacgagcgggagaggtggcccaccctcatggagcgcttgtgctcggatggcttcgcatttccccattactacattaaaccgtatcatctgaagaggatccacagagctgtcttacgtggtaatctggagaaactgaagtaccttctgctcacgtattatgacgccaataagagagacaggaaggaaaggactgccctacatttggcctgtgccactggccaaccggaaatggtacatctcctggtgtccagaagatgtgagcttaacctctgcgaccgtgaagacaggacacctctgatcaaggctgtacaactgaggcaggaggcttgtgcaactcttctgctgcaaaatggcgccgatccaaatattacggatgtctttggaaggactgctctgcactacgctgtgtataatgaagatacatccatgatagaaaaacttctttcacatggtacaaatattgaagaatgcagcaagaatgaatatcagccactgttacttgctgtgagtcgaagaaaagtgaaaatggtggaatttttattaaagaaaaaagcaaatgtaaatgccattgattatcttggcagatcagccctcatacttgctgttactcttggagaaaaagatatagtcattcttcttctgcagcacaatattgatgtgttttctcgagatgtgtatggaaagcttgcagaagattatgccatgtctcctcagaaacaacgagctgagaaggctacaagtgacgacaaagattctgtttcaaatatagccacagaaataaaggagggacctatatctgggacagtgtcttctcagaaacaaccagctgagaaggctacaagtgacgagaaagattctgtttcaaatatagccacagaaataaaggagggacaacaatctgggacagtgtcttctcagaaacaaccagcctcaaagactgcaagtgacaagacagattctgctttgaatacagctacagaaataaaggatggactacaatgtgggacagtgtcttctcagaaacaacaagccttgaaggctacaactgacgaggaaggttctgtttctaatatagccacagaaataaaggatggagaaaaatctgggacagtgtcttctcagaaaaaaccagccttgaaggccacaagtgatgagaaagattctttttcgaatataaccagagaaaaaaaggatggagaaatatctaggacagtgtcttctcagaaaccaccagccttgaaggctacaagtgtcaaggaagattctgttttgaatatagccagagaaaaaaaggatggagaaaaatctaggacagtgtcttctcataaacaaccatccttgaaggctacaagtgacaaggaagattctgttccgaatatggccacagaaacaaaggatgaacaaatatctgggacagaacaagacttagaaatggcatcagagggagagcaaaagaggcttgaagaatatgaaaataaccagccacaggtgaaaaaccaaatacattctagggatgaccttgatgacataattcagtcatctcaaacagtctcagaggacggtgactcgctttgctgtaattgtaagaatgtcatattactcattgatcaacatgaaatgaagtgtaaagattgtgttcacctattgaaaattaaaaatacattttgtttatggaaaagattaataaaacttaaagataaccactgtgagcaacttagagtaaaaattcgaaaactgaaaaataaggctagtgtactacaaaagagaatatctgaaaaagaagaaataaaatcgcagttaaagcatgaaatacttgaattggaaaaagaactctgtagtttgagatttgccatacagcaagaaaaaaagaaaagaagaaatgttgaagagttgcaccaaaaagttagggaaaagttaagaataacagaagagcaatataggatagaagctgatgtgacaaaaccaattaaaccggctctcaaatcagcagaggtggaattgaagacaggaggaaataattcaaatcaggtttctgaaactgatgaaaaagaagacctgctgcatgaaaaccgcttgatgcaagatgaaattgccaggctcaggctggaaaaagacacaataaaaaaccaaaacctggaaaagaaatacttaaaagactttgaaattgtgaaaagaaagcatgaagaccttcaaaaggctctaaaacggaatggggaaacattagcaaaaacgatagcctgttatagtggacagcttgctgctctgacagatgaaaacacaacgctccgttccaaactggagaagcaaagagagagcaggcaaagactggaaacagaaatgcaatcataccgttgtagactgaatgctgctcgatgtgatcatgatcaaagtcactcatcaaaaagagaccaagagcttgctttccagggcacagtagataaatgtcgtcacttacaggaaaatttgaattctcatgttctgattctttctctgcaactttctaaagctgagagtaagtccagagtcctcaaaactgagctccattacacaggagaggctctgaaagaaaaggctttggtttttgaacacgtgcaaagtgagctaaagcaaaaacagagtcaaatgaaggacattgaaaaaatgtacaaaagtggatacaatacaatggaaaaatgcatagaaaaacaggaaagattttgtcaactaaaaaaacaaaatatgttgcttcaacagcaactggatgatgctcgcaacaaagctgacaatcaagaaaaagcaatacttaatattcaagccagatgtgatgctagagtacaaaaccttcaagctgagtgcagaaagcaccgtcttttactagaagaagacaataaaatgttggtcaatgaactgaatcattcgaaagaaaaagaatgccaatatgaaaaagagaaagcagaaagagaagtagctgtgagacagcttcaacaaaaacgagatgatgtcttaaacaaaggatcagcaacaaaagctctgctggatgcttcatcgcgtcactgcacctatttagaaaatgggatgcaggattcaaggaagaaattagaccagatgagaagtcaagtatgtatgcaactttgcacaccaacaactgttaatctgtagctagttaactaatataaagtgttttggggtactaattttagtggatggctttcttttgtatttttatgataattaatgttattaaaattttatagtggatggctttcttctgtattttccttattattaattttattaagattttattataatgcacctatatcttaatctctggctttcattctgccattttttatacatatatttttttcttaaatatttaaccttaggaaagttgagaattatgcatcatttctcacagaagttgagagagtttttttttcctgttaaacagtctatttttaatgatttctctattggcatggtgaggcaagccaggttaattcagaggataatgtctaatggaatgtttcagaaaattatcttctttttagtctctacttttctgaatgtataaagaacctgtgtatacgtatttcttagatttcaggttaacttgttcagaaaggccattttactgaataaatttttatttcgatgaaaatccttacttcctttgtattgggctcagagagcacactctgtctctatatgaatatggacagttagcatttgccaacatgtatctattttctcttatttgtagaaaaagctaaactaaaaagggggttatagaaggtcagcaaaggatgggtttgagatgtttgggttggttaagtgggcatttagacaacagggcttctcctttggcatgtttaatggacatctttgcagtttaagatgacgcttttaaattacttctctcctaatgatgacctgagtcctgctattcaatgggagagtcaataagatcctgtaggatcttatttggaactgactttgtcgattttaattttgttcctgcttgtttttaaattttcttgttgtttccctagaaaggaaagatgatgcttagttttaaatatttaaaaatgtgcaagttgctttgctataataaaactaaatgcatacatacaaaaaataaaattatagttgatgtggtagtgtttggaattcaaaatataaatgcttagcgtgaggtaatcctttatctttccacattttaccagtttgtaagtttgagtatttaattgataaaatgtaattcaaaagcaagaagaatgttgtgttttagtcctagagcaggggtctgtgaacttttctgtaaagggccagatagtattatgtaaggctttgtgagccataagatccttgttgcaataactcggccctgcaattacagcacaaaagtagccatgaacaatatgcagactgaaggggtgtagcagtgtcccactaaaattacttacaaaaaacaggtaatgggatgatttctcctagattatgaccttttataaataaaaaagattgtgatagtctaaaatatttcatatatattttgttgattcattcatctactgatggacatttaggtcatttccaaatgtaattttttaaaattctttgtttcagtttcaagaaatacaggatcaacttacagctactataagatgtactaaggagatggaaggcgacacacaaaagtaaaatttgaagcagcacacaaaataacttgagtatttataaagcaaaagagcactgtagtatgaaaattgtatcagttatgataattagtatgtctttgtgaagccaaaaaagtttcatttgtaagctatatcgaaatacatcatttttctacattattcctaaattttgcatattatcaccaaaacacaggtagaaaatgacacagtagcccaatcgtctacttttgtgattgctaagaatttgtgtaattataccttcagaagtttgtttagaatttacatgatttaaaaaaaattacgtgtgagagtaattattttaaaatgcacattttaggcttgaagtagaacatgtgatgatgagaaaaattattaaaaaacaggatgaccaaattgagcggcttgagaaaatcctgcagcattcaagtttggtaagctgatctcttaatttctgtcatactgaaaaggaattttatttttccagtaggatgggttaaatatcccttgtccaaaatgcttgggaccaaaagtagatttttttcagattttggaatatttgtatatacctaatgaaatatcttgcggatggtacctgagtctaaacatgaaattcatttgtgtttcatatataccttatgcacatagcctgaaggtaattctctacaatgttttacagtaatt

SEQ ID NO: 8052 - protein, 1036 aa, Homo sapiens
MERLCSDGFAFPHYYIKPYHLKRIHRAVLRGNLEKLKYLLLTYYDANKRDRKERTALHLACATGQPEMVHLLVSRRCELNLCDREDRTPLIKAVQLRQEACATLLLQNGADPNITDVFGRTALHYAVYNEDTSMIEKLLSHGTNIEECSKNEYQPLLLAVSRRKVKMVEFLLKKKANVNAIDYLGRSALILAVTLGEKDIVILLLQHNIDVFSRDVYGKLAEDYAMSPQKQRAEKATSDDKDSVSNIATEIKEGPISGTVSSQKQPAEKATSDEKDSVSNIATEIKEGQQSGTVSSQKQPASKTASDKTDSALNTATEIKDGLQCGTVSSQKQQALKATTDEEGSVSNIATEIKDGEKSGTVSSQKKPALKATSDEKDSFSNITREKKDGEISRTVSSQKPPALKATSVKEDSVLNIAREKKDGEKSRTVSSHKQPSLKATSDKEDSVPNMATETKDEQISGTEQDLEMASEGEQKRLEEYENNQPQVKNQIHSRDDLDDIIQSSQTVSEDGDSLCCNCKNVILLIDQHEMKCKDCVHLLKIKNTFCLWKRLIKLKDNHCEQLRVKIRKLKNKASVLQKRISEKEEIKSQLKHEILELEKELCSLRFAIQQEKKKRRNVEELHQKVREKLRITEEQYRIEADVTKPIKPALKSAEVELKTGGNNSNQVSETDEKEDLLHENRLMQDEIARLRLEKDTIKNQNLEKKYLKDFEIVKRKHEDLQKALKRNGETLAKTIACYSGQLAALTDENTTLRSKLEKQRESRQRLETEMQSYRCRLNAARCDHDQSHSSKRDQELAFQGTVDKCRHLQENLNSHVLILSLQLSKAESKSRVLKTELHYTGEALKEKALVFEHVQSELKQKQSQMKDIEKMYKSGYNTMEKCIEKQERFCQLKKQNMLLQQQLDDARNKADNQEKAILNIQARCDARVQNLQAECRKHRLLLEEDNKMLVNELNHSKEKECQYEKEKAEREVAVRQLQQKRDDVLNKGSATKALLDASSRHCTYLENGMQDSRKKLDQMRSQVCMQLCTPTTVNL

SEQ ID NO: 8053 - DNA, 963 bp, Homo sapiens
atgctgctcgatgtgatcatgatcaaagtcactcatcaaaaagagaccaagagcttgctttccagggcacagtagataaatgtcgtcacttacaggaaaatttgaattctcatgttctgattctttctctgcaactttctaaagctgagagtaagtccagagtcctcaaaactgagctccattacacaggagaggctctgaaagaaaaggctttggtttttgaacacgtgcaaagtgagctaaagcaaaaacagagtcaaatgaaggacattgaaaaaatgtacaaaagtggatacaatacaatggaaaaatgcatagaaaaacaggaaagattttgtcaactaaaaaaacaaaatatgttgcttcaacagcaactggatgatgctcgcaacaaagctgacaatcaagaaaaagcaatacttaatattcaagccagatgtgatgctagagtacaaaaccttcaagctgagtgcagaaagcaccgtcttttactagaagaagacaataaaatgttggtcaatgaactgaatcattcgaaagaaaaagaatgccaatatgaaaaagagaaagcagaaagagaagtagctgtgagacagcttcaacaaaaacgagatgatgtcttaaacaaaggatcagcaacaaaagctctgctggatgcttcatcgcgtcactgcacctatttagaaaatgggatgcaggattcaaggaagaaattagaccagatgagaagtcaatttcaagaaatacaggatcaacttacagctactataagatgtactaaggagatggaaggcgacacacaaaagtaaaatttgaagcagcacacaaaataacttgagtatttataaagcaaaagagcactgtagtatgaaaattgtatcagttatgataattagtatgtctttgtgaagccaaaaaagtttcatttgtaagctatatcgaaatacatcatttttctacatt

SEQ ID NO: 8054 - protein, 182 aa, Homo sapiens; identical to SEQ ID NO: 8044

SEQ ID NO: 8055 - DNA, 440 bp, Homo sapiens
cagtgtcttctcagaaacaacaagccttgaaggctacaactgacgaggaaggttctgtttctaatatagccacagaaataaaggatggagaaaaatctgggacagtgtcttctcagaaaaaaccagccttgaaggccacaagtgatgagaaagattctttttcgaatataaccagagaaaaaaaggatggagaaatatctaggacaggtaattttgcgaaacacatttaatgtcatgttcagtccagataagaagttctcttccccgaataaatcagtggggggctggtcgaagctgcacattctgactcagcaggcctgagattcttcatttctaataagttcttgggttatgctgatactgctggtctggaatatgatcttggctgtaagattatacacatccccacattgcaactgggaggaagaaatatagagagc

SEQ ID NO: 8056 - protein, 44 aa, Homo sapiens
MEKYLGQVILRNTFNVMFSPDKKFSSPNKSVGGWSKLHILTQQA

SEQ ID NO: 8057 - DNA, 1221 bp, Homo sapiens
ccttctgttgggcgtttctgcggagaggcgggaggcgctgagagtctgcgcggaggtccgtgcacagactgctttgcctgttgttgctcttcggaggcggcgatccccgaaggcgagctgaaatacggctgcaggctacaatttgcagccgacgattaaggaagacgacgagcgggagaggtggcccaccctcatggagcgcttgtgctcggatggcttcgcatttccccattactacattaaaccgtatcatctgaagaggatccacagagctgtcttacgtggtaatctggagaaactgaagtaccttctgctcacgtattatgacgccaataagagagacaggaaggaaaggactgccctacatttggcctgtgccactggccaaccggaaatggtacatctcctggtgtccagaagatgtgagcttaacctctgcgaccgtgaagacaggacacctctgatcaaggctgtacaactgaggcaggaggcttgtgcaactcttctgctgcaaaatggcgccgatccaaatattacggatgtctttggaaggactgctctgcactacgctgtgtataatgaagatacatccatgatagaaaaacttctttcacatggtacaaatattgaagaatgcagcaagtgtctcctcagaaacaacgagctgagaaggctacaagtgacgacaaagattctgtttcaaatatagccacagaaataaaggagggacctatatctgggacagtgtcttctcagaaacaaccagctgagaaggctacaagtgacgagaaagattctgtttcaaatatagccacagaaataaaggagggacaacaatctgggacagtgtctcctcagaaacaatcggcccagaaggttatatttaaaaagaaagtttctcttttgaatattgccacaagaataatgggcggtgggaaatctggaacagtgtcttctcagaaacaaccagcctcaaagactgcaagtgacaagacagattctgctttgaatacagctacagaaataaaggatggactacaatgtgggacagtgtcttctcagaaacaacaagccttgaaggctacaactgacgaggaaggttctgtttctaatatagccacagaaataaaggatggagaaaaatctgggacagtgtcttctcagaaaaaaccagccttgaaggccacaagtgatgagaaagattctttttcgaatataacc

SEQ ID NO: 8058 - protein, 195 aa, Homo sapiens
MQQVSPQKQRAEKATSDDKDSVSNIATEIKEGPISGTVSSQKQPAEKATSDEKDSVSNIATEIKEGQQSGTVSPQKQSAQKVIFKKKVSLLNIATRIMGGGKSGTVSSQKQPASKTASDKTDSALNTATEIKDGLQCGTVSSQKQQALKATTDEEGSVSNIATEIKDGEKSGTVSSQKKPALKATSDEKDSFSNI

SEQ ID NO: 8059 - DNA, 1050 bp, Homo sapiens
gagaggcgggaggcgctgagagtctgcgcggaggtccgtgcacagactgctttgcctgttgttgctcttcggaggcggcgatccccgaaggcgagctgaaatacggctgcaggctacaatttgcagccgacgattaaggaagacgacgagcgggagaggtggcccaccctcatggagcgcttgtgctcggatggcttcgcatttccccattactacattaaaccgtatcatctgaagaggatccacagagctgtcttacgtggtaatctggagaaactgaagtaccttctgctcacgtattatgacgccaataagagagacaggaaggaaaggactgccctacatttggcctgtgccactggccaaccggaaatggtacatctcctggtgtccagaagatgtgagcttaacctctgcgaccgtgaagacaggacacctctgatcaaggctgtacaactgaggcaggaggcttgtgcaactcttctgctgcaaaatggcgccgatccaaatattacggatgtctttggaaggactgctctgcactacgctgtgtataatgaagatacatccatgatagaaaaacttctttcacatggtacaaatattgaagaatgcagcaaggtataggtcaaccaatgttattttcaaactatctgaaatgcatttattttaacattgacacatgtaagggtcaatttttcatatttggaagctcaaacattccttgaatgaaaatattttgaaatgccttaactgtctaagattttactttaaatattggaacttttaaagaagcattatagggaacagccttttttcatgcacttatggtaaataactataaaaacaaatgaattacaataaatttataattcatgacaactgaatttgggaaaggtaatagttaagtgtttttccactaaattactttttttctaatcagtgtgaagtgacacaggaaagtaaaattgtcccttataaataggctttattttaaatgtcaaagaaaattaaagaatttcacaataaatgtacatgttgttgctgttg

SEQ ID NO: 8060 - protein, 151 aa, Homo sapiens
MERLCSDGFAFPHYYIKPYHLKRIHRAVLRGNLEKLKYLLLTYYDANKRDRKERTALHLACATGQPEMVHLLVSRRCELNLCDREDRTPLIKAVQLRQEACATLLLQNGADPNITDVFGRTALHYAVYNEDTSMIEKLLSHGTNIEECSKV

SEQ ID NO: 8061 - DNA, 1145 bp, Homo sapiens
cagacatcttgaggttactggaatgcatggagaataatctcccatatgatgacaacggcacgttcagctcaactcagtcacacatggactggggaaaagtagcttttaaaaacttttctggtgaaatgtgcagactcaaatggttagagatttcttgcagcttgagaaaattcagcactttgaaaaaattagtcctggaagctaagaaatgtgttaaaaatacaaacaaaagccaaaaaggcaggaaccatccagactttccaaagaggctccttactgcttatatccgcttcttcaaggagaattggccccagtactcccaaatgtaccctgggatgagaagccaggaagtgaccaaaatcctgtcaaagaaatacaaggagctcccagagcagatgaaacagaaacatattcaggatttccggaaggaaaagcaagaatttgaggaaaaacttgctcgattcagggaagaacaccctgatttagaccagaagggcaagaaatctgatatctgcaagagggttcaaaccaaagtgcaaaagaaggttcagaaaaatattgaagaagtgaggtctcttccaaaaacggatcaatttttcaagaaggtaaaatttcatggagagcctcagaaaccccccatgaatggataccagaagtttcaccaagattcctggtcaagtaaggagctgcaacatttgtccctgagggagcgcatggtagagattggcagacgctggcagcgcatcccgcagagccagaaggatcattacaagagccaggctgagttgctgcagaaggaatacaaagtggaattggatctctggctcaagactttgtcacctgaagattatgctgcatacaaagaatcgacctatgctaagggtaagaatatggcgatgatgggaggcccggcccccagcttgaaacaaacagatccgcagtcctcatcagcaaagggtctgcaagaagggtttggggaggggcaggggctccaggctgcaggaacagaggcatcacagactatttgggtaaactgtcaggtctctatggaaccagaagacaacaggaagaaagatggcgaagaggaagaaagcagtaactctttagactgcagcagtggggaagacatggaagttgatgtctga

SEQ ID NO: 8062 - protein, 372 aa, Homo sapiens [sequence omitted]

SEQ ID NO: 8063 - DNA, 902 bp, Homo sapiens
acgcagtgatctttaggagcccacttctaaattcaaatcatttggggttcagtaagtctcttcacagacggggacctaatagcttccattagcagcctccacgtttgctgaacacgactacggggccagacccacaggaactccaatgtggttcagccgctcaactccagggaccaaaaagactttcccacctcccagcgttattaaaggcaaccccgcccccaagcctcagccactacgcggtgcagaaagaggcagagctgggcatgcgcaatttccgcccccgccacagtcttgggagtgggcgggctcgagggctgggaggaagccgaaagctgaccgagaggagaaagaagcccgcccccggaagtccctcctgtctctgcagcttgttcccggaagttttgctgctagtcgcggacgcaatggcttcaaggttacttcgcggagctggaacgctggccgcgcaggccctgagggctcgcggccccagtggcgcggccgcgatgcgctccatggcatctggaggtggtgttcccactgatgaagagcaggcgactgggttggagagggagatcatgctggctgcaaagaagggactggacccatacaatgtactggccccaaagggagcttcaggcaccagggaagaccctaatttagtcccctccatctccaacaagagaatagtaggctgcatctgtgaagaggacaataccagcgtcgtctggttttggctgcacaaaggcgaggcccagcgatgcccccgctgtggagcccattacaagctggtgccccagcagctggcacactgagcacctgcactaaattactcaaaatgtgctgtaaagtttcttctttccagtaaagactagccattgcattggctccttctcccatag

SEQ ID NO: 8064 - protein, 182 aa, Homo sapiens
MRNFRPRHSLGSGRARGLGGSRKLTERRKKPAPGSPSCLCSLFPEVLLLVADAMASRLLRGAGTLAAQALRARGPSGAAAMRSMASGGGVPTDEEQATGLEREIMLAAKKGLDPYNVLAPKGASGTREDPNLVPSISNKRIVGCICEEDNTSVVWFWLHKGEAQRCPRCGAHYKLVPQQLAH

SEQ ID NO: 8065 - DNA, 1551 bp, Homo sapiens
acgcagtgatctttaggagcccacttctaaattcaaatcatttggggttcagtaagtctcttcacagacggggacctaatagcttccattagcagcctccacgtttgctgaacacgactacggggccagacccacaggaactccaatgtggttcagccgctcaactccagggaccaaaaagactttcccacctcccagcgttattaaaggcaaccccgcccccaagcctcagccactacgcggtgcagaaagaggcagagctgggcatgcgcaatttccgcccccgccacagtcttgggagtgggcgggctcgagggctgggaggaagccgaaagctgaccgagaggagaaagaagcccgcccccggaagtccctcctgtctctgcagcttgttcccggaagttttgctgctagtcgcggacgcaatggcttcaaggttacttcgcggagctggaacgctggccgcgcaggccctgagggctcgcggccccagtggcgcggccgcgatgcgctccatggcatctggaggtggtgttcccactgatgaagagcaggcgactgggttggagagggagatcatgctggctgcaaagaagggactggacccatacaatgtactggccccaaagggagcttcaggcaccagggaagaccctaatttagtcccctccatctccaacaagagaatagtaggctgcatctgtgaagaggacaataccagcgtcgtctggttttggctgcacaaaggcgaggcccagcgatgcccccgctgtggagcccattacaagctggtgccccagcagctggcacactgagcacctgcactaaattactcaaaatgtgctgtaaagtttcttctttccagtaaagactagccattgcattggctccttctcccatagatggctggtcttatttcttacccgtattctttggtaggcatggaatatgcttattttgggaaaagctgtctgttaatgctagcttgccatccacttactgaaagtgtataaccagtgtatagtgcttagattaataataagaatagatcgacaacccgtaatgcaatgaatgggaccacctggtatgagagaaaggggcgggctgaggagtcaggctgacaggacttaaaatattggctccatcatttggctctatctctgtggacatgttctctgggggtcaagtacaactacaaaaaggtaagtaccttacaaggtgcttaatatgtaaagagctgagtggatagtaggtcctcacagtatcctcatagagacagggtggccttgtgaagagagttttggggattttgaagtcttgagggacccaggtgcaaagtaagaattcatggggataccagcagcaaaattcagaatatggaacaatttcagaaatcactgaccatgtttcttcaaataaattgcaaggagtggggggaaaagctagggagaacatgtggagaaacagataagggagataccagtcagcagcatgcacaccttgtttagatcttgatttgaaaacaattataaaggaaaaaaaattgagaag

SEQ ID NO: 8066 - protein, 182 aa, Homo sapiens; identical to SEQ ID NO: 8064

SEQ ID NO: 8067 - DNA, 642 bp, Homo sapiens
gcggacgcaatggcttcaaggttacttcgcggagctggaacgctggccgcgcaggccctcccagggtggtcccagggcggcaaagcggcgcggctcgtgcagcttctcgaggtcccagtggccgctttacggtccccagtgcctcaggctctgcaggcatctccctgtaattctggaccgctgctcctgccgctccccgaactcactccgctgcgaaagtatcctaaacggaggtgccgggtgaccttgggagggaccggggctgccaccgggatggggaggggtccggcctcccttcaaacctgcgcccacctcaagcagagtgggttctacatgcttttagacaaatgtcgacaaatttgcctcggtggttggagaaagaaaagctcataggccgggcgcggtggctcacaactgtaatcccagcactttgggaggccgaggcggacagatcccctgaggtcaggagctcaagaccagcctggccaacatggtaaaaccccgtttctactaaaaatacaaaaattagccgggcgtggtggcgcgcgcctgtagtcccagctactcgggaggctgaggcaggagaatcgcttaaacccgggaggcggaggttcccgtgagccaacatcgcgccattgcact

SEQ ID NO: 8068 - protein, 127 aa, Homo sapiens
MASRLLRGAGTLAAQALPGWSQGGKAARLVQLLEVPVAALRSPVPQALQASPCNSGPLLLPLPELTPLRKYPKRRCRVTLGGTGAATGMGRGPASLQTCAHLKQSGFYMLLDKCRQICLGGWRKKSS

SEQ ID NO: 8069 - DNA, 627 bp, Homo sapiens
cagtggccgctttacggtccccagtgcctcaggctctgcaggcatctccctgtaattctggaccgctgctcctgccgctccccgaactcactccgctgcgaaaacaaatgtcgacaaatttgcctcggtggttggagaaagaaaagctcataggccgggcgcggtggctcacaactgtaatcccagcactttgggaggccgaggcggacagatcccctgaggtcaggagctcaagaccagcctggccaacatggtggtgttcccactgatgaagagcaggcgactgggttggagagggagatcatgctggctgcaaagaagggactggacccatacaatgtactggccccaaagggagcttcaggcaccagggaagaccctaatttagtcccctccatctccaacaagagaatagtaggctgcatctgtgaagaggacaataccagcgtcgtctggttttggctgcacaaaggcgaggcccagcgatgcccccgctgtggagcccattacaagctggtgccccagcagctggcacactgagcacctgcactaaattactcaaaatgtgctgtaaagtttcttctttccagtaaagactagccattgcattggctccttctcccatag

SEQ ID NO: 8070 - protein, 78 aa, Homo sapiens [sequence omitted]

SEQ ID NO: 8071 - DNA, 1276 bp, Homo sapiens
cagtggccgctttacggtccccagtgcctcaggctctgcaggcatctccctgtaattctggaccgctgctcctgccgctccccgaactcactccgctgcgaaaacaaatgtcgacaaatttgcctcggtggttggagaaagaaaagctcataggccgggcgcggtggctcacaactgtaatcccagcactttgggaggccgaggcggacagatcccctgaggtcaggagctcaagaccagcctggccaacatggtggtgttcccactgatgaagagcaggcgactgggttggagagggagatcatgctggctgcaaagaagggactggacccatacaatgtactggccccaaagggagcttcaggcaccagggaagaccctaatttagtcccctccatctccaacaagagaatagtaggctgcatctgtgaagaggacaataccagcgtcgtctggttttggctgcacaaaggcgaggcccagcgatgcccccgctgtggagcccattacaagctggtgccccagcagctggcacactgagcacctgcactaaattactcaaaatgtgctgtaaagtttcttctttccagtaaagactagccattgcattggctccttctcccatagatggctggtcttatttcttacccgtattctttggtaggcatggaatatgcttattttgggaaaagctgtctgttaatgctagcttgccatccacttactgaaagtgtataaccagtgtatagtgcttagattaataataagaatagatcgacaacccgtaatgcaatgaatgggaccacctggtatgagagaaaggggcgggctgaggagtcaggctgacaggacttaaaatattggctccatcatttggctctatctctgtggacatgttctctgggggtcaagtacaactacaaaaaggtaagtaccttacaaggtgcttaatatgtaaagagctgagtggatagtaggtcctcacagtatcctcatagagacagggtggccttgtgaagagagttttggggattttgaagtcttgagggacccaggtgcaaagtaagaattcatggggataccagcagcaaaattcagaatatggaacaatttcagaaatcactgaccatgtttcttcaaataaattgcaaggagtggggggaaaagctagggagaacatgtggagaaacagataagggagataccagtcagcagcatgcacaccttgtttagatcttgatttgaaaacaattataaaggaaaaaaaattgagaag

SEQ ID NO: 8072 - protein, 78 aa, Homo sapiens [sequence omitted]

SEQ ID NO: 8073 - DNA, 1002 bp, Homo sapiens
caccgggatggggaggggtccggcctcccttcaaacctgcgcccacctcaagcagagtgggttctacatgcttttagacaaatgtcgacaaatttgcctcggtggttggagaaagaaaagctcataggccgggcgcggtggctcacaactgtaatcccagcactttgggaggccgaggcggacagatcccctgaggtcaggagctcaagaccagcctggccaacatggtaaaaccccgtttctactaaaaatacaaaaattagccgggcgtggtggcgcgcgcctgtagtcccagctactcgggaggctgaggcaggagaatcgcttaaacccgggaggcggaggttcccgtgagccaacatcgcgccattgcactccagcctgggcaacaagagcaaaactccgtctcaaaaaagaaaaaaaaagctcccccgagtgctgccgcttgtgtggatgggtacttggtggttcttaggggaccatggatatgagtagcctttaggagcttgtgagcccgctaaaacttatacagaagtttcggggcaccattttccttgatcatttctgtttgtagtttttctatcagtcatttcagtcagcgtcataattcacgttatcttcctttaggtggtgttcccactgatgaagagcaggcgactgggttggagagggagatcatgctggctgcaaagaagggactggacccatacaatgtactggccccaaagggagcttcaggcaccagggaagaccctaatttagtcccctccatctccaacaagagaatagtaggctgcatctgtgaagaggacaataccagcgtcgtctggttttggctgcacaaaggcgaggcccagcgatgcccccgctgtggagcccattacaagctggtgccccagcagctggcacactgagcacctgcactaaattactcaaaatgtgctgtaaagtttcttctttccagtaaagactagccattgcattggctccttctcccataga

SEQ ID NO: 8074 - protein, 78 aa, Homo sapiens [sequence omitted]

SEQ ID NO: 8075 - DNA, 972 bp, Homo sapiens
gtcatttcagtcagcgtcataattcacgttatcttcctttaggtggtgttcccactgatgaagagcaggcgactgggttggagagggagatcatgctggctgcaaagaagggactggacccatacaatgtactggccccaaagggagcttcaggcaccagggaagaccctaatttagtcccctccatctccaacaagagaatagtaggctgcatctgtaagtacctcacctctattttttatccacttgcttaatatatcctacaatagtgtgtaagctgcctcaaatcttcagtgtgtgagtgcatgttggtaagtttgtctaagggtcttgacactctcaagcctcattatgcctgatagttcatccttactggaaagaagcgcagcacagcggtaagactggctcactgggagtgcggcatgaaggagtacccacccagcaaatatttattgttatactgcttctatgccaggcatcattttagacactagggatacataccagaacggaccctgctttgcgttctacataggcaagggaattgttagaatttacagtgaccttgatacaaggtcagtttactcataggtgaactcagagcctcaatttcttcatctgaagaatgggaggagggcttgaactgatctcttaagatatcaaccatagtcttacttgtgtatcagagatgtctgaggaaaagaaattcatgttgaaagtctccctttctaggttggatgaccataaaccaccttttttcccttttaggtgaagaggacaataccagcgtcgtctggttttggctgcacaaaggcgaggcccagcgatgcccccgctgtggagcccattacaagctggtgccccagcagctggcacactgagcacctgcactaaattactcaaaatgtgctgtaaagtttcttctttccagtaaagactagccattgcattggctccttctcccatagatgg

SEQ ID NO: 8076 - protein, 53 aa, Homo sapiens
MLAAKKGLDPYNVLAPKGASGTREDPNLVPSISNKRIVGCICKYLTSIFYPLA

SEQ ID NO: 8077 - DNA, 307 bp, Homo sapiens
cgctggacacttttaagaagatgtgggtgtccaaaaaggagtatgaagaggatggctcccgtgctattcatcgcaaaactttctagtgcccaaggagggcggggcatgttgggagagggggaggggtgggggacattttcttacctcacccaagaaagaggtcgtcacttttgctgtggccagggccccacctccctctctcagatatgtacaataatttaacacggttgcctgaaaaaaacttttgtaaatcattatagtaataattatggacaaggcccagtgtgtggctctgttttcttgtggc

SEQ ID NO: 8078 - protein, 59 aa, Homo sapiens
MKRMAPVLFIAKLSSAQGGRGMLGEGEGWGTFSYLTQERGRHFCCGQGPTSLSQICTII

SEQ ID NO: 8079 - DNA, 485 bp, Homo sapiens
cgctggacacttttaagaagatgtgggtgtccaaaaaggagtatgaagaggatggctcccgtgctattcatcgcaaaactttctagtgcccaaggagggcggggcatgttgggagagggggagggaggggagacagaagccagggcagaggatgcacggtggctagagccgctgcactatccttttcagagcacttcatccacttgctcctccctctaccctcggcaccctgggtgggaaagggttgatgctcatcatttattgaggggaagccacttaataaggagtcagacctaaaagggggtgggggacattttcttacctcacccaagaaagaggtcgtcacttttgctgtggccagggccccacctccctctctcagatatgtacaataatttaacacggttgcctgaaaaaaacttttgtaaatcattatagtaataattatggacaaggcccagtgtgtggctctgttttcttgtggc

SEQ ID NO: 8080 - protein, 84 aa, Homo sapiens
MKRMAPVLFIAKLSSAQGGRGMLGEGEGGETEARAEDARWLEPLHYPFQSTSSTCSSLYPRHPGWERVDAHHLLRGSHLIRSQT

SEQ ID NO: 8081 - DNA, 371 bp, Homo sapiens
cgattccgggcccccgagctgctgttccagccggaccttgtcggggatgagagtgaggggctccatgaggtggtggccttcgccatacacaagtccgacatggacctgcgccggacgctgttcgccaacatcgtggctcatcatttattgaggggaagccacttaataaggagtcagacctaaaagggggtgggggacattttcttacctcacccaagaaagaggtcgtcacttttgctgtggccagggccccacctccctctctcagatatgtacaataatttaacacggttgcctgaaaaaaacttttgtaaatcattatagtaataattatggacaaggcccagtgtgtggctctgttttcttgtggc

SEQ ID NO: 8082 - protein, 34 aa, Homo sapiens
MRVRGSMRWWPSPYTSPTWTCAGRCSPTSWLIIY

SEQ ID NO: 8083 - DNA, 458 bp, Homo sapiens
agcactgaaagaacaagacaagcgttctagggttcccctttgtcttgggagtctctcgttttggtcttgttgagccacaagggggtgcagcccagggtcaggcccttcagagccagggcagaggatgcacggtggctagagccgctgcactatccttttcagagcacttcatccacttgctcctccctctaccctcggcaccctgggtgggaaagggttgatgctcatcatttattgaggggaagccacttaataaggagtcagacctaaaagggggtgggggacattttcttacctcacccaagaaagaggtcgtcacttttgctgtggccagggccccacctccctctctcagatatgtacaataatttaacacggttgcctgaaaaaaacttttgtaaatcattatagtaataattatggacaaggcccagtgtgtggctctgttttcttgtggc

SEQ ID NO: 8084 - protein, 79 aa, Homo sapiens
GSPLSWESLVLVLLSHKGVQPRVRPFRARAEDARWLEPLHYPFQSTSSTCSSLYPRHPGWERVDAHHLLRGSHLIRSQT

SEQ ID NO: 8085 - DNA, 2267 bp, Homo sapiens
cccgggcacctgctgtcaatcgggccaggtgggagcgatgattggccgccgggcccgccctccagaaagccccgcggggctcgcgtaggctgcaggctcggggagggagggcagcggcgccgcgtcgggagccgccgccgtcccggtcctcccgcccgcccgcccatccggtgcctcctgcagcccgcctgctgggcagggccggcgcggcccggccatggagtcctacgacatcatcgccaaccagcctgtggtcatcgacaacggttcgggggtgattaaagctggctttgcaggagaccagattcccaaatactgtttcccaaactatgtcgggcggccgaagcacatgcgggtgatggctggagccctggagggggacctcttcatcggaccaaaagcagaggagcaccgggggctgctgaccatccgctaccccatggagcacggcgtggtgcgagactggaacgacatggaacgcatctggcagtacgtctactccaaggatcagctgcagaccttctcggaggagcatcctgtgctcctcacggaggccccgctcaacccgagtaagaaccgggagaaggcggcagaggtgttctttgagaccttcaacgtgccggccctgttcatctccatgcaggctgtgctcagtctgtacgcaacaggacgcacgacaggagtggttctagactcaggggacggggtcactcatgctgtgcccatctatgagggctttgccatgcctcactccatcatgcgggtggacattgccggccgcgacgtctcccgctacctccgactcctgctgcgcaaggaaggggttgacttccatacctcggctgagtttgaggttgtccggacaatcaaagagcgagcgtgctacctgtccatcaacccacagaaggatgaggctctggagacggagaaggtgcagtacacgttgccagacggcagcacgcttgatgtggggcctgcacgattccgggcccccgagctgctgttccagccggaccttgtcggggatgagagtgaggggctccatgaggtggtggccttcgccatacacaagtccgacatggacctgcgccggacgctgttcgccaacatcgtgctctcaggtggctcaacgcttttcaaaggcttcggagaccgattactcagtgaagtgaagaagcttgccccaaaggatatcaaaatcaagatctcagccccgcaggaacggctgtactccacatggattggcggctccatcctggcctcgctggacacttttaagaagatgtgggtgtccaaaaaggagtatgaagaggatggctcccgtgctattcatcgcaaaactttctagtgcccaaggagggcggggcatgttgggagagggggagggaggggagacagagcctttaaccctttttggtcttggctcgtatactaggcttagggtcccctgcatgccctgaacccctgggtgggtggcacagcagtgcccccctgcagccttcccctctacacaggacatgcacacacaagtaacattgagctgcatggacaggagccttgagctggcgtgtgggaattgagcgccatgtcaggctgttgtgggtatccccctggcagggccagctaggcctgtggttccctgctccgactctcagggctgcctccctgagctccagggccagaatgcctggatgcctgggtagccagtttggggagtgggctgcaaggggcagccagcagctcccactggtgtgtcactgcatccattgccacctcctgttcgtgacctgacagggtgacacagcccctttcacactctgtcctcctatcttcctgggtagatgccctggtgtagggctgagtactgaatggtcttccatccccagcaagggggtgcagcccagggtcaggcccttcagagccagggcagaggatgcacggtggctagagccgctgcactatccttttcagagcacttcatccacttgctcctccctctaccctcggcaccctgggtgggaaagggttgatgctcatcatttattgaggggaagccacttaataaggagtcagacctaaaagggggtgggggacattttcttacctcacccaagaaagaggtcgtcacttttgctgtggccagggccccacctccctctctcagatatgtacaataatttaacacggttgcctgaaaaaaacttttgtaaatcattatagtaataattatggacaaggcccagtgtgtggctctgttttcttgtggc

SEQ ID NO: 8086 - protein, 376 aa, Homo sapiens; identical to SEQ ID NO: 556

SEQ ID NO: 8087 - DNA, 1473 bp, Homo sapiens
agaagactggcttctccatgatggtttatggactaaggcaaagatgagcagagccatggccctcttctttgttctctgctggatccaagagtcgggggtctccctatgtttcccaggctggcctcgaactcctgacctcaagtgatcctcccacctcagcctccccgagtgctgggattaaagacgtgagccacggcacctggcctgaattttcctcaaattcaaaaaatcctgatgaaggtttggctaaaatctttgatgaaattgtgctccaagtgttttccaaggttccgtatgacccatcatttgatgaaacaagaacagcagtcagatccattacaaagagagacacacaaaaaaactatgtgaaaatgagcttagcccctggtgttgtgttggaacttcagatgcttgcagacacttcatgaatgctctgtgacactcagaataggctattcccaacagaagagcttgaacaatgctgcatttgcatcaggttcaaatgagcgagaggaacatttggctaaaatatttgatgaaattctactgcaggtgtttccaaagtttccgtatgacccatcatttaacgaagcaacagcagtcagatccattacaaagacagacatgagaaaaggaaccagcattgcttggaattctcctaaaccagaatatttccttggcagtgtggacaaaattcctgataaagatcacctttcagaggagaagaattttaaagaatcctgtctgttcgacagggatttaagagagcagttaactactatagataaagaaacacttcaaggagcagctaaaccagatgctcactttaggactatgccctgcgggcagcttctgcacttcctgcagaggaacaccatcatcgccgccgtctcaggggtggccatcctcatggccatcgtgctgttgctgcttgggttggcctcatacatcaggaagaaacagccatcggacatgtattcctgaccacagaaggaagagcagctccccacagcccttcagtcctgcctgacactgcactgaatgctcagcttgcccctagagcaatggggtggagatctcctctggcaaacacgacatataatatttttataatggatggaaagacatggtggcacaattctgaagaaaaaaatttcacaaaacttgcaaaaaaacagaaacagttgaagagcagctcctgtgtctaagccaggtcgtggggccgtcaaaccaggacttgaaaccacaatgcgaggacattctccatctgcgcaccacagggaggcaattccatttctgcccgggaggtgtattctacaaaaacgtctgcttcccatcccaatttgaatggaccaagaaaaactgctttaccataggacacttgtggcaatatggcaccgatggctggcgtcggtgaacccgacagactatggatttatcatttaataaagcattgattcattttttcagtca

SEQ ID NO: 8088 - protein, 119 aa, Homo sapiens
MRKGTSIAWNSPKPEYFLGSVDKIPDKDHLSEEKNFKESCLFDRDLREQLTTIDKETLQGAAKPDAHFRTMPCGQLLHFLQRNTIIAAVSGVAILMAIVLLLLGLASYIRKKQPSDMYS

SEQ ID NO: 8089 - DNA, 1366 bp, Homo sapiens
agaagactggcttctccatgatggtttatggactaaggcaaagatgagcagagccatggccctcttctttgttctctgctggatccaagagtcgggggtctccctatgtttcccaggctggcctcgaactcctgacctcaagtgatcctcccacctcagcctccccgagtgctgggattaaagacgtgagccacggcacctggcctgaattttcctcaaattcaaaaaatcctgatgaaggtttggctaaaatctttgatgaaattgtgctccaagtgttttccaaggttccgtatgacccatcatttgatgaaacaagaacagcagtcagatccattacaaagagagacacacaaaaaaactatgtgaaaatgagcttagcccctggtgttgtgttggaacttcagatgcttgcagacacttcatgaatgctctgtgacactcagaataggctattcccaacagaagagcttgaacaatgctgcatttgcatcaggttcaaatgagcgagaggaacatttggctaaaatatttgatgaaattctactgcaggtgtttccaaagtttccgtatgacccatcatttaacgaagcaacagcagtcagatccattacaaagacagacatgagaaaaggaaccagcattgcttggaattctcctaaaccagaatatttccttggcagtgtggacaaaattcctgataaagatcacctttcagaggagaagaattttaaagaatcctgtctgttcgacagggatttaagagagcagttaactactatagataaagaaacacttcaaggagcagctaaaccagatgctcactttaggactatgccctgcgggcagcttctgcacttcctgcagaggaacaccatcatcgccgccgtctcaggggtggccatcctcatggccatcgtgctgttgctgcttgggttggcctcatacatcaggaagaaacagccatcatctcctctggcaaacacgacatataatatttttataatggatggaaagacatggtggcacaattctgaagaaaaaaatttcacaaaacttgcaaaaaaacagaaacagttgaagagcagctcctgtgtctaagccaggtcgtggggccgtcaaaccaggacttgaaaccacaatgcgaggacattctccatctgcgcaccacagggaggcaattccatttctgcccgggaggtgtattctacaaaaacgtctgcttcccatcccaatttgaatggaccaagaaaaactgctttaccataggacacttgtggcaatatggcaccgatggctggcgtcggtgaacccgacagactatggatttatcatttaataaagcattgattcattttttcagtca

SEQ ID NO: 8090 - protein, 158 aa, Homo sapiens
MRKGTSIAWNSPKPEYFLGSVDKIPDKDHLSEEKNFKESCLFDRDLREQLTTIDKETLQGAAKPDAHFRTMPCGQLLHFLQRNTIIAAVSGVAILMAIVLLLLGLASYIRKKQPSSPLANTTYNIFIMDGKTWWHNSEEKNFTKLAKKQKQLKSSSCV

SEQ ID NO: 8091 - DNA, 1192 bp, Homo sapiens
gactaaggcaaagatgagcagagccatggccctcttctttgttctctgctggatccaagtagagatgggatttcatcatgttggccaggctggtcatgaactcctgacctcaatggatcctcctgcctcagcttcctgagtagctgggaccacaggtgcacaccaccacgcccagatgaaattgtgctccaagtgttttccaaggttccgtatgacccatcatttgatgaaacaagaacagcagtcagatccattacaaagagagacacacaaaaaagctattcccaacagaagagcttgaacaatgctgcatttgcatcaggttcaaatgagcgagaggaacatttggctaaaatatttgatgaaattctactgcaggtgtttccaaagtttccgtatgacccatcatttaacgaagcaacagcagtcagatccattacaaagacagacatgagaaaaggaaccagcattgcttggaattctcctaaaccagaatatttccttggcagtgtggacaaaattcctgataaagatcacctttcagaggagaagaattttaaagaatcctgtctgttcgacagggatttaagagagcagttaactactatagataaagaaacacttcaaggagcagctaaaccagatgctcactttaggactatgccctgcgggcagcttctgcacttcctgcagaggaacaccatcatcgccgccgtctcaggggtggccatcctcatggccatcgtgctgttgctgcttgggttggcctcatacatcaggaagaaacagccatcatctcctctggcaaacacgacatataatatttttataatggatggaaagacatggtggcacaattctgaagaaaaaaatttcacaaaacttgcaaaaaaacagaaacagttgaagagcagctcctgtgtctaagccaggtcgtggggccgtcaaaccaggacttgaaaccacaatgcgaggacattctccatctgcgcaccacagggaggcaattccatttctgcccgggaggtgtattctacaaaaacgtctgcttcccatcccaatttgaatggaccaagaaaaactgctttaccataggacacttgtggcaatatggcaccgatggctggcgtcggtgaacccgacagactatggatttatcatttaataaagcattgattcattttttcagtca

SEQ ID NO: 8092 - protein, 158 aa, Homo sapiens; identical to SEQ ID NO: 8090

SEQ ID NO: 8093 - DNA, 961 bp, Homo sapiens
aaatattgctgatattaacatgcctttgtttgcttcactggagatgaaattgtgctccaagtgttttccaaggttccgtatgacccatcatttgatgaaacaagaacagcagtcagatccattacaaagagagacacacaaaaaagctattcccaacagaagagcttgaacaatgctgcatttgcatcaggttcaaatgagcgagaggaacatttggctaaaatatttggaaccagcattgcttggaattctcctaaaccagaatatttccttggcagtgtggacaaaattcctgataaagatcacctttcagaggagaagaattttaaagaatcctgtctgttcgacagggatttaagagagcagttaactactatagataaagaaacacttcaaggagcagctaaaccagatgctcactttaggactatgccctgcgggcagcttctgcacttcctgcagaggaacaccatcatcgccgccgtctcaggggtggccatcctcatggccatcgtgctgttgctgcttgggttggcctcatacatcaggaagaaacagccatcatctcctctggcaaacacgacatataatatttttataatggatggaaagacatggtggcacaattctgaagaaaaaaatttcacaaaacttgcaaaaaaacagaaacagttgaagagcagctcctgtgtctaagccaggtcgtggggccgtcaaaccaggacttgaaaccacaatgcgaggacattctccatctgcgcaccacagggaggcaattccatttctgcccgggaggtgtattctacaaaaacgtctgcttcccatcccaatttgaatggaccaagaaaaactgctttaccataggacacttgtggcaatatggcaccgatggctggcgtcggtgaacccgacagactatggatttatcatttaataaagcattgattcattttttcagtca

SEQ ID NO: 8094 - protein, 88 aa, Homo sapiens
MPCGQLLHFLQRNTIIAAVSGVAILMAIVLLLLGLASYIRKKQPSSPLANTTYNIFIMDGKTWWHNSEEKNFTKLAKKQKQLKSSSCV

SEQ ID NO: 8095 - DNA, 2431 bp, Homo sapiens
gaaataggttagtttcagacaagcctgcttgccggagctcagcagacaccaggccttccgggcaggcctggcccaccgtgggcctcagagctgctgctggggcattcagaaccggctctccattggcattgggaccagagaccccgcaagtggcctgtttgcctggacatccacctgtacgtccccaggtttcgggaggcccaggggcgatgccagaccccgcggcgcacctgcccttcttctacggcagcatctcgcgtgccgaggccgaggagcacctgaagctggcgggcatggcggacgggctcttcctgctgcgccagtgcctgcgctcgctgggcggctatgtgctgtcgctcgtgcacgatgtgcgcttccaccactttcccatcgagcgccagctcaacggcacctacgccattgccggcggcaaagcgcactgtggaccggcagagctctgcgagttctactcgcgcgaccccgacgggctgccctgcaacctgcgcaagccgtgcaaccggccgtcgggcctcgagccgcagccgggggtcttcgactgcctgcgagacgccatggtgcgtgactacgtgcgccagacgtggaagctggagggcgaggccctggagcaggccatcatcagccaggccccgcaggtggagaagctcattgctacgacggcccacgagcggatgccctggtaccacagcagcctgacgcgtgaggaggccgagcgcaaactttactctggggcgcagaccgacggcaagttcctgctgaggccgcggaaggagcagggcacatacgccctgtccctcatctatgggaagacggtgtaccactacctcatcagccaagacaaggcgggcaagtactgcattcccgagggcaccaagtttgacacgctctggcagctggtggagtatctgaagctgaaggcggacgggctcatctactgcctgaaggaggcctgccccaacagcagtgccagcaacgcctcaggggctgctgctcccacactcccagcccacccatccacgttgactcatcctcagagacgaatcgacaccctcaactcagatggatacacccctgagccagcacgcataacgtccccagacaaaccgcggccgatgcccatggacacgagcgtgtatgagagcccctacagcgacccagaggagctcaaggacaagaagctcttcctgaagcgcgataacctcctcatagctgacattgaacttggctgcggcaactttggctcagtgcgccagggcgtgtaccgcatgcgcaagaagcagatcgacgtggccatcaaggtgctgaagcagggcacggagaaggcagacacggaagagatgatgcgcgaggcgcagatcatgcaccagctggacaacccctacatcgtgcggctcattggcgtctgccaggccgaggccctcatgctggtcatggagatggctgggggcgggccgctgcacaagttcctggtcggcaagagggaggagatccctgtgagcaatgtggccgagctgctgcaccaggtgtccatggggatgaagtacctggaggagaagaactttgtgcaccgtgacctggcggcccgcaacgtcctgctggttaaccggcactacgccaagatcagcgactttggcctctccaaagcactgggtgccgacgacagctactacactgcccgctcagcagggaagtggccgctcaagtggtacgcacccgaatgcatcaacttccgcaagttctccagccgcagcgatgtctggagctatggggtcaccatgtgggaggccttgtcctacggccagaagccctacaagaagatgaaagggccggaggtcatggccttcatcgagcagggcaagcggatggagtgcccaccagagtgtccacccgaactgtacgcactcatgagtgactgctggatctacaagtgggaggatcgccccgacttcctgaccgtggagcagcgcatgcgagcctgttactacagcctggccagcaaggtggaagggcccccaggcagcacacagaaggctgaggctgcctgtgcctgagctcccgctgcccaggggagccctccacgccggctcttccccaccctcagccccaccccaggtcctgcagtctggctgagccctgcttggttgtctccacacacagctgggctgtggtagggggtgtctcaggccacaccggccttgcattgcctgcctggccccctgtcctctctggctggggagcagggaggtccgggagggtgcggctgtgcagcctgtcctgggctggtggctcccggagggccctgagctgagggcattgcttacacggatgccttcccctgggccctgacattggagcctgggcatcctcaggtggtcaggcgtagatcaccagaataaacccagcttccctcttg

SEQ ID NO: 8096 - protein, 619 aa, Homo sapiens; identical to SEQ ID NO: 558

SEQ ID NO: 8097 - DNA, 3097 bp, Homo sapiens
gaaataggttagtttcagacaagcctgcttgccggagctcagcagacaccaggccttccgggcaggcctggcccaccgtgggcctcagagctgctgctggggcattcagaaccggctctccattggcattgggaccagagaccccgcaagtggcctgtttgcctggacatccacctgtacgtccccaggtttcgggaggcccaggggcgatgccagaccccgcggcgcacctgcccttcttctacggcagcatctcgcgtgccgaggccgaggagcacctgaagctggcgggcatggcggacgggctcttcctgctgcgccagtgcctgcgctcgctgggcggctatgtgctgtcgctcgtgcacgatgtgcgcttccaccactttcccatcgagcgccagctcaacggcacctacgccattgccggcggcaaagcgcactgtggaccggcagagctctgcgagttctactcgcgcgaccccgacgggctgccctgcaacctgcgcaagccgtgcaaccggccgtcgggcctcgagccgcagccgggggtcttcgactgcctgcgagacgccatggtgcgtgactacgtgcgccagacgtggaagctggagggcgaggccctggagcaggccatcatcagccaggccccgcaggtggagaagctcattgctacgacggcccacgagcggatgccctggtaccacagcagcctgacgcgtgaggaggccgagcgcaaactttactctggggcgcagaccgacggcaagttcctgctgaggccgcggaaggagcagggcacatacgccctgtccctcatctatgggaagacggtgtaccactacctcatcagccaagacaaggcgggcaagtactgcattcccgagggcaccaagtttgacacgctctggcagctggtggagtatctgaagctgaaggcggacgggctcatctactgcctgaaggaggcctgccccaacagcagtgccagcaacgcctcaggggctgctgctcccacactcccagcccacccatccacgttgactcatcctcagagacgaatcgacaccctcaactcagatggatacacccctgagccagcacgcataacgtccccagacaaaccgcggccgatgcccatggacacgagcgtgtatgagagcccctacagcgacccagaggagctcaaggacaagaagctcttcctgaagcgcgataacctcctcatagctgacattgaacttggctgcggcaactttggctcagtgcgccagggcgtgtaccgcatgcgcaagaagcagatcgacgtggccatcaaggtgctgaagcagggcacggagaaggcagacacggaagagatgatgcgcgaggcgcagatcatgcaccagctggacaacccctacatcgtgcggctcattggcgtctgccaggccgaggccctcatgctggtcatggagatggctgggggcgggccgctgcacaagttcctggtcggcaagagggaggagatccctgtgagcaatgtggccgagctgctgcaccaggtgtccatggggatgaagtacctggaggagaagaactttgtgcaccgtgacctggcggcccgcaacgtcctgctggttaaccggcactacgccaagatcagcgactttggcctctccaaagcactgggtgccgacgacagctactacactgcccgctcagcagggaagtggccgctcaagtggtacgcacccgaatgcatcaacttccgcaagttctccagccgcagcgatgtctggagctatggggtcaccatgtgggaggccttgtcctacggccagaagccctacaagaagatgaaagggccggaggtcatggccttcatcgagcagggcaagcggatggagtgcccaccagagtgtccacccgaactgtacgcactcatgagtgactgctggatctacaagtgggaggatcgccccgacttcctgaccgtggagcagcgcatgcgagcctgttactacagcctggccagcaaggtggaagggcccccaggcagcacacagaaggctgaggctgcctgtgcctgagctcccgctgcccaggggagccctccacgccggctcttccccaccctcagccccaccccaggtcctgcagtctggctgagccctgcttggttgtctccacacacagctgggctgtggtagggggtgtctcaggccacaccggccttgcattgcctgcctggccccctgtcctctctggctggggagcagggaggtccgggagggtgcggctgtgcagcctgtcctgggctggtggctcccggagggccctgagctgagggcattgcttacacggatgccttcccctgggccctgacattggagcctgggcatcctcaggtggtcaggcgtagatcaccagaataaacccagcttccctcttgtctgagcgccctcatcttttccggggtgagggtaggtgtcaggggaggggtgggttatgaaaagtgcatggaggtgactgttcttgtgtggactgagcctggaagtgacccctgggaagatggggctgggtcccactctccaccctagggacaccttcatgtgagtgagcggctggggtggagtggggaacctgaggccaggcgggtgtgggcccaagggctgcgtgcctggctgagcccagctcccctgtgtggagatgagtgtgccccatgccaggtgcacgttaggatcacctggagctattttaacaaacgctaaccccccctcccccatccagctggggtcttcacccccccaggggtgccttgcaaatcatgagatacaatgcttttcattggtagatgcacgtattagctcccgtatgaaccgtattactgaatttgaatctgaaaaataccaaaatgcaaacattgtttttaaattaattgttttaaaagctaatgaacgaattaagacaaattgcatcaatttagtggtttcttaaatcgtggtttgcaggtagttcagttttattaaaattcatttgtgagtcgctgaacgacttacattatgtaaaatatatcagacagtaaatgaattgtggctttcattgccttttggtcatc

SEQ ID NO: 8098 - protein, 619 aa, Homo sapiens; identical to SEQ ID NO: 558

SEQ ID NO: 8099 - DNA, 2085 bp, Homo sapiens
ggggtctggaggggcgtggccgaagaggggcagtcgagggttttggggggataggagggaggaaaaggtcgtcttccccattcagtcccctttggaagctggagaggtggggcactggttggggaagaacctgaaaggaggcctcagaggcaggggctccgtggtggcggtcgccttccgcaggctgagcgatgctatggtgctctactatgccagatgggaaggtcttcaagctggagatgcgcttggggccgcgctggaagggcgaggccctggagcaggccatcatcagccaggccccgcaggtggagaagctcattgctacgacggcccacgagcggatgccctggtaccacagcagcctgacgcgtgaggaggccgagcgcaaactttactctggggcgcagaccgacggcaagttcctgctgaggccgcggaaggagcagggcacatacgccctgtccctcatctatgggaagacggtgtaccactacctcatcagccaagacaaggcgggcaagtactgcattcccgagggcaccaagtttgacacgctctggcagctggtggagtatctgaagctgaaggcggacgggctcatctactgcctgaaggaggcctgccccaacagcagtgccagcaacgcctcaggggctgctgctcccacactcccagcccacccatccacgttgactcatcctcagagacgaatcgacaccctcaactcagatggatacacccctgagccagcacgcataacgtccccagacaaaccgcggccgatgcccatggacacgagcgtgtatgagagcccctacagcgacccagaggagctcaaggacaagaagctcttcctgaagcgcgataacctcctcatagctgacattgaacttggctgcggcaactttggctcagtgcgccagggcgtgtaccgcatgcgcaagaagcagatcgacgtggccatcaaggtgctgaagcagggcacggagaaggcagacacggaagagatgatgcgcgaggcgcagatcatgcaccagctggacaacccctacatcgtgcggctcattggcgtctgccaggccgaggccctcatgctggtcatggagatggctgggggcgggccgctgcacaagttcctggtcggcaagagggaggagatccctgtgagcaatgtggccgagctgctgcaccaggtgtccatggggatgaagtacctggaggagaagaactttgtgcaccgtgacctggcggcccgcaacgtcctgctggttaaccggcactacgccaagatcagcgactttggcctctccaaagcactgggtgccgacgacagctactacactgcccgctcagcagggaagtggccgctcaagtggtacgcacccgaatgcatcaacttccgcaagttctccagccgcagcgatgtctggagctatggggtcaccatgtgggaggccttgtcctacggccagaagccctacaagaagatgaaagggccggaggtcatggccttcatcgagcagggcaagcggatggagtgcccaccagagtgtccacccgaactgtacgcactcatgagtgactgctggatctacaagtgggaggatcgccccgacttcctgaccgtggagcagcgcatgcgagcctgttactacagcctggccagcaaggtggaagggcccccaggcagcacacagaaggctgaggctgcctgtgcctgagctcccgctgcccaggggagccctccacgccggctcttccccaccctcagccccaccccaggtcctgcagtctggctgagccctgcttggttgtctccacacacagctgggctgtggtagggggtgtctcaggccacaccggccttgcattgcctgcctggccccctgtcctctctggctggggagcagggaggtccgggagggtgcggctgtgcagcctgtcctgggctggtggctcccggagggccctgagctgagggcattgcttacacggatgccttcccctgggccctgacattggagcctgggcatcctcaggtggtcaggcgtagatcaccagaataaacccagcttccctcttgtc

SEQ ID NO: 8100 - protein, 509 aa, Homo sapiens
MLWCSTMPDGKVFKLEMRLGPRWKGEALEQAIISQAPQVEKLIATTAHERMPWYHSSLTREEAERKLYSGAQTDGKFLLRPRKEQGTYALSLIYGKTVYHYLISQDKAGKYCIPEGTKFDTLWQLVEYLKLKADGLIYCLKEACPNSSASNASGAAAPTLPAHPSTLTHPQRRIDTLNSDGYTPEPARITSPDKPRPMPMDTSVYESPYSDPEELKDKKLFLKRDNLLIADIELGCGNFGSVRQGVYRMRKKQIDVAIKVLKQGTEKADTEEMMREAQIMHQLDNPYIVRLIGVCQAEALMLVMEMAGGGPLHKFLVGKREEIPVSNVAELLHQVSMGMKYLEEKNFVHRDLAARNVLLVNRHYAKISDFGLSKALGADDSYYTARSAGKWPLKWYAPECINFRKFSSRSDVWSYGVTMWEALSYGQKPYKKMKGPEVMAFIEQGKRMECPPECPPELYALMSDCWIYKWEDRPDFLTVEQRMRACYYSLASKVEGPPGSTQKAEAACA

SEQ ID NO: 8101 - DNA, 1447 bp, Homo sapiens
tgcatgctccagggacggcacccttgtctggggcaggtgcttgtgggggctgaggctgccttgctccccacacccctgcccctgacctgggagtgtaccgctgtgtgtgcccagcacgcataacgtccccagacaaaccgcggccgatgcccatggacacgagcgtgtatgagagcccctacagcgacccagaggagctcaaggacaagaagctcttcctgaagcgcgataacctcctcatagctgacattgaacttggctgcggcaactttggctcagtgcgccagggcgtgtaccgcatgcgcaagaagcagatcgacgtggccatcaaggtgctgaagcagggcacggagaaggcagacacggaagagatgatgcgcgaggcgcagatcatgcaccagctggacaacccctacatcgtgcggctcattggcgtctgccaggccgaggccctcatgctggtcatggagatggctgggggcgggccgctgcacaagttcctggtcggcaagagggaggagatccctgtgagcaatgtggccgagctgctgcaccaggtgtccatggggatgaagtacctggaggagaagaactttgtgcaccgtgacctggcggcccgcaacgtcctgctggttaaccggcactacgccaagatcagcgactttggcctctccaaagcactgggtgccgacgacagctactacactgcccgctcagcagggaagtggccgctcaagtggtacgcacccgaatgcatcaacttccgcaagttctccagccgcagcgatgtctggagctatggggtcaccatgtgggaggccttgtcctacggccagaagccctacaagaagatgaaagggccggaggtcatggccttcatcgagcagggcaagcggatggagtgcccaccagagtgtccacccgaactgtacgcactcatgagtgactgctggatctacaagtgggaggatcgccccgacttcctgaccgtggagcagcgcatgcgagcctgttactacagcctggccagcaaggtggaagggcccccaggcagcacacagaaggctgaggctgcctgtgcctgagctcccgctgcccaggggagccctccacgccggctcttccccaccctcagccccaccccaggtcctgcagtctggctgagccctgcttggttgtctccacacacagctgggctgtggtagggggtgtctcaggccacaccggccttgcattgcctgcctggccccctgtcctctctggctggggagcagggaggtccgggagggtgcggctgtgcagcctgtcctgggctggtggctcccggagggccctgagctgagggcattgcttacacggatgccttcccctgggccctgacattggagcctgggcatcctcaggtggtcaggcgtagatcaccagaataaacccagcttccctcttg

SEQ ID NO: 8102 - protein, 312 aa, Homo sapiens; identical to SEQ ID NO: 560

SEQ ID NO: 8103 - DNA, 2113 bp, Homo sapiens
tgcatgctccagggacggcacccttgtctggggcaggtgcttgtgggggctgaggctgccttgctccccacacccctgcccctgacctgggagtgtaccgctgtgtgtgcccagcacgcataacgtccccagacaaaccgcggccgatgcccatggacacgagcgtgtatgagagcccctacagcgacccagaggagctcaaggacaagaagctcttcctgaagcgcgataacctcctcatagctgacattgaacttggctgcggcaactttggctcagtgcgccagggcgtgtaccgcatgcgcaagaagcagatcgacgtggccatcaaggtgctgaagcagggcacggagaaggcagacacggaagagatgatgcgcgaggcgcagatcatgcaccagctggacaacccctacatcgtgcggctcattggcgtctgccaggccgaggccctcatgctggtcatggagatggctgggggcgggccgctgcacaagttcctggtcggcaagagggaggagatccctgtgagcaatgtggccgagctgctgcaccaggtgtccatggggatgaagtacctggaggagaagaactttgtgcaccgtgacctggcggcccgcaacgtcctgctggttaaccggcactacgccaagatcagcgactttggcctctccaaagcactgggtgccgacgacagctactacactgcccgctcagcagggaagtggccgctcaagtggtacgcacccgaatgcatcaacttccgcaagttctccagccgcagcgatgtctggagctatggggtcaccatgtgggaggccttgtcctacggccagaagccctacaagaagatgaaagggccggaggtcatggccttcatcgagcagggcaagcggatggagtgcccaccagagtgtccacccgaactgtacgcactcatgagtgactgctggatctacaagtgggaggatcgccccgacttcctgaccgtggagcagcgcatgcgagcctgttactacagcctggccagcaaggtggaagggcccccaggcagcacacagaaggctgaggctgcctgtgcctgagctcccgctgcccaggggagccctccacgccggctcttccccaccctcagccccaccccaggtcctgcagtctggctgagccctgcttggttgtctccacacacagctgggctgtggtagggggtgtctcaggccacaccggccttgcattgcctgcctggccccctgtcctctctggctggggagcagggaggtccgggagggtgcggctgtgcagcctgtcctgggctggtggctcccggagggccctgagctgagggcattgcttacacggatgccttcccctgggccctgacattggagcctgggcatcctcaggtggtcaggcgtagatcaccagaataaacccagcttccctcttgtctgagcgccctcatcttttccggggtgagggtaggtgtcaggggaggggtgggttatgaaaagtgcatggaggtgactgttcttgtgtggactgagcctggaagtgacccctgggaagatggggctgggtcccactctccaccctagggacaccttcatgtgagtgagcggctggggtggagtggggaacctgaggccaggcgggtgtgggcccaagggctgcgtgcctggctgagcccagctcccctgtgtggagatgagtgtgccccatgccaggtgcacgttaggatcacctggagctattttaacaaacgctaaccccccctcccccatccagctggggtcttcacccccccaggggtgccttgcaaatcatgagatacaatgcttttcattggtagatgcacgtattagctcccgtatgaaccgtattactgaatttgaatctgaaaaataccaaaatgcaaacattgtttttaaattaattgttttaaaagctaatgaacgaattaagacaaattgcatcaatttagtggtttcttaaatcgtggtttgcaggtagttcagttttattaaaattcatttgtgagtcgctgaacgacttacattatgtaaaatatatcagacagtaaatgaattgtggctttcattgccttttggtcatc

SEQ ID NO: 8104 - protein, 312 aa, Homo sapiens; identical to SEQ ID NO: 560

SEQ ID NO: 8105 - DNA, 708 bp, Homo sapiens
aggtgggaaaactggaaagattgaatgtcctttggagttcacagaggtttggcagtgggaggagaaaaacaaaacgaagcatagtgggagtgttgaacagactttcccaagatccccagatcctgaaattcaagaaaatatttgtcaaagtattagctgagtgcaagctaaggtatcaaaatagtgaatacacacaccaaggaataatctttgcaaaaatactttgtctcaagacaaatagaacacagcagactttaataatcaaaacagaaacaccaacatagagaacctaaggaacgaagagaatctgatttccaaagtcaccacattataaaaatcaaatgccaatcttcaacaacaacgaaaacaacaaaattcacaagacacataaagaaacaggaaaatggctcattcaaaggaataaagtgattaattggcataaactgtccctgagaaagcccagatactaaagtgacttgacatttgctcaactagataagagtgagtttcgacaaagaagtaaaggaaatttggaacataatattttatctaaaggagaatatcatcaaacaaagaaattatataaaagaaccacacaaaaattctggagctgaaaagtacagcaactgaagtttttaaaattacttgcagagatcaacaacggatttgcagattagtgaactcgaagataggaaaattgaaattatt

SEQ ID NO: 8106 - protein, 42 aa, Homo sapiens
MPIFNNNENNKIHKTHKETGKWLIQRNKVINWHKLSLRKPRY

SEQ ID NO: 8107 - DNA, 2913 bp, Homo sapiens
cttcagtagtatttatttactccccactctggtgatcctctctggtttcacattagcagagtctgagatgatgaggcttcagggactttgccatacttgggcaagggtttcctgacttaaactttttagttattgaggactcagatgagttcattaactgaccaaagttttgatgtttttcacaagcaattttttaggaactgagcgtcttttagtaatgcacgatgtctgggtccatatagttactgtactaaattaaccattccccaaacccatgattgcctcgaaacaacagtgcagggagtctgaggtctaggtggccatccgcatcggcattttggcatgactctgtttaatattctcatggccggttttgtcctcatttacataacaaaggcatgctatattttttaaaagtcactttgtcaaaatgacacttgtaaagagcttcaggttaaagaatgtgatctatgcaattttgaccttaaaagttgccagtttgtcatgtaaaaggcccatggctctcccgtctgccccactgaggatgactgcctgagagtcacccttcttccaactcagataaaccccaccccccagtttcaatattaaatcatattgtggatgcaatggaatggcagcttttaatgtctttttataaacctgcacagatgtatgtcatgagtgcactattgtaatgtagcaatactgccatagtgatgaagtgactttttgctagtttctataaaggagaaatcatccaaggttagcagggatttgcatttgtgcttgatccttgagaatagaacattttaagcatgttcatatgaaatacgcatttgtcgtaaaggaaaacgcagaaatatctgatttacgaaataccccaataggttttttcaattgaaagcaaaacctatctgcggttttcttttggaagtttatcctgacccagagtgacctgctcctcactggtaacgatggaggaggagaaggagaagggtcagagctttaaaagtcttctaagaattgtagctcatggaaaattggcgtagaaaaagtgcttgtgcttagcagtgaggtgtcatttttacgaagtaactttgttttaacagagccacactttaaagcttctgaaaataagaaccaaaccttggtaagcgaaagtttgcttacttatcttcaccttcatggcctagttgatcacaatccatttgaaacatccaaatatccctgaccgtttcatacgaggtgttttggggggtggcgactttaaggttgggggagtagggagtgacgtttctgtttatttcaaccctcagtattgtttgcctttatctgtgatttgccagtatggggatcacatactggagttcgttcatttccgtggatcttgtttttaaaagtaatcatgtgctttcgtacaggtcaactactgggttcacattaaacatgaattttctttggaaacttatgtaaactccatcttttttgagtgtatgcctgttttaacttatgcttagtttttaattgttaaaggacttcagaaatgcagtggcgaactcagccccatcactcagcttccatcctatttaactatctccaccacacccaaaaaaagcaaatcccagacatcaaatatatcatttcatccataaatactttcgcattgtaaacaccatcttagtttgtaggattttgtttcgacattcaattttccatttgggtttttgttttctcctgggggtggtaatttttcttctgggagggcttctatgtggtgcgtggcactagcatattccagcaggcagagcctcacctgcctcccctttttttccagcgatctagtgaatggcctcgtggctctcatgaacagcaacgtcagcagcccggtcaacctggggaacccagaagaacacacaatcctagaatttgctcagttaattaaaaaccttgttggtagcggaagtgaaattcagtttctctccgaagcccaggatgacccacagaaaagaaaaccagacatcaaaaaagcaaagctgatgctggggtgggagcccgtggtcccgctggaggaaggtttaaacaaagcaattcactacttccgtaaagaactcgagtaccaggcaaataatcagtacatccccaaaccaaagcctgccagaataaagaaaggacggactcgccacagctgaactcctcacttttaggacacaagactaccattgtacacttgatgggatgtatttttggcttttttttgttgtcgtttaaagaaagactttaacaggtgtcatgaagaacaaactggaatttcattctgaagcttgctttaatgaaatggatgtgcctaaaagctcccctcaaaaaactgcagattttgccttgcactttttgaatctctctttttatgtaaaatagcgtagatgcatctctgcgtattttcaagtttttttatcttgctgtgagagcatatgttgtgactgtcgttgacagttttatttactggtttctttgtgaagctgaaaaggaacattaagcgggacaaaaaatgccgattttatttatgaaagtgggtacttaataaatgagtcgttatactatgcataaagaaaaatcctagcagtattgtcaggtggtggtgcgccggcattgattttagggcagataaaagaattctgtgtgagagctttatgtttctcttttaattcagagtttttccaaggtctacttttgagttgcaaacttgactttgaaatattcctgttggtcatgatcaaggatatttgaaatcactactgtgttttgctgcgtatctggggcgggggcaggttggggggcacaaagttaacatattcttggttaaccatggttaaatatgctattttaataaattattgaaactcaccagtcatggac

SEQ ID NO: 8108 - protein, 139 aa, Homo sapiens
MWCVALAYSSRQSLTCLPFFSSDLVNGLVALMNSNVSSPVNLGNPEEHTILEFAQLIKNLVGSGSEIQFLSEAQDDPQKRKPDIKKAKLMLGWEPVVPLEEGLNKAIHYFRKELEYQANNQYIPKPKPARIKKGRTRHS

SEQ ID NO: 8109 - DNA, 2000 bp, Homo sapiens
gcgcattgtgcagcaggcgggcccccgcgcggtagggccctggacccgcgcggctcccggggatggtgagcaaggcgctgctgcgcctcgtgtctgccgtcaaccgcaggaggatgaagctgctgctgggcatcgccttgctggcctacgtcgcctctgtttggggcaacttcgttaatatgagatggttgaaccactaagagagaaaatcagagatttagaaaaaagctttacccagaaatacccaccagtaaagtttttatcagaaaaggatcggaaaagaattttgataacaggaggcgcagggttcgtgggctcccatctaactgacaaactcatgatggacggccacgaggtgaccgtggtggacaatttcttcacgggcaggaagagaaacgtggagcactggatcggacatgagaacttcgagttgattaaccacgacgtggtggagcccctctacatcgaggttgaccagatataccatctggcatctccagcctcccctccaaactacatgtataatcctatcaagacattaaagaccaatacgattgggacattaaacatgttggggctggcaaaacgagtcggtgcccgtctgctcctggcctccacatcggaggtgtatggagatcctgaagtccaccctcaaagtgaggattactggggccacgtgaatccaataggacctcgggcctgctacgatgaaggcaaacgtgttgcagagaccatgtgctatgcctacatgaagcaggaaggcgtggaagtgcgagtggccagaatcttcaacacctttgggccacgcatgcacatgaacgatgggcgagtagtcagcaacttcatcctgcaggcgctccagggggagccactcacggtatacggatccgggtctcagacaagggcgttccagtacgtcagcgatctagtgaatggcctcgtggctctcatgaacagcaacgtcagcagcccggtcaacctggggaacccagaagaacacacaatcctagaatttgctcagttaattaaaaaccttgttggtagcggaagtgaaattcagtttctctccgaagcccaggatgacccacagaaaagaaaaccagacatcaaaaaagcaaagctgatgctggggtgggagcccgtggtcccgctggaggaaggtttaaacaaagcaattcactacttccgtaaagaactcgagtaccaggcaaataatcagtacatccccaaaccaaagcctgccagaataaagaaaggacggactcgccacagctgaactcctcacttttaggacacaagactaccattgtacacttgatgggatgtatttttggcttttttttgttgtcgtttaaagaaagactttaacaggtgtcatgaagaacaaactggaatttcattctgaagcttgctttaatgaaatggatgtgcctaaaagctcccctcaaaaaactgcagattttgccttgcactttttgaatctctctttttatgtaaaatagcgtagatgcatctctgcgtattttcaagtttttttatcttgctgtgagagcatatgttgtgactgtcgttgacagttttatttactggtttctttgtgaagctgaaaaggaacattaagcgggacaaaaaatgccgattttatttatgaaagtgggtacttaataaatgagtcgttatactatgcataaagaaaaatcctagcagtattgtcaggtggtggtgcgccggcattgattttagggcagataaaagaattctgtgtgagagctttatgtttctcttttaattcagagtttttccaaggtctacttttgagttgcaaacttgactttgaaatattcctgttggtcatgatcaaggatatttgaaatcactactgtgttttgctgcgtatctggggcgggggcaggttggggggcacaaagttaacatattcttggttaaccatggttaaatatgctattttaataaattattgaaactcaccagtcatggac

SEQ ID NO: 8110 - protein, 363 aa, Homo sapiens
MVEPLREKIRDLEKSFTQKYPPVKFLSEKDRKRILITGGAGFVGSHLTDKLMMDGHEVTVVDNFFTGRKRNVEHWIGHENFELINHDVVEPLYIEVDQIYHLASPASPPNYMYNPIKTLKTNTIGTLNMLGLAKRVGARLLLASTSEVYGDPEVHPQSEDYWGHVNPIGPRACYDEGKRVAETMCYAYMKQEGVEVRVARIFNTFGPRMHMNDGRVVSNFILQALQGEPLTVYGSGSQTRAFQYVSDLVNGLVALMNSNVSSPVNLGNPEEHTILEFAQLIKNLVGSGSEIQFLSEAQDDPQKRKPDIKKAKLMLGWEPVVPLEEGLNKAIHYFRKELEYQANNQYIPKPKPARIKKGRTRHS

SEQ ID NO: 8111 - DNA, 2191 bp, Homo sapiens
cggaggggcgggggcggagccggaggaagggggtggaggcgcgcctgcgcggtgatcccgccagcaggaagcaggcgcgcgggggcgggggcgcgcggcggcaggaggcggggctctcggggccgctgccgccgccgccgccgcgcattgtgcagcaggcgggcccccgcgcggtagggccctggacccgcgcggctcccggggatggtgagcaaggcgctgctgcgcctcgtgtctgccgtcaaccgcaggaggatgaagctgctgctgggcatcgccttgctggcctacgtcgcctctgtttggggcaacttcgttaatatgaggtctatccaggaaaatggtgaactaaaaattgaaagcaagattgaagagatggttgaaccactaagagagaaaatcagagatttagaaaaaagctttacccagaaatacccaccagtaaagtttttatcagaaaaggatcggaaaagaattttgataacaggaggcgcagggttcgtgggctcccatctaactgacaaactcatgatggacggccacgaggtgaccgtggtggacaatttcttcacgggcaggaagagaaacgtggagcactggatcggacatgagaacttcgagttgattaaccacgacgtggtggagcccctctacatcgaggttgaccagatataccatctggcatctccagcctcccctccaaactacatgtataatcctatcaagacattaaagaccaatacgattgggacattaaacatgttggggctggcaaaacgagtcggtgcccgtctgctcctggcctccacatcggaggtgtatggagatcctgaagtccaccctcaaagtgaggattactggggccacgtgaatccaataggacctcgggcctgctacgatgaaggcaaacgtgttgcagagaccatgtgctatgcctacatgaagcaggaaggcgtggaagtgcgagtggccagaatcttcaacacctttgggccacgcatgcacatgaacgatgggcgagtagtcagcaacttcatcctgcaggcgctccagggggagccactcacggtatacggatccgggtctcagacaagggcgttccagtacgtcagcgatctagtgaatggcctcgtggctctcatgaacagcaacgtcagcagcccggtcaacctggggaacccagaagaacacacaatcctagaatttgctcagttaattaaaaaccttgttggtagcggaagtgaaattcagtttctctccgaagcccaggatgacccacagaaaagaaaaccagacatcaaaaaagcaaagctgatgctggggtgggagcccgtggtcccgctggaggaaggtttaaacaaagcaattcactacttccgtaaagaactcgagtaccaggcaaataatcagtacatccccaaaccaaagcctgccagaataaagaaaggacggactcgccacagctgaactcctcacttttaggacacaagactaccattgtacacttgatgggatgtatttttggcttttttttgttgtcgtttaaagaaagactttaacaggtgtcatgaagaacaaactggaatttcattctgaagcttgctttaatgaaatggatgtgcctaaaagctcccctcaaaaaactgcagattttgccttgcactttttgaatctctctttttatgtaaaatagcgtagatgcatctctgcgtattttcaagtttttttatcttgctgtgagagcatatgttgtgactgtcgttgacagttttatttactggtttctttgtgaagctgaaaaggaacattaagcgggacaaaaaatgccgattttatttatgaaagtgggtacttaataaatgagtcgttatactatgcataaagaaaaatcctagcagtattgtcaggtggtggtgcgccggcattgattttagggcagataaaagaattctgtgtgagagctttatgtttctcttttaattcagagtttttccaaggtctacttttgagttgcaaacttgactttgaaatattcctgttggtcatgatcaaggatatttgaaatcactactgtgttttgctgcgtatctggggcgggggcaggttggggggcacaaagttaacatattcttggttaaccatggttaaatatgctattttaataaattattgaaactcaccagtcatggac

SEQ ID NO: 8112 - protein, 420 aa, Homo sapiens; identical to SEQ ID NO: 562

SEQ ID NO: 8113 - DNA, 1924 bp, Homo sapiens
aggataggaactggagttattgttaatgttacaggaagaacacattctcaaaggagaggggggtggtgggaaactttgattttcatagggttttcagtttcctctcaaatgggaggatgcagcagtgccgctacttaactgaacgtctcgacagtctgatggggcggccctcagccttccggagcagcagtgggactgacctgtccagtgaggaagaaacactgaaccagatggaatggcctttggggatggaaaaaccccagtttacgctcatctcttctctcagctaacttttgtggagccctgttcccaaactggcctgggccagagcaccgtggaggggtatttgttgtaaatggaaggtttccaggcccgcctggaaatcctgaagggtgagacctgcagtgggctcaggagtctgcatttgtgggtgaccgagggggcctcccctccctctagagtccacactgtggagagcatcaggaagggaaaggcctgcatcttgtgctcagtgagctcatcgtctagtgaggaaggcatgtgtgaatctctggacaaggcagcgctgagctgttgtggactagtggtgcaggcaagggattatttctgaccaaggatggtgagaaggtttcccatacagactgacgtctggattgagctttgaagaagaaagccaggactggagcagacgacgaggagggaagagtttgaccagatataccatctggcatctccagcctcccctccaaactacatgtataatcctatcaagacattaaagaccaatacgattgggacattaaacatgttggggctggcaaaacgagtcggtgcccgtctgctcctggcctccacatcggaggtgtatggagatcctgaagtccaccctcaaagtgaggattactggggccacgtgaatccaataggacctcgggcctgctacgatgaaggcaaacgtgttgcagagaccatgtgctatgcctacatgaagcaggaaggcgtggaagtgcgagtggccagaatcttcaacacctttgggccacgcatgcacatgaacgatgggcgagtagtcagcaacttcatcctgcaggcgctccagggggagccactcacggtatacggatccgggtctcagacaagggcgttccagtacgtcagcgatctagtgaatggcctcgtggctctcatgaacagcaacgtcagcagcccggtcaacctggggaacccagaagaacacacaatcctagaatttgctcagttaattaaaaaccttgttggtagcggaagtgaaattcagtttctctccgaagcccaggatgacccacagaaaagaaaaccagacatcaaaaaagcaaagctgatgctggggtgggagcccgtggtcccgctggaggaaggtttaaacaaagcaattcactacttccgtaaagaactcgagtaccaggcaaataatcagtacatccccaaaccaaagcctgccagaataaagaaaggacggactcgccacagctgaactcctcacttttaggacacaagactaccattgtacacttgatgggatgtatttttggcttttttttgttgtcgtttaaagaaagactttaacaggtgtcatgaagaacaaactggaatttcattctgaagcttgctttaatgaaatggatgtgcctaaaagctcccctcaaaaaactgcagattttgccttgcactttttgaatctctctttttatgtaaaatagcgtagatgcatctctgcgtattttcaagtttttttatcttgctgtgagagcatatgttgtgactgtcgttgacagttttatttactggtttctttgtgaagctgaaaaggaacattaagcgggacaaaaaatgccgattttatttatgaaagtgggtacttaataaatgagtcgttatactatgc

SEQ ID NO: 8114 - protein, 252 aa, Homo sapiens
MYNPIKTLKTNTIGTLNMLGLAKRVGARLLLASTSEVYGDPEVHPQSEDYWGHVNPIGPRACYDEGKRVAETMCYAYMKQEGVEVRVARIFNTFGPRMHMNDGRVVSNFILQALQGEPLTVYGSGSQTRAFQYVSDLVNGLVALMNSNVSSPVNLGNPEEHTILEFAQLIKNLVGSGSEIQFLSEAQDDPQKRKPDIKKAKLMLGWEPVVPLEEGLNKAIHYFRKELEYQANNQYIPKPKPARIKKGRTRHS

SEQ ID NO: 8115 - DNA, 431 bp, Homo sapiens
caatgagaactttaatatgactgaccttcaaatcccaagacaggcttgaagcacatccagactccctctgaaaaagactgctttgaagttcaaacgttttctgctgttgctttacttcacttatttattttggttacagcaactctaaaaagcttaaccaaaaagaaactgatggattaactccaaattcactcttggcccttctaaatgcagggcgatgaggaaaccctcagcccccctcagaggagaagttcccacttgctggccgtcactgcccttcctgcctggaaggagtccctccatgttgcaggttactttacaacacacacccacaccttttttcccttgaagctcatcaagtgaagttatcagctctttagagaaatcccttcaattcctcacagtatttaaaacaaattatttttacctgc

SEQ ID NO: 8116 - protein, 51 aa, Homo sapiens
MQGDEETLSPPQRRSSHLLAVTALPAWKESLHVAGYFTTHTHTFFPLKLIK

SEQ ID NO: 8117 - DNA, 363 bp, Homo sapiens
atggctttctctgctcgcgcgcagtgtggcggcagcaggtgcggctttgagatgcagaatgacactggtgagttcataggcctgtacatgccatggaaatggtccaatagcaactgcatcatcgatgccaaggaccacaaatccatccagatgaacggggccaaggttgacaaggtagcaggcaggtttaaccaccagtttaaaacctatgctatctgcagggccattcgcaggatggagccccttctctttgatcacttcttccgtggtaacagtgaacagaattctgctgggagccacagaatgtttactgaagatttatgggtcaccggagtaactccaaccaccaattcctgtctctga

SEQ ID NO: 8118 - protein, 120 aa, Homo sapiens
MAFSARAQCGGSRCGFEMQNDTGEFIGLYMPWKWSNSNCIIDAKDHKSIQMNGAKVDKVAGRFNHQFKTYAICRAIRRMEPLLFDHFFRGNSEQNSAGSHRMFTEDLWVTGVTPTTNSCL

SEQ ID NO: 8119 - DNA, 1180 bp, Homo sapiens
actctcatgtaagtcaacaacatcctgggactgggacacactttctgggcactgctggccagtcccaaaatggaacataaggaagtggttcttctacttcttttatttctgaaatcaggtcaaggagagcctctggatgactatgtaaatgcccagggggcttcactgttcagtgtcactaagaagcagctgggggcaggaagcagagaagaatgtgcagcaaaatgtgaggaggacaaagaattcacctgcagggcattccaatatcacagtaaagagcaacaatgtgtgataatggctgaaaacaagaagtcctccataatcattaggatgagagatgtagttttatttgaaaagtaaatgtatctttcagagtgcaagactgggaatggaaagaactacagagggacgatgtccaaaacaaaaaatggcatcacctgtcaaaaatggagttccacttctccccgcagacctaggtaagactttccctttcatctttgtgttcatctactgtaaagttgtccctctgtgtctgtgagggattggttccaggacccctgtggctaccaaaatccatgcttctcaagtcccttatgtaaaatggtgcagtatttgcatataacctacataccttctcttgtgcaatccctaatataatgtaaatgctatgtaatcgttgttatgctgtattgtttttatttgtattatgttttattgtcatattgttattttctctcatctttttcaagtcttttccatccacagttggttgaatttgtggatgtggaacccatggatacagagggccaactgtatttaggataatttcatcacttttaattcaaaccagaatatgtgaataagcagacagaaagaatctttttgatgtcgatgttcaactatttttggcaccatagtagaacatcgttgctttctattttttcttgggtatggaggtttcttgaagacctagaacatagaagaatgcctagttaaaaaaaaaaatcaatgaaactacgagttttaggccaaatctgagaaaagaccaaagatgactatgtttgggactgaagtaaacatatcaagttagaactctcatcacatgtttgactcaaattgtggagcaaaatagtaaataaaatataaaaatgacaatgaagatacgtgaaattcaaatgtc

SEQ ID NO: 8120 - protein, 96 aa, Homo sapiens; identical to SEQ ID NO: 568

SEQ ID NO: 8121 - DNA, 557 bp, Homo sapiens
gcctctggatgactatgtaaatgcccagggggcttcactgttcagtgtcactaagaagcagctgggggcaggaagcagagaagaatgtgcagcaaaatgtgaggaggacaaagaattcacctgcagggcattccaatatcacagtaaagagcaacaatgtgtgataatggctgaaaacaagaagtcctccataatcattaggatgagagatgtagttttatttgaaaagtaaatgtatctttcagagtgcaagactgggaatggaaagaactacagagggacgatgtccaaaacaaaaaatggcatcacctgtcaaaaatggagttccacttctccccgcagacctagattctcacctgctacacacccctcagagggactggaggaatccagacaacgatgcgcaggggccctggtgttatactactgatccagaacagagatatgactactgcgacattcctgagtgtgaagggcaggagtggctctagaaaatgttttcatttctgctcttcacctgtaaaataatttgttgtaaagccccttcccacagggat

SEQ ID NO: 8122 - protein, 76 aa, Homo sapiens
MERTTEGRCPKQKMASPVKNGVPLLPADLDSHLLHTPQRDWRNPDNDAQGPWCYTTDPEQRYDYCDIPECEGQEWL

SEQ ID NO: 8123 - DNA, 345 bp, Homo sapiens
ccaatttaaacttttgttttgtcatatgcaatgattttattacctgtctttatttcagagcttatgaatttttaattattctaagggctaacatagaactttttcatgttttctactcttcaagagtaggtaagactttagtttgtaatacattacaaaaggaatcctgtggttctctaagagctaatttgtcttggcaaaaggccttagtgagcttgctgggattacaggagtgagccaccacacccagcctctagtagtacttttatcaaaagtaaatggaaacatgaaattaattttcacaatacattttatttaaactaatatgttcacaatgttaaaatt

SEQ ID NO: 8124 - protein, 77 aa, Homo sapiens [sequence omitted]

SEQ ID NO: 8125 - DNA, 7689 bp, Homo sapiens
atgacgaacttctatgaagaaaggacaacgatgattgcagccagggatttgcaggaatttgttccttttggtggagaccactgcaagcaccaccctaatgctttgaaccttcaacttcgccagctgcagccagcttcagaattatggtcttctgatggtgctgctggcttggtgggatcccttcaggaggttacaatccacgagaaacagaaggaaaactggcagttaaggaaaggagtaagtgaaattggagaagatgtggactatgatgaggaactctatgttgctggaaatatggtgatatggagcaaaggaagtaaaagccaggcattggcagtttataaagcatttacagttgacagtcctgttcagcaggtgggaaaggtttttattcctggactgccagctccctctctgacgatgtccaacacaatgcctcggcccagtactccactagatggcgttagtgctccaaagcctcttagtaaactccttggatcattggacgagtggctttcaggcgctttcctcttggaattggcgactgctgcggggctgagcgctggtctcacgcatctcgggagccaggttggtggcgcgatgagttgcagcaaggcctacggggagcggtacgtcgcctcggtgcagggctccgccccgtcgcctcgaaagaagtcaacgagaggattctattttgcaaagctgtattatgaagctaaagaatatgatcttgctaaaaaatacatatgtacttacattaatgtgcgagagatggatcccagagctcacagatttctgggtcttctttatgaattggaagaaaacacagagaaagccgttgaatgttacaggcgttcagtggaattaaacccaacacaaaaagatcttgtgttgaagattgcagaattgctttgtaaaaatgatgttactgatggaagagcagaatactgggtggaaagagcagcaaaacttttcccaggaagtcctgcaatttataaactaaaggaacagcttctagattgtgaaggtgaagatggatggaataaactttttgacttgattcagtcagaactttatgtaagacctgatgacgtccatgtgaacatccggctagtggagttgtatcgctcaactaaaagattgaaggatgctgtggcccgctgccatgaggcagagaggaacatagctttgcgttcaagtttagagtggaattcgtgtgttgtacagacccttaaggaatatctggagtctttacagtgtttggagtctgataaaagtgactggcgagcaaccaatacagacttactgctggcctatgctaatcttatgcttcttacgctttccactagagatgtgcaggaaagtagagaattactggaaagttttgatagtgctcttcagtctgcgaaatcttctttgggtggaaatgatgaactgtcagctactttcttagaaatgaaaggacatttctacatgcatgctggttctctgctcttgaagatgggtcagcatggtaataatgttcaatggcgagctctttctgagctggctgcattgtgctatctcatagcatttcaggttccaagaccaaagattaaattaataaaaggtgaagctggacaaaatctgctggaaatgatggcctgtgaccgactgagccaatcagggcacatgttgctaaacttaagtcgtggcaagcaagattttttaaaagtggttgttgaaacttttgccaacaaaagcgggcagtctgcattatatgatgctctgttttctagtcagtcacctaaggatacatcttttcttggtagcgatgatattggaaacattgatgtacaagaaccagagcttgaagatttggctagatacgatgttggtgctattcgagcacataatggtagtcttcagcaccttacttggcttggcttacagtggaattcattgcctgctttacctggaatccgaaaatggctaaaacagcttttccatcatttgccccaggaaacctcaaggcttgaaacaaatgcacctgaatcaatatgtattttagatcttgaagtatttctccttggagtagtatataccagccacttacaattaaaggagaaatgtaattctcaccacagctcctatcagccgttatgcctgccccttcctgtgtgtaaacagctttgtacagaaagacaaaaatcttggtgggatgcggtttgtactctgattcacagaaaagcagtacctggaaactcagcaaaattgagacttctagttcagcatgaaataaacactctaagagcccaggaaaaacatggccttcaacctgctctgcttgtacattgggcaaaatgccttcagaaaatgggcagcggtcttaattctttttatgatcaacgagaatacatagggagaagtgttcattattggaagaaagttttgccattgttgaagataataaaaaagaagaacagtattcctgaacctattgatcctctgtttaaacattttcatagtgtagacattcaggcatcagaaattgttgaatatgaagaagacgcacacgtaacttttgctatattggatgcagtaaatggaaatatagaagatgctatgactgcttttgaatctataaaaagtgttgtttcttattggaatcttgcactgatttttcacaggaaggcagaagacattgcaaatgatgccctttctcctgaagaacaagaagaatgcaaaaattatctgagaaagaccaggggctacctaataaagattttagatgacagtgattcaaatctttcagtggtcaagaaattgcctgtgcccctggagtctgtaaaagagatgcttaagtcagtcatgcaggaactcgaaaactatagtgaaggaggtcctctctataaaaatggttctttgcgaaatgcggattcagaaataaaacattctacaccatctcctaccaaatattcactatcaccaagtaaaagttacaagtattctcccaaaacaccacctcgatgggcagaagatcagaattctttactgaaaatgattcgccaagaagtaaaggccattaaggaagaaatgcaggagttgaaactaaatagcagtaagtcagcatcccatcatcgttggcccacagagaattatggaccagactcggtgcctgatggatatcaggggtcacagacatttcatggggctccactaacagttgcaactactggcccttcagtatattatagtcagtcaccagcatataattcccagtatcttctcagaccagcagctaatgttactcccacaaagggttcttctaatacagaatttaagtcaaccaaagaaggattttccatccctgtgtctgctgatggatttaaatttggcatttcggaaccaggaaatcaagaaaagaaaagtgaaaagcctcttgaaaatgatactggcttacaggctcaggatattagtggccggaagaagggccgtggtgtgatttttggccaaacaagtagcacttttacatttgcagatgttgcaaaatcaacttcaggagaaggatttcagtttggcaaaaaagacctcaatttcaagggattttcaggtgctggagaaaaattattctcatcacaatacggtaaaatggccaataaagcaaacacttccggtgactttgagaaagatgatgatgcctataagactgaggacagcgatgacatccattttgaaccagtagttcaaatgcctgaaaaagtagaacttgtaacaggagaagaaggtgaaaaagttctgtattcacagggggtaaaactatttagatttgatgctgaggtaagtcagtggaaagaaaggggcttggggaacttaaaaattctcaaaaacgaggtcaatggcaaagtaagaatgctgatgcaaagagaacaagtactaaaagtgtgtgctaatcattggataacgactacaatgaacctgaagcccctctctggatcagatagagcatggatgtggtcagccagtgatttctctgatggtgatgccaaactagagcgattggcagcaaaatttaaaacaccagagctggctgaagaattcaagcagaaatttgaggaatgccagcggcttctgttagacataccacttcaaactccccataaacttgtagatactggcagagctgccaagttaatacagagagctgaagaaatgaagagtggactgaaagatttcaaaacatttttgacaaatgatcaaacaaaagtcgctgaggaagaaaataagggttcaggtacaggtgcggccggtgcctcagacacaacaataaaacccaatgctgaaaacactgggcccacattagaatgggataactatgatttaagggaagatgctttggatgatagtgtcagtagtagctcagtacatgcttctccattggcaagtagccctgtgagaaaaaatcttttccactttgatgagtcaacaacaggatctaacttcagttttaaatctgctttgagtctatctaagtctcctgccaagttgaatcagagtgggacttcagttggcactgatgaagaatctgatgttactcaagaagaagagagagatggacagtactttgaacctgttgttcctttacctgatctagttgaagtatccagtggtgaggaaaatgaacaagttgtttttagtcacagggcagaattctacagatatgataaagatgttggtcaatggaaagaaaggggcattggtgatataaagattttacagaattatgataataagcacgttcgtatactgatgagaagggaccaagtattaaaactttgtgccaatcacagaataactccagacatgagtttgcaaaatatgaaagggacagaaagagtatgggtgtggactgcatgtgattttgcagatggagaaagaaaagtagagcatttagctgttcgttttaaactacaggatgttgcagactcgtttaagaaaatttttgatgaagcaaaaacagcccaggaaaaagattctttgataacacctcatgtttctcggtcaagcactcccagagagtcaccatgtggcaaaattgctgtagctgtattagaagaaaccacaagagagaggacagatgttattcagggtgatgatgtagcagatgcagcttcagaagttgaagtgtctagcacatctgaaacaacaacaaaagcagtggtttctcctccaaagtttgtatttggttcagagtctgttaaaagaatttttagtagtgaaaaatcaaaaccatttgcatttggcaacagttctgccactgggtctttgtttggatttagttttaatgcacctttgaaaagtaacaatagtgaaactagttcagtagcccagagtggatctgaaagcaaagtggaacctaaaaaatgtgaactgtcaaagaactctgatatcgaacagtcttcagatagcaaagtcaaaaatctctctgcttcctttccaacggaagaatcttcaatcaactacacatttaaaacaccagaaaaggagcctccattatggtatgctgaatttactaaagaagaattggttcagaagctcagttccaccacaaaaagtgcagatcacttaaacggcctgcttcgggaaatagaggcaaccaatgcagtccttatggagcaaattaagcttctcaaaagtgaaataagaagattggaaaggaatcaagagcaagaggtgtctgcagctaacgtggaacacttgaagaacgtcttgctgcagttcattttcttgaagccaggtagtgaaagagagagacttcttcctgttataaatacgatgttgcagctcagccttgaagaaaagggaaaacttgctgcggttgctcaaggtgaggaataaaatgcttcccgttcttctggatgggcatcctatcttcgtagttggtttggacttcgataggttgatggaaggaatgtttttattaaccaaataaaatctatttacaaaaatggttcatgtgtattaccatcattcttttgtcaaaaagtgtgtatatgtttgcatttacatatatttgtacatctatatgacagatgtattttaaaagtttcaacttgaagtaaaagtacaacagcttgaagtgttgataccaggccacagccctctaactcatgtgatctcccatgcatgctgccagaataaaaccaccaggaatgaattcactccccacttctctggaacctcaggacccgcccatttctcggcagtactgtgaattttgaagttaaactaaattttggtaccataccaactggaatttaggctttaaaaataatgtttcaaggccaggtgtggtgattcatgcctgaaatcccactacttggggaggctgaggctggagaatcgtttgaggctagtgagctgtgattgtatcactgcactccagctcggggaacagagcgagaccttgtctctaaaaataataatagtaataaaaataacattttatgactatttattgcaaggtcagatttacagattgttataaattgttgagaaatttttgtgattagaatatgaaggaaaaagctttgttggtaaaagtgacatgttaaggggctatgaagtaaatatgctgcagttaattgtgctaagttaaaatacagtttagttatttgctttaaaataaactcttctttttttctttaaagtatactatctcaaaactcattatgttgtcagagccctagagctggctagtgtaacactgactatgaataggtgggcccaccacttgagttgaggtgatttcatggtgtctttccaggctcttgatagggtgtcactgcatgcaagccatgaatctgttttgagaatcctctccattttcccaaataaaaacctatcccaacagtgactatatcactcagcattgaatctaaatataaaagtggtgctttcagtgtttttggcagatagtgttccataagctttccatcagaagggattttagacaccttagaggtccgtgctacatcttcacagttcctctgaataaccttaggtggtagtgttacttgcctttgacaccgctgcatatgttttaatgactagatccaaactgtgttgttcttaaatcaaaaattggataatttttaatatttatgtattaatcacatagtatgctctctgaagttctcttaagccttcagtttatactcttaattttctttctgagctggggaactgactttgcactttggttacacagaacattggtttccaatttagtttaactgaaatttgctgctgatatgttgagtttgttctttaaaaaatatctcatatatctcgtctttcctccttagaagaacagacctaactagcgaatgtatgaatgaaaatgcatctatttcagagccgacatgaagagtttagtttttttactttataaactgtgaatatgagtatgccagctgcatacgatgtaactaatcatatttaaatatatttcactttctctttgacttgagaccttttgaagtctgtataaacttgttttgaaatatagtctccacttacaaatgtcataacaaaatacttttttgcatgataaaaaattgattacaaaaggcatattctttcatggtttctgcaatgagaggaagtgtaatgattattttaatatttctattaaatatgtttaactgt

SEQ ID NO: 8126 - protein, 1958 aa, Homo sapiens
MTNFYEERTTMIAARDLQEFVPFGGDHCKHHPNALNLQLRQLQPASELWSSDGAAGLVGSLQEVTIHEKQKENWQLRKGVSEIGEDVDYDEELYVAGNMVIWSKGSKSQALAVYKAFTVDSPVQQVGKVFIPGLPAPSLTMSNTMPRPSTPLDGVSAPKPLSKLLGSLDEWLSGAFLLELATAAGLSAGLTHLGSQVGGAMSCSKAYGERYVASVQGSAPSPRKKSTRGFYFAKLYYEAKEYDLAKKYICTYINVREMDPRAHRFLGLLYELEENTEKAVECYRRSVELNPTQKDLVLKIAELLCKNDVTDGRAEYWVERAAKLFPGSPAIYKLKEQLLDCEGEDGWNKLFDLIQSELYVRPDDVHVNIRLVELYRSTKRLKDAVARCHEAERNIALRSSLEWNSCVVQTLKEYLESLQCLESDKSDWRATNTDLLLAYANLMLLTLSTRDVQESRELLESFDSALQSAKSSLGGNDELSATFLEMKGHFYMHAGSLLLKMGQHGNNVQWRALSELAALCYLIAFQVPRPKIKLIKGEAGQNLLEMMACDRLSQSGHMLLNLSRGKQDFLKVVVETFANKSGQSALYDALFSSQSPKDTSFLGSDDIGNIDVQEPELEDLARYDVGAIRAHNGSLQHLTWLGLQWNSLPALPGIRKWLKQLFHHLPQETSRLETNAPESICILDLEVFLLGVVYTSHLQLKEKCNSHHSSYQPLCLPLPVCKQLCTERQKSWWDAVCTLIHRKAVPGNSAKLRLLVQHEINTLRAQEKHGLQPALLVHWAKCLQKMGSGLNSFYDQREYIGRSVHYWKKVLPLLKIIKKKNSIPEPIDPLFKHFHSVDIQASEIVEYEEDAHVTFAILDAVNGNIEDAMTAFESIKSVVSYWNLALIFHRKAEDIANDALSPEEQEECKNYLRKTRGYLIKILDDSDSNLSVVKKLPVPLESVKEMLKSVMQELENYSEGGPLYKNGSLRNADSEIKHSTPSPTKYSLSPSKSYKYSPKTPPRWAEDQNSLLKMIRQEVKAIKEEMQELKLNSSKSASHHRWPTENYGPDSVPDGYQGSQTFHGAPLTVATTGPSVYYSQSPAYNSQYLLRPAANVTPTKGSSNTEFKSTKEGFSIPVSADGFKFGISEPGNQEKKSEKPLENDTGLQAQDISGRKKGRGVIFGQTSSTFTFADVAKSTSGEGFQFGKKDLNFKGFSGAGEKLFSSQYGKMANKANTSGDFEKDDDAYKTEDSDDIHFEPVVQMPEKVELVTGEEGEKVLYSQGVKLFRFDAEVSQWKERGLGNLKILKNEVNGKVRMLMQREQVLKVCANHWITTTMNLKPLSGSDRAWMWSASDFSDGDAKLERLAAKFKTPELAEEFKQKFEECQRLLLDIPLQTPHKLVDTGRAAKLIQRAEEMKSGLKDFKTFLTNDQTKVAEEENKGSGTGAAGASDTTIKPNAENTGPTLEWDNYDLREDALDDSVSSSSVHASPLASSPVRKNLFHFDESTTGSNFSFKSALSLSKSPAKLNQSGTSVGTDEESDVTQEEERDGQYFEPVVPLPDLVEVSSGEENEQVVFSHRAEFYRYDKDVGQWKERGIGDIKILQNYDNKHVRILMRRDQVLKLCANHRITPDMSLQNMKGTERVWVWTACDFADGERKVEHLAVRFKLQDVADSFKKIFDEAKTAQEKDSLITPHVSRSSTPRESPCGKIAVAVLEETTRERTDVIQGDDVADAASEVEVSSTSETTTKAVVSPPKFVFGSESVKRIFSSEKSKPFAFGNSSATGSLFGFSFNAPLKSNNSETSSVAQSGSESKVEPKKCELSKNSDIEQSSDSKVKNLSASFPTEESSINYTFKTPEKEPPLWYAEFTKEELVQKLSSTTKSADHLNGLLREIEATNAVLMEQIKLLKSEIRRLERNQEQEVSAANVEHLKNVLLQFIFLKPGSERERLLPVINTMLQLSLEEKGKLAAVAQGEE

SEQ ID NO: 8127 - DNA, 508 bp, Homo sapiens
tgtttttgagcccaaggaacaagtatttagtcatgattgccactcgttataggctctgttaacagtgtaaagaaagttggaagttctctcctgagaagaagtaacttcaatgcggaaggacccgggcttctcatgtttctctttgtatcccgaccgccgggaactgccttacctgcagctacaaagtcctgcaagtgaggcttagacccagatcttgtgaactgttttcacatttccccatggatgcctagcaagggactgggactgcctgatccgctttggtcaagagcacgtgggtggcctgtgtgcaggcttatcatcaataattgcaggacttggtggagtatggttgaacaggtgctcagactgcatgcgtgtctagcgaggccatcctgaagctgcatgggagttgtaaaaaagttaccaacaagtttttagttatttgaataggtttttgaatagatttggaatgtgggaagcagttgcagaaataaacgtcttaatgact

SEQ ID NO: 8128 - protein, 50 aa, Homo sapiens
MPSKGLGLPDPLWSRARGWPVCRLIINNCRTWWSMVEQVLRLHACLARPS

SEQ ID NO: 8129 - DNA, 543 bp, Homo sapiens
gtggaattcatggtggattcttttgatggggattttcctgctttgaaaggaaataataggacgttttcaatgtggaacaaggctgaggttctgactgctggcctaaaagaaacagggtctttctctgtcccccaggctggagggcagtggtacaatcatagctcactaaagccttggatttctgggctcaagcagtcctctctcctcagcctcccaagtatctaggactacagccaggattcccccagttggactctcacatacctgtggacctcaagtgctccttcatatgtgttttcaatgaacttcatccaaaccacatcaaatggctgtgtataacactaaggaaatgtcatattgtctcctagtcctctaccatgtcttttacacacactgaagatcatgtgaagaaagagagaagatggtcatctatacaccaagttaaacgaccctcagaagaaaccaaccctatggacaacttgatcttgaacttctagctttcagacctgtgagaaaataaattgctgttgtttaaatttaaaa

SEQ ID NO: 8130 - protein, 71 aa, Homo sapiens
MVDSFDGDFPALKGNNRTFSMWNKAEVLTAGLKETGSFSVPQAGGQWYNHSSLKPWISGLKQSSLLSLPSI

SEQ ID NO: 8131 - DNA, 1687 bp, Homo sapiens
tgggtttgccgccagaacacaggtgtcatgaaaactacccccaaaagccaaaatgggaaaggaaaagactcataccaacattgtcgtcattggacacatagattcgggcaagtccaccactactggccatctgatctacaaaggcggtggcatcgacaaaagaaccattgaaaaatttgagaaggaggctgctgagatgggaaagggctccttcaagtatgcctgggtcttggataaactgaaagctgagtgtgaacatggtatcaccattgatacctccttgtggaaatttgagaccagcaagtactatgtgactatcgttgatgccccaggacacagagacttcatcaaaaacatgattacagagacatctcaggctgactgtgctgtcctgattgttgctgctggtgttggtgaatttgaagctggtatctccaagaatgggcaaacccaagagcatgcccttctggcttacacactgggtgtgaaacaactaattgttggtgttaacaaaatggattctactgagccaccctacagccagaagagatatgaggaaaattgttaaggaagtcagcacttacattaagaaaattggctacaaccctgacacagtagcatttgtgccaatttctggttggaatggtgacaacatgctggagccaagtgctaacatgccttggaaccatgctgcttgaggctctggactgcatcctaccaccaactcgtccaactgacaagcccttgcacctgcctctccaggatgtctacaaaattggtggtattggtagtgttcctgttggccgagtggagactggtgttctcaaacctggtatggtggtcacctttgctccagtcaacgttacaacagaagtaaaatctgtcgaaatgcaccatgaagctttgagtgaagctcttcctggggacaatgtgggcttcaatgtcaagaatgtgtctgtcaaggatgttcgtcatggcaacgttgctggtgacagcaaaaatgacccaccaatggaagcagctggtttcactgctcaggtgattatcctgaaccatccaggccaaataagcactggctatgcccctgtattggattgccacacggctcatattgcatgcaagtttgctgagctgaaggaaaagattgatcaccgttctggtaaaaagctggaagatggccctaaattcttgaagtctgttgatgctgccattgttgatatggttcctggcaagcccatgtgtgttgagagcttctcggactatccatctttgggttgctttgctgttcgtgatatgagacagatagttacagtgggtgtcatcaaagcagtggacaagaagactgctggagctggcaaggtcaccaagtctgcccagaaagctcagaaggctaaatgaatattatccctaatacctgccaccccactcttaatcagtgatggaagaacagtctcagaactctgtttcaattggccatttaagtttagtagtaaaagactggttaatgataacaatgcatcgtaaaaccttcagaaggaaaggagaatgttctgtggaccactttggttttcttttttgcgtgtggcagttttaagttactagcttttaaaatcagccctttttaatggaaacaacttgaccaaaaatttgtcacagaattttgagacccatttaaaaagtttaatga

SEQ ID NO: 8132 - protein, 251 aa, Homo sapiens
MVTTCWSQVLTCLGTMLLEALDCILPPTRPTDKPLHLPLQDVYKIGGIGSVPVGRVETGVLKPGMVVTFAPVNVTTEVKSVEMHHEALSEALPGDNVGFNVKNVSVKDVRHGNVAGDSKNDPPMEAAGFTAQVIILNHPGQISTGYAPVLDCHTAHIACKFAELKEKIDHRSGKKLEDGPKFLKSVDAAIVDMVPGKPMCVESFSDYPSLGCFAVRDMRQIVTVGVIKAVDKKTAGAGKVTKSAQKAQKAK

SEQ ID NO: 8133 - DNA, 1392 bp, Homo sapiens
cacaatgggtttgccgccagaacacaggtgtcatgaaaactacccccaaaagccaaaatgggaaaggaaaagactcataccaacattgtcgtcattggacacatagattcgggcaagtccaccactactggccatctgatctacaaaggcggtggcatcgacaaaagaaccattgaaaaatttgagaaggaggctgctgagatgggaaagggctccttcaagtatgcctgggtcttggataaactgaaagctgagtgtgaacatggtatcaccattgatacctccttgtggaaatttgagaccagcaagtactatgtgactatcgttgatgccccaggacacagagacttcatcaaaaacatgattacagagacatctcaggctgactgtgctgtcctgattgttgctgctggtgttggtgaatttgaagaactaattgttggtgttaacaaaatggattctactgagccaccctacagccagaagagatatgaggaaaattgttaaggaagtcagcacttacattaagaaaattggctacaaccctgacacagtagcatttgtgccaatttctggttggaatggtgacaacatgctggagccaagtgctaacatgccttggaaccatgctgcttgaggctctggactgcatcctaccaccaactcgtccaactgacaagcccttgcacctgcctctccaggatgtctacaaaattggtggtattggtagtgttcctgttggccgagtggagactggtgttctcaaacctggtatggtggtcacctttgctccagtcaacgttacaacagaagtaaaatctgtcgaaatgcaccatgaagctttgagtgaagctcttcctggggacaatgtgggcttcaatgtcaagaatgtgtctgtcaaggatgttcgtcatggcaacgttgctggtgacagcaaaaatgacccaccaatggaagcagctggtttcactgctcaggtgattatcctgaaccatccaggccaaataagcactggctatgcccctgtattggattgccacacggctcatattgcatgcaagtttgctgagctgaaggaaaagattgatcaccgttctggtaaaaagctggaagatggccctaaattcttgaagtctgttgatgctgccattgttgatatggttcctggcaagcccatgtgtgttgagagcttctcggactatccatctttgggttgctttgctgttcgtgatatgagacagatagttacagtgggtgtcatcaaagcagtggacaagaagactgctggagctggcaaggtcaccaagtctgcccagaaagctcagaaggctaaatgaatattatccctaatacctgccaccccactcttaatcagtgatggaagaacagtct

SEQ ID NO: 8134 - protein, 149 aa, Homo sapiens
MGKEKTHTNIVVIGHIDSGKSTTTGHLIYKGGGIDKRTIEKFEKEAAEMGKGSFKYAWVLDKLKAECEHGITIDTSLWKFETSKYYVTIVDAPGHRDFIKNMITETSQADCAVLIVAAGVGEFEELIVGVNKMDSTEPPYSQKRYEENC

SEQ ID NO: 8135 - DNA, 438 bp, Homo sapiens
aagcttaaacaggtgggggctggggggaaatggaaggttggctctaggaccagatgcatcaggcttcagtgttgtctgtcaacattatccgtcccttttgagggtagtgtcatctgataacatttttgagtcatgggaaatttccggaaacagaacagcacacagaaaggactgacctatttctcttagagtaacatcctcgtggctcatccactgattgaagaaatatttctgttgctaggagaaaggaccttgaaaccttgaagtattctgtggtatcctgtgtgtacacagttcttcttcaaagagaacttagagacatttacttgggtgacttgacattaaagggaagagattgcctagagcagggggcagcacactgtggactgagaaccaaatcaagccaggcatctgtttttgcaaataaagttttattag

SEQ ID NO: 8136 - protein, 57 aa, Homo sapiens [sequence omitted]

SEQ ID NO: 8137 - DNA, 984 bp, Homo sapiens
atggcgaagattgagaaaaacgctcccacgatggaaaaaaagccagaactgtttaacatcatggaagtagatggagtccctacgttgatattatcaaaagaatggtgggaaaaagtatgtaatttccaagccaagcctgatgatcttattctggcaacttacccaaagtcaggtacaacatggatgcatgaaattttagacatgattctaaatgatggtgatgtggagaaatgcaaaagagcccagactctagatagacacgctttccttgaactgaaatttccccataaagaaaaaccagtactagaagatattctcctggcctcagaagcagagattgtctatgtggccagaaatcccaaggattgcctggtgtcctactaccactttcacaggatggcttcctttatgcctgatcctcagaacttagaggaattttatgagaaattcatgtccggaaaagttgttggcgggtcctggtttgaccatgtgaaaggatggtgggctgcaaaagacatgcaccggatcctctacctcttctacgaggatattaaaaaaaatccaaaacatgagatccacaaggtgttggaattcttggagaaaacttggtcaggtgatgttataaacaagattgtccaccatacctcatttgatgtaatgaaggataatcccatggccaaccatactgcggacccaaagcgggaaattgagaagatactgaagttcctggaaaaagacatatcagaggaaattctgaataaaatcatctatcacacctcctttgatgtaatgaagcaaaacccaatgaccaactataccactttgcccaccagcattatggaccactccatctccccttttatgaggaaagggatgcctggagactggaagaactattttactgtggcccaaaatgaagaatttgacaaggactaccagaagaagatggcaggaagcaccctaaccttccgcacagagatctga

SEQ ID NO: 8138 - protein, 327 aa, Homo sapiens
MAKIEKNAPTMEKKPELFNIMEVDGVPTLILSKEWWEKVCNFQAKPDDLILATYPKSGTTWMHEILDMILNDGDVEKCKRAQTLDRHAFLELKFPHKEKPVLEDILLASEAEIVYVARNPKDCLVSYYHFHRMASFMPDPQNLEEFYEKFMSGKVVGGSWFDHVKGWWAAKDMHRILYLFYEDIKKNPKHEIHKVLEFLEKTWSGDVINKIVHHTSFDVMKDNPMANHTADPKREIEKILKFLEKDISEEILNKIIYHTSFDVMKQNPMTNYTTLPTSIMDHSISPFMRKGMPGDWKNYFTVAQNEEFDKDYQKKMAGSTLTFRTEI

SEQ ID NO: 8139 - DNA, 1638 bp, Homo sapiens
agcttcgaggccagtgggaggagggaggggccaggcagctgagggccaggaaagatgtgaaaaactctagctggtgaccgagaggaggagtagagtgtgcccttagttcatatgaactagagggagttggtatttgcacagcagtcagggtcacatgagtgatcatggtacagtgagaagttctccctcccagggccaggtcacagggtttgtttctgttcaatccggattcttccagtaaaagcttcaacttcccacactgaagctgagagcctcccaaagtgctggctacctgctgagcgcccccgtaactctgacacagtagtaatttgagcctctgcaattgccgtctgcttcctgtgaaagtcctttccgtgcccactgacccttgagtgggcctttgagctgctgactttcagctggaacttgaagggaccccaaccctgagacactatggccctgacctcagacctggggaaacagataaaactgaaagaggtggaggggaccctcctgcagcctgcaactgtggacaactggagccagatccagagcttcgaggccaaaccagatgatctcctcatctgcacctaccctaaagcagggacaacgtggattcaggaaattgtggatatgattgaacagaatggggacgtggagaagtgccagcgagccatcatccaacaccgccatcctttcattgagtgggctcggccaccccaaccttctgagacaggatttcaccatgttgcccaggctggtctcaaactcctgagctcaagcaatccacctgcctcaacctcccaaagtgccaagattacagacctgctgccaccgtctttctgggaaaacaactgcaagttcctttatgtagctcgaaatgccaaagactgtatggtttcctactaccatttccaaaggatgaaccacatgcttcctgaccctggtacctgggaagagtattttgaaaccttcatcaatggaaaagtggtttggggttcctggtttgaccacgtgaaaggatggtgggagatgaaagacagacaccagattctcttcctcttctatgaggacataaagagggacccaaagcatgaaattcggaaggtgatgcagttcatgggaaagaaggtggatgaaacagtgctagataaaattgtccaggagacgtcatttgagaaaatgaaagaaaatcccatgacaaatcgttctacagtttccaaatctatcttggaccagtcaatttcctccttcatgagaaaaggaactgtgggggattggaaaaaccacttcactgttgcccagaatgagaggtttgatgaaatctatagaagaaagatggaaggaacctccataaacttctgcatggaactctgagcaagatgtaaataaaattaaaaggtggatggcaagagtgcaaatactatcttcaatccttcagtcccagccagaagaatctctgaaagcatattgtgaatgtatacaatgtagtacaaacaatctctgtgatgattaacagtatgtcaccacttcattttttaaaaaggatcacgtctaatgcccattttcccaactattctttccaaagtaagatataaggtagcttaataaactaagtaaaacgtatgacttgagtac

SEQ ID NO: 8140 - protein, 307 aa, Homo sapiens; identical to SEQ ID NO: 586

SEQ ID NO: 8141 - DNA, 1605 bp, Homo sapiens
agcttcgaggccagtgggaggagggaggggccaggcagctgagggccaggaaagatgtgaaaaactctagctggtgaccgagaggaggagtagagtgtgcccttagttcatatgaactagagggagttggtatttgcacagcagtcagggtcacatgagtgatcatggtacagtgagaagttctccctcccagggccaggtcacagggtttgtttctgttcaatccggattcttccagtaaaagcttcaacttcccacactgaagctgagagcctcccaaagtgctggctacctgctgagcgcccccgtaactctgacacagtagtaatttgagcctctgcaattgccgtctgcttcctgtgaaagtcctttccgtgcccactgacccttgagtgggcctttgagctgctgactttcagctggaacttgaagggaccccaaccctgagacactatggccctgacctcagacctggggaaacagataaaactgaaagaggtggaggggaccctcctgcagcctgcaactgtggacaactggagccagatccagagcttcgaggccaaaccagatgatctcctcatctgcacctaccctaaagcagggacaacgtggattcaggaaattgtggatatgattgaacagaatggggacgtggagaagtgccagcgagccatcatccaacaccgccatcctttcattgagtgggctcggccaccccaaccttctggtgtggaaaaagccaaagcaatgccctctccacggatactaaagactcacctttccactcagctgctgccaccgtctttctgggaaaacaactgcaagttcctttatgtagctcgaaatgccaaagactgtatggtttcctactaccatttccaaaggatgaaccacatgcttcctgaccctggtacctgggaagagtattttgaaaccttcatcaatggaaaagtggtttggggttcctggtttgaccacgtgaaaggatggtgggagatgaaagacagacaccagattctcttcctcttctatgaggacataaagagggacccaaagcatgaaattcggaaggtgatgcagttcatgggaaagaaggtggatgaaacagtgctagataaaattgtccaggagacgtcatttgagaaaatgaaagaaaatcccatgacaaatcgttctacagtttccaaatctatcttggaccagtcaatttcctccttcatgagaaaaggaactgtgggggattggaaaaaccacttcactgttgcccagaatgagaggtttgatgaaatctatagaagaaagatggaaggaacctccataaacttctgcatggaactctgagcaagatgtaaataaaattaaaaggtggatggcaagagtgcaaatactatcttcaatccttcagtcccagccagaagaatctctgaaagcatattgtgaatgtatacaatgtagtacaaacaatctctgtgatgattaacagtatgtcaccacttcattttttaaaaaggatcacgtctaatgcccattttcccaactattctttccaaagtaagatataaggtagcttaataaactaagtaaaacgtatgacttgagtac

SEQ ID NO: 8142 - protein, 296 aa, Homo sapiens; identical to SEQ ID NO: 584

SEQ ID NO: 8143 - DNA, 2827 bp, Homo sapiens
agcttcgaggccagtgggaggagggaggggccaggcagctgagggccaggaaagatgtgaaaaactctagctggtgaccgagaggaggagtagagtgtgcccttagttcatatgaactagagggagttggtatttgcacagcagtcagggtcacatgagtgatcatggtacagtgagaagttctccctcccagggccaggtcacagggtttgtttctgttcaatccggattcttccagtaaaagcttcaacttcccacactgaagctgagagcctcccaaagtgctggctacctgctgagcgcccccgtaactctgacacagtagtaatttgagcctctgcaattgccgtctgcttcctgtgaaagtcctttccgtgcccactgacccttgagtgggcctttgagctgctgactttcagctggaacttgaagggaccccaaccctgagacactatggccctgacctcagacctggggaaacagataaaactgaaagaggtggaggggaccctcctgcagcctgcaactgtggacaactggagccagatccagagcttcgaggccaaaccagatgatctcctcatctgcacctaccctaaagcagggacaacgtggattcaggaaattgtggatatgattgaacagaatggggacgtggagaagtgccagcgagccatcatccaacaccgccatcctttcattgagtgggctcggccaccccaaccttctgagacaggatttcaccatgttgcccaggctggtctcaaactcctgagctcaagcaatccacctgcctcaacctcccaaagtgccaagattacagacctgctgccaccgtctttctgggaaaacaactgcaagttcctttatgtagctcgaaatgccaaagactgtatggtttcctactaccatttccaaaggatgaaccacatgcttcctgaccctggtacctgggaagagtattttgaaaccttcatcaatggaaaagtggtttggggttcctggtttgaccacgtgaaaggatggtgggagatgaaagacagacaccagattctcttcctcttctatgaggacataaagagggacccaaagcatgaaattcggaaggtgatgcagttcatgggaaagaaggtggatgaaacagtgctagataaaattgtccaggagacgtcatttgagaaaatgaaagaaaatcccatgacaaatcgttctacagtttccaaatctatcttggaccagtcaatttcctccttcatgagaaaaggaactgtgggggattggaaaaaccacttcactgttgcccagaatgagaggtttgatgaaatctatagaagaaagatggaaggaacctccataaacttctgcatggaactctgagcaagatgtaaataaaattaaaaggtggatggcaagagtgcaaatactatcttcaatccttcagtcccagccagaagaatctctgaaagcatattgtgaatgtatacaatgtagtacaaacaatctctgtgatgattaacagtatgtcaccacttcattttttaaaaaggatcacgtctaatgcccattttcccaactattctttccaaagtaagatataaggtagcttaataaactaagtaaaacgtatgacttgagtacaaaaggattgttttaatccccattattctggaaagtgcatcctagtctcccagtctataacatcataataccttgagtataagtccaaatattaggttatatctatattaaaaacaaaatttctgtcatctgtcctggccattcaggcaactccagcctgggctcaatcctggagttctgtctggtcactatcagaaggaacactttgagggaaaccctggtgcagccagccctgaggaaacatggcctgagtgccctcactggtgggtgggaataaaatggaagtgcacagaggagatgtcagaagaccaaaacttggtgaatagtcccagtgctaggtcatataggaaacagaaagcatgacagtggccttttgggaacccaagttacgtcctggtgaaagcagaaaggaggagacaggatggctgtcaacaacgtcagcatgggcatggctcccaggcatggaggtaattgggtcttggcttcaatgccacccttttgggaagccctaaaccaagtgaggtgttcttttcccttgcttcccatatttgtcccagttgcagccctgttgttatgtatttactcttcaatttcttatttatacctctcactcaattgttaattctttgggttcagtctcatgccatatttactcctagtacctaatgcagtgcctggcacacagcaagtgcccttgagaacttgtagagggagtaaaaaagtgcatggataaatgactgcagcaaatcacaaattttgaactttgacccttttcttttagtcccaaatagtggcattccatagctgagggtagtaggagcagttcaccctgggagcagacaataagaggaagaatgaagccaactaaaattctgaatgctttttgttggatttcgtagggtattttttttaaaatagggtcttgctatgttgcccaggctggtcttaactgactgctttttattattaccatgcactggcaattccaaacaatgtcagtgttaaaatgcttctccctgaaaaagagaaaaaaaaaaggaaaaaaagaaaagaaaagtgaaaagaaaaactcttattggcctaagttctaaataatagctaggttaccactgagttttaactatatgtatatgagcttcaaataagcacctttttattatgtaaataaataaaagttatctgtatcccc

SEQ ID NO: 8144 - protein, 307 aa, Homo sapiens; identical to SEQ ID NO: 586

SEQ ID NO: 8145 - DNA, 2794 bp, Homo sapiens
agcttcgaggccagtgggaggagggaggggccaggcagctgagggccaggaaagatgtgaaaaactctagctggtgaccgagaggaggagtagagtgtgcccttagttcatatgaactagagggagttggtatttgcacagcagtcagggtcacatgagtgatcatggtacagtgagaagttctccctcccagggccaggtcacagggtttgtttctgttcaatccggattcttccagtaaaagcttcaacttcccacactgaagctgagagcctcccaaagtgctggctacctgctgagcgcccccgtaactctgacacagtagtaatttgagcctctgcaattgccgtctgcttcctgtgaaagtcctttccgtgcccactgacccttgagtgggcctttgagctgctgactttcagctggaacttgaagggaccccaaccctgagacactatggccctgacctcagacctggggaaacagataaaactgaaagaggtggaggggaccctcctgcagcctgcaactgtggacaactggagccagatccagagcttcgaggccaaaccagatgatctcctcatctgcacctaccctaaagcagggacaacgtggattcaggaaattgtggatatgattgaacagaatggggacgtggagaagtgccagcgagccatcatccaacaccgccatcctttcattgagtgggctcggccaccccaaccttctggtgtggaaaaagccaaagcaatgccctctccacggatactaaagactcacctttccactcagctgctgccaccgtctttctgggaaaacaactgcaagttcctttatgtagctcgaaatgccaaagactgtatggtttcctactaccatttccaaaggatgaaccacatgcttcctgaccctggtacctgggaagagtattttgaaaccttcatcaatggaaaagtggtttggggttcctggtttgaccacgtgaaaggatggtgggagatgaaagacagacaccagattctcttcctcttctatgaggacataaagagggacccaaagcatgaaattcggaaggtgatgcagttcatgggaaagaaggtggatgaaacagtgctagataaaattgtccaggagacgtcatttgagaaaatgaaagaaaatcccatgacaaatcgttctacagtttccaaatctatcttggaccagtcaatttcctccttcatgagaaaaggaactgtgggggattggaaaaaccacttcactgttgcccagaatgagaggtttgatgaaatctatagaagaaagatggaaggaacctccataaacttctgcatggaactctgagcaagatgtaaataaaattaaaaggtggatggcaagagtgcaaatactatcttcaatccttcagtcccagccagaagaatctctgaaagcatattgtgaatgtatacaatgtagtacaaacaatctctgtgatgattaacagtatgtcaccacttcattttttaaaaaggatcacgtctaatgcccattttcccaactattctttccaaagtaagatataaggtagcttaataaactaagtaaaacgtatgacttgagtacaaaaggattgttttaatccccattattctggaaagtgcatcctagtctcccagtctataacatcataataccttgagtataagtccaaatattaggttatatctatattaaaaacaaaatttctgtcatctgtcctggccattcaggcaactccagcctgggctcaatcctggagttctgtctggtcactatcagaaggaacactttgagggaaaccctggtgcagccagccctgaggaaacatggcctgagtgccctcactggtgggtgggaataaaatggaagtgcacagaggagatgtcagaagaccaaaacttggtgaatagtcccagtgctaggtcatataggaaacagaaagcatgacagtggccttttgggaacccaagttacgtcctggtgaaagcagaaaggaggagacaggatggctgtcaacaacgtcagcatgggcatggctcccaggcatggaggtaattgggtcttggcttcaatgccacccttttgggaagccctaaaccaagtgaggtgttcttttcccttgcttcccatatttgtcccagttgcagccctgttgttatgtatttactcttcaatttcttatttatacctctcactcaattgttaattctttgggttcagtctcatgccatatttactcctagtacctaatgcagtgcctggcacacagcaagtgcccttgagaacttgtagagggagtaaaaaagtgcatggataaatgactgcagcaaatcacaaattttgaactttgacccttttcttttagtcccaaatagtggcattccatagctgagggtagtaggagcagttcaccctgggagcagacaataagaggaagaatgaagccaactaaaattctgaatgctttttgttggatttcgtagggtattttttttaaaatagggtcttgctatgttgcccaggctggtcttaactgactgctttttattattaccatgcactggcaattccaaacaatgtcagtgttaaaatgcttctccctgaaaaagagaaaaaaaaaaggaaaaaaagaaaagaaaagtgaaaagaaaaactcttattggcctaagttctaaataatagctaggttaccactgagttttaactatatgtatatgagcttcaaataagcacctttttattatgtaaataaataaaagttatctgtatcccc

SEQ ID NO: 8146 - protein, 296 aa, Homo sapiens; identical to SEQ ID NO: 584

SEQ ID NO: 8147 - DNA, 1449 bp, Homo sapiens
ccaggaaagatgtgaaaaactctagctggtgaccgagaggaggagtagagtgtgcccttagttcatatgaactagagggagttggtatttgcacagcagtcagggtcacatgagtgatcatggtacagtgagaagttctccctcccagggccaggtcacagggtttgtttctgttcaatccggattcttccagtaaaagcttcaacttcccacactgaagctgagagcctcccaaagtgctggctacctgctgagcgcccccgtaactctgacacagtagtaatttgagcctctgcaattgccgtctgcttcctgtgaaagtcctttccgtgcccactgacccttgagtgggcctttgagctgctgactttcagctggaacttgaagggaccccaaccctgagacactatggccctgacctcagacctggggaaacagataaaactgaaagaggtggaggggaccctcctgcagcctgcaactgtggacaactggagccagatccagagcttcgaggccaaaccagatgatctcctcatctgcacctaccctaaagcagggacaacgtggattcaggaaattgtggatatgattgaacagaatggggacgtggagaagtgccagcgagccatcatccaacaccgccatcctttcattgagtgggctcggccaccccaaccttctgctcgaaatgccaaagactgtatggtttcctactaccatttccaaaggatgaaccacatgcttcctgaccctggtacctgggaagagtattttgaaaccttcatcaatggaaaagtggtttggggttcctggtttgaccacgtgaaaggatggtgggagatgaaagacagacaccagattctcttcctcttctatgaggacataaagagggacccaaagcatgaaattcggaaggtgatgcagttcatgggaaagaaggtggatgaaacagtgctagataaaattgtccaggagacgtcatttgagaaaatgaaagaaaatcccatgacaaatcgttctacagtttccaaatctatcttggaccagtcaatttcctccttcatgagaaaaggaactgtgggggattggaaaaaccacttcactgttgcccagaatgagaggtttgatgaaatctatagaagaaagatggaaggaacctccataaacttctgcatggaactctgagcaagatgtaaataaaattaaaaggtggatggcaagagtgcaaatactatcttcaatccttcagtcccagccagaagaatctctgaaagcatattgtgaatgtatacaatgtagtacaaacaatctctgtgatgattaacagtatgtcaccacttcattttttaaaaaggatcacgtctaatgcccattttcccaactattctttccaaagtaagatataaggtagcttaataaactaagtaaaacgtatgacttgagtac

SEQ ID NO: 8148 - protein, 259 aa, Homo sapiens
MALTSDLGKQIKLKEVEGTLLQPATVDNWSQIQSFEAKPDDLLICTYPKAGTTWIQEIVDMIEQNGDVEKCQRAIIQHRHPFIEWARPPQPSARNAKDCMVSYYHFQRMNHMLPDPGTWEEYFETFINGKVVWGSWFDHVKGWWEMKDRHQILFLFYEDIKRDPKHEIRKVMQFMGKKVDETVLDKIVQETSFEKMKENPMTNRSTVSKSILDQSISSFMRKGTVGDWKNHFTVAQNERFDEIYRRKMEGTSINFCMEL

SEQ ID NO: 8149 - DNA, 1602 bp, Homo sapiens
ccaggaaagatgtgaaaaactctagctggtgaccgagaggaggagtagagtgtgcccttagttcatatgaactagagggagttggtatttgcacagcagtcagggtcacatgagtgatcatggtacagtgagaagttctccctcccagggccaggtcacagggtttgtttctgttcaatccggattcttccagtaaaagcttcaacttcccacactgaagctgagagcctcccaaagtgctggctacctgctgagcgcccccgtaactctgacacagtagtaatttgagcctctgcaattgccgtctgcttcctgtgaaagtcctttccgtgcccactgacccttgagtgggcctttgagctgctgactttcagctggaacttgaagggaccccaaccctgagacactatggccctgacctcagacctggggaaacagataaaactgaaagaggtggaggggaccctcctgcagcctgcaactgtggacaactggagccagatccagagcttcgaggccaaaccagatgatctcctcatctgcacctaccctaaagcagggacaacgtggattcaggaaattgtggatatgattgaacagaatggggacgtggagaagtgccagcgagccatcatccaacaccgccatcctttcattgagtgggctcggccaccccaaccttctgtgcttgtactacgcagatgtttcctcttgagctattttaaaggtgtggaaaaagccaaagcaatgccctctccacggatactaaagactcacctttccactcagctgctgccaccgtctttctgggaaaacaactgcaagttcctttatgtagctcgaaatgccaaagactgtatggtttcctactaccatttccaaaggatgaaccacatgcttcctgaccctggtacctgggaagagtattttgaaaccttcatcaatggaaaagtggtttggggttcctggtttgaccacgtgaaaggatggtgggagatgaaagacagacaccagattctcttcctcttctatgaggacataaagagggacccaaagcatgaaattcggaaggtgatgcagttcatgggaaagaaggtggatgaaacagtgctagataaaattgtccaggagacgtcatttgagaaaatgaaagaaaatcccatgacaaatcgttctacagtttccaaatctatcttggaccagtcaatttcctccttcatgagaaaaggaactgtgggggattggaaaaaccacttcactgttgcccagaatgagaggtttgatgaaatctatagaagaaagatggaaggaacctccataaacttctgcatggaactctgagcaagatgtaaataaaattaaaaggtggatggcaagagtgcaaatactatcttcaatccttcagtcccagccagaagaatctctgaaagcatattgtgaatgtatacaatgtagtacaaacaatctctgtgatgattaacagtatgtcaccacttcattttttaaaaaggatcacgtctaatgcccattttcccaactattctttccaaagtaagatataaggtagcttaataaactaagtaaaacgtatgacttgagtac

SEQ ID NO: 8150 - protein, 310 aa, Homo sapiens
MALTSDLGKQIKLKEVEGTLLQPATVDNWSQIQSFEAKPDDLLICTYPKAGTTWIQEIVDMIEQNGDVEKCQRAIIQHRHPFIEWARPPQPSVLVLRRCFLLSYFKGVEKAKAMPSPRILKTHLSTQLLPPSFWENNCKFLYVARNAKDCMVSYYHFQRMNHMLPDPGTWEEYFETFINGKVVWGSWFDHVKGWWEMKDRHQILFLFYEDIKRDPKHEIRKVMQFMGKKVDETVLDKIVQETSFEKMKENPMTNRSTVSKSILDQSISSFMRKGTVGDWKNHFTVAQNERFDEIYRRKMEGTSINFCMEL

SEQ ID NO: 8151 - DNA, 6378 bp, Homo sapiens
tctcaagaaagcctctttttctgcacccagaggcgaggcaaggaaattaccttacctctctttggcagtaggtgatctttttctctctcacctttcactgaggtagcagacatttgagtttctccggctaatgcatgggtctctgttcctaatctgtgcctcactaaagtccagggctaccagcctcttccctgagcagaggtcactgaactgagcactgggtgtccagagggtgaacccactcagggcagctgtcatcaaagcctttgcccacttctccatcttgcagctccctccctcttcactttcgtccctggagggtccccttattttcttatgagcctgattatgcacttaaatgatacgtttggtgttttaatcagaatctgcaggtgtgtgattaacaggaaagatcttcataatgttcaggccaccatgtctccagcagtgaaagtacttggagagacccttgaagagtgagtgggactgtccagatgtgtagaaatgagagccggagggagccacaggggcgtggggcagcaggaccagggcatgtggaaggtcagagtgtgagctggcgtagaggtggagctgagaaaagagactagaggcaggagagctttgcagttcttctaaggaatatggacttcaaaaatggttaaaggtggttttccaacttttctttttagtaccaaaacacttttttatttaacaaaaattaccatgactacatgatccagcaattccacttctgggtatatatcccaaagaaataaaaacagggtctgaaacagatacctgtacatctacattcaaaataacattattcacaatagccaaaaggtggcaacaacccaagtgtccaccaatggctgaattgataaacaagatgtggatatacaatggaacattactcagtcttaaagaggaaggagattttctgcactaacttgacccagctcctctgacatgattcgcatgagcctctgattcccacactagagtggaagctccttagggagaaggcctgtgtttttcttgtctttgttgccttttcccctaacctcagcttaacacgatgattgcacaaagtgctcgttaaggcttttaaatgagagagtagaggccgggcaccgtggctcatgtctgtaatcccagcactttgggaggccaaggcaggtggatcacgaggtcaccagatcgagaccagcctgaccaacatggtgaaaccccgtctctactaaaaatagaaaaattagatgggcgtggtggccaagcgcctgtaatcccagctactcgggaggctgaggcaggagaactgcttgaacctgggaagcggaggttgcagtgagccgagatcgcaccactgcactccagcctggtgatggaccaagactccgtctcaaaaaaaaaatgagacagtagaaatcatgactcacaggccagcaagtatacatgtttttagagatgaaacaagtgattgcaaacaggccgggtacatgagacagcctgctgcaggcacatgggggtcatctctggctggcaggaaggtgagggagtcctctcttctctggtcctggctgactctgcctcagcaggacttcacttgaccattctcaccttctgtcacctcatccttaaagtgacagagtaaattaactctaaggccccatccaggactcaagctgtgtgattttacaaaaatgaaaattatattaataatcccattgtaaaatcccaaaagaaagtcaagagactagcagaaagacaggtgggtgatgggatgtcctggacagagcctggatcatgaggtccccatgtagtgcttgtactacgcagatgtttcctcttgagctattttaaaggtgtggaaaaagccaaagcaatgccctctccacggatactaaagactcacctttccactcagctgctgccaccgtctttctgggaaaacaactgcaaggtaagataccaacagctccctgtgacagaagggaaagtaagccaaccaaagcgagtcctgcagaccccaacgcagagcattcgtgatcacctttgcctctccactgtctctgatgcttaccagcaaagagaaaacataaagttctacattcagcaggacattcacctgaacagtttcaaataggacatgaaggcaggatccagattgaatgtttggagggaactagagacatggggaggcagtgagtgcagtaagcgtagctgtgaaatgaaggggagaagatggtggtcccaggctgcaggccatggggaggttttctaacagaccagggagggaagaatgagaggaaaaaagctaaagctctccccaaaggaggccaggcgcggtggctcacgcctgtaatcccagcactttgggaggccgaggcgggtggatcacaaagtcaggagatcgagagcacggtgaaaccccgtctctactaaaaataaaaaaaaacttagccgggcgcggtggcgggcgcctgtagtcccagctactcgggagggtgaggcaggagaatggcgtgaacccgggaggcggagcttgcagtgagccgagatcacgccactgcactccagcctgggccacagagcgagactccatctcaaaaaaaaagttctccccaaagggtaaacagatgaatcaggcagagcaacgctcttgaggacaccccacctctgcctctggtagactctgagttcttcgttttatttattctgtgactttattcgtatgcaccccagtgcctaataagttcctggcacatagagggcattagacacgtccttgctgagtaaatacggaagtggctgtagagcaggtggagtcaagggtacaaactgagccgccagccttggtgagaaagtggggcactgcttccttaaaggcaggaatgaaggggaaagaagggctaagaaagatatgttgctaggggactggagtgaagttggaggactcaaatgacttcactccttttagtaataatgttggataaggggacaaaaacttccatttccagaattatggcaaactaggtgttctgaacccctgaagcccttatatgtagaacatccaggattactgcataaaaaaatcacaagtttccttttaatgcataactgagatcaaaataaagtccctaagtttagaaactgcagaggaaactgaaactcagagaggcaaattgagactgggactctccaggggaaatctgatgacctggataatccagcaatttaagttttaatggctgcacagggacagggtcaaagcccatggcacaaggaaccagaagaatgaggagccaaagctgggaccactgaagggctacatcctcaatggatgggtggaggaggcagagaaagaccttagggaaccactctgccttgacctaggcgctcagctcccttgagaatgtatagccacaggtttactccctcggggtttgagattgaaaattgcactccttgcattgtccaagaaactacaagcagagacattccacaaggtggtccccacagccagtgttcccaggtccgctctggagggacacagctgcaactcagacccccataggatccccacttgagctcaccatcccacattacaaaatacacaaaagaacaagccaccatgagatgcagtcttcagaaagaacccatggaagagtcagacctcaagaacttcagacaatgtaattatcaactctagaaataagagaaggttcaagttgtgtgaataaatgaaaaagtgtatcaaaaataaaataaagaaataagatgctacttttagacacagaaatattaagtaaataaatggaatttctataacaaaaaaatataaaatcatggaaattaaaaactcaagcataggataaagtgcagaacagctgcatagagaattagtgaactcagacaggaaggtttgagggtaaaggtttgaggagagaggagagacctgtgtctggagctaagagccaagagatggagcacgggagggattaataaaaggattatcaagcagcaatgaagaggaagaaaactgagcataaaaaatttagaaactaggggaattttttaaatcagcatttcttaaaaccttctttactggtgcttggcagcttggtaagttggagaagagaagatggggagtaggacttagtagacagtaacagagtcaacgctttcaggagcagggtttctcaaccttagcacttgctctaaagggcctgggacttgatataatcaggcatggcaagacatgcaggtacagtggtgactgtcataaggaagaagtgtgtcctcgcagatacctagaacaggaggcatggcatgtcacacagagcctcacagggaagcaatgggataggtcaggaggaagagacagtgagtagaagacatgggcaagagccttgatgtggtttctttgggaaggaatagttgaggcaaggtaggcaggcttgggattggccagtttgaaccactggagcaggctttcagccacaggggcttggcctagtggtctggtatctgaccctggggtgtcagggcaggtgaataatggcccagtgtgtaaaagcccaacagtggaagtgttgggggtataggctctggggtgttgtaggcagttcctccagagtcagcaaagccccaggatgtcaaagcatcagatacagaatataaaagacataattaatacagcactcctgacatttggggcagatttttctttcttgtgggtgggagcaaggggactcttctatgtattgtagaatgttgaacagcatacttggcccctgcatggatgccagtagcaccactactccaagctgtgcaaccaaaaatgtctccagacattgccaaatgtcccctagtggatacaatcatcccatcatccccaattgagaaccacttaaaagtgaaagaataaaaaagcacagcattgaaatagctggtcatagatctgagatgcatagtcaagaggcccatttggcattgatgccattaaaatgtgaactgagtactggataaaaggtcagatttggtaaaatgaaaggttgggagagtgcagggatgtgaaattgtgggcaaagtggaacttgaaggaatgtttgtaggggcagagctgaaatgattagagatggaaatcattcaagccgaggaggccaggagaaaaataggagctattttcttgctgtgtggctcaaactcttaaacatgaagcttctgtgcatctttgggagggtgcgcgaggggtcatcagtttacgttgatactgtggaagtctcctattcaagtggcaggtcatagtttacagaaaaagattttgctcctgataccaaaggggcaatcaggcaatctaatcctcaccaatccctaattgattagctaattaaaaggactgagtttgaagtagagagcagacttggtgacaaagcagagacagaaagaagagggaggtcacaaggccaagtcgcagggccagcactgcagaactgagccagagtgcacagcaaccctcaggatggctctgcctaagggaactctgtgaaagtccactttttataccatcttttacccacctcttttcttaccccaaagttcctttatgtagctcgaaatgccaaagactgtatggtttcctactaccatttccaaaggatgaaccacatgcttcctgaccctggtacctgggaagagtattttgaaaccttcatcaatggaaaagtggtttggggttcctggtttgaccacgtgaaaggatggtgggagatgaaagacagacaccagattctcttcctcttctatgaggacataaagagggacccaaagcatgaaattcggaaggtgatgcagttcatgggaaagaaggtggatgaaacagtgctagataaaattgtccaggagacgtcatttgagaaaatgaaagaaaatcccatgacaaatcgttctacagtttccaaatctatcttggaccagtcaatttcctccttcatgagaaaaggaactgtgggggattggaaaaaccacttcactgttgcccagaatgagaggtttgatgaaatctatagaagaaagatggaaggaacctccataaacttctgcatggaactctgagcaagatgtaaataaaattaaaaggtggatggcaagagtgcaaatactatcttcaatccttcagtcccagccagaagaatctctgaaagcatattgtgaatgtatacaatgtagtacaaacaatctctgtgatgattaacagtatgtcaccacttcattttttaaaaaggatcacgtctaatgcccattttcccaactattctttccaaagtaagatataaggtagcttaataaactaagtaaaacgtatgacttgagtac

SEQ ID NO: 8152 - protein, 160 aa, Homo sapiens [sequence omitted]

SEQ ID NO: 8153 - DNA, 918 bp, Homo sapiens
atgatggtaaagcacagtgttttgcaactcgaccagttgtccacaactcaagcaaggagggaccaatctaacaagaacagagatgcaagaaatagaactagccccaggaaattcagtattcaagctaagatgcaaagagccctagcacaccctctccccacatatacctgcaccataaaagaattttcccaagtgaatggaatcattcttcaaaagaaaatgtgcgatttctgggataagatctggaacttccaagccaagcctgatgacctgctcattgcttcttaccccaaagcagaaaaacaggaccaggtcagccaagcgtcccagaagccaaacaaggatgcactttctgaggacagacactgcagaagccagagcccagtccaaggaagccccagaatcaggaaggagatcgcagacaagaccatgaagagaaacaaattttaccctcaaatgcagcaaaggaccctgaaaactcatcttcctgtacaactactgcctccatccttctgggaggaaaactgtaagataatctatgtggcaagaaatgccaaggataacctggtgtcctactaccattttcaaaggatgagcaaagcactccctgacctttgggaagctgggataagtactttgaaacattcctggcaggcaatggtacacaataaaccccatgcagagaaatggaaacagactctgaatgagccatgtgtgaaagtgtataagcttgatggctcaactgctgccagccctagaattcaaagagaacggaagggctggaacgggacccagccagcagggtttgtgaccgcctctgctgtgacgtcacagcctggtgaggagggggctgcagttcctcaggaaactgccagtggacaaattcataaacaagagctccagttccctggaacctga

SEQ ID NO: 8154 - protein, 305 aa, Homo sapiens [sequence omitted]

SEQ ID NO: 8155 - DNA, 1872 bp, Homo sapiens
actttttactttcccctgctggtgcccaagaccaccgtggaaggaatggctaaaggataaggtggaggagacaagtgagttagaatggggcttgttacccccagaagaattttcccaagtgaatggaatcattcttcaaaagaaaatgtgcgatttctgggataagatctggaacttccaagccaagcctgatgacctgctcattgcttcttaccccaaagcaggaaccacttggacacaggaaattgtagatctgatacaaaatgatggcgatattgagaaaagcaggcgcgcttccattcaacttcaacaccctttcctggagtggataagaatgacacactgtgggattgaccaggctaacacaatgccttccccaaggaccctgaaaactcatcttcctgtacaactactgcctccatccttctgggaggaaaactgtaagtgtccaagagggagaatctgagacccactttcctgaggtcatccaatcccctcccatcttatcaggggtatggtatggcagctgtggcagagggatggaggagaggagacaccagagggaaaaaaaaaacgcaaatcctgttcacccaggaggtcaacaatggaaggaatacagaggagaaagcaccaggagggtgtagcaggcataccccgagatgaagaggggtttgggcgaagttggatgtgcaaacaactcaaccccaccatgacatgaaggaggccaccgtgtgagcacagggcctggaacaatgggtgtaatgagttactgccacgtcagagaaattggttgctcctgttgatatggtttgactgtgtccccacccaaatctcatcttgaattgtacttcccataatccccacatgttgtgggacgcacccggtggcaggtaatggaatcatgggtggttgcctccatgctgttctcatcatagtgagttctcatgggatctgatggttttctaaggggcttttcccctttttctcagcacttccttttgctgccatcatgtgaagaaggatatgtttgcttccctttccaccatgattgtaaatttgctgaggcctccccagccatgcggaactgtgagtcagttaaacctcttttctttataaatcacccagtctcaggtatgtccttataggagcctgagaacagactaatacacctgtcaatgccaaaatgatatattttggtggatttaaaattagcaaagccagcctgcccaaccacaaacacctccatctcaggcacatggtactgctttaaataaatatcagtaggacatgaaaggttgggtctgaaaagtcatcacctacctaacttcctcagattcctacctttttttatattaatcttgaagcttgctctccctatctaattttgtatagatttaggaatgttaaagtgtgtggataggctgatgctataggttgcttctaggggaggaatctgccaagagatactgacccctgaccctagtcatagactgttctcacttcacggtaagtcaataaaatgatagctttcctgtttgagggatgcccaaattctttgcaaaatctaattacaagtctgaataggcagtaaaatttgttcttgctatttatataattgtaaactttaactcagaaatggacattataagctgttctcagagtatccaaagatcaggttggcaccaacaggtcccgagtaagtcaggttttcttcacccctccctgtgtccctctggggaccgagcacgtccagggagcaaggagcagaccagtcagcaaaatgtaaaacctgtcttaacctggaaggtggggctgtcttatccacatttggctccacctctgagctaacttctgattaaagctgatctaagg

SEQ ID NO: 8156 - protein, 106 aa, Homo sapiens; identical to SEQ ID NO: 4428

SEQ ID NO: 8157 - DNA, 1737 bp, Homo sapiens
gtcacagcctggtgaggagggggctgcagttcctcaggaaactgccagtggacaaattcataaacaagagctccagttccctggaacctgagtcgggagacctgcagctcactttctccctgtttgctggccagcagggtttgtggccgcctctgctgtgacgccacagcctggtgaggagggggctgcagttcctcaggaaactgccagtggacaaagtcataaacaagagttccagttccctggaacctgagtcgggaggcctgcaactcactttctccctgtttgctggcccagacaggcctgtgctagagggctggatagtgtggtagtgtggtggatagagtgctgcctctatccacaacgcagccatatgctgactgaagataactttgtgtctggaagagccctctgatttcttacactaatggccttacacgacatggaggattttacatttgatggaacaaagcgcttaagtgtcaactacgtgaagggaattcttcaaccgacagacacctgtgacatctgggataagatctggaacttccaagccaagcctgatgacctgcttatttctacctatcctaaagcaggaacaacatggactcaggagatagtggaattaatacaaaatgaaggtgatgtggagaaaagtaaacgggcaccgactcatcaacgatttcctttcctcgaaatgaaaatcccatccttaggatctggtgagtataaatagccacacttcactacagtcctaaaatgcacttaggatttttactgtctttgcacctttcgaaattataggctttcaaacaattattggtaagtttcatggttttgtctttttttaactgtgtctggccattgttatactccagacattttctaatggaattactgtttgtacaaaagtgagttaaattttgtttctctagttagaaattaattttacttcaaaagaataagctcaagtaagataatcctggtgaaagggtttgaattttttaggttcttatttatttggatgactgttatggttaggaattgttctagtcaaaacatctattcataggctagacgtattctctcacaccagatctacagttacaatgttcttatagatgctttgaattgtagtagtaataatggaagcagcaagacttggaagcaaatagataaaaaaaaaatcgtagaaattgatcgaaaaccagttttgcaggtttggaacaagctcatgcaatgccctcaccacggatcctgaaaacacatcttccctttcacttgctgccaccatccttgctagagaaaaactgtaaggtaaaaaagcaaaaggaattcagagttgtactccttaaaacaaccttagtcttccatttcctcttaaaacacttcacttgttaaatatatatatatatacctcttcacaataatcaatatgcaaattaatatgaatcctagccaggcacgttggctcatgcctgtaatcacagcattttgggagactgagatgggtggatcagttgaggtcaggggttcaagaccagcctgaccaacacggcgaaaccccatctctaccaaaaacacaaaattcacaggacgtggtgacacatgcctgtaatccaagctactcaggaggctgaggcaggagactcgcttgaacacaggaggcagaggttgcagtgagccaagatagtgccattgcactccagcctgggtgacagagcaagactccatctc

SEQ ID NO: 8158 - protein, 102 aa, Homo sapiens
MALHDMEDFTFDGTKRLSVNYVKGILQPTDTCDIWDKIWNFQAKPDDLLISTYPKAGTTWTQEIVELIQNEGDVEKSKRAPTHQRFPFLEMKIPSLGSGEYK

SEQ ID NO: 8159 - DNA, 1664 bp, Homo sapiens; identical to SEQ ID NO: 587

SEQ ID NO: 8160 - protein, 302 aa, Homo sapiens; identical to SEQ ID NO: 588

SEQ ID NO: 8161 - DNA, 804 bp, Homo sapiens
gcaccgactcatcaacgatttcctttcctcgaaatgaaaatcccatccttaggatctgtgtgctggggctcctggcatgaacatgtgaaaggatggtgggaagccaaagacaaacaccgtattctctatctcttctatgaggacatgaagaagaacccaaagcatgaaattcagaagctggcagaatttattgggaagaaattagatgacaaagttctagataaaattgtccattacacttcgtttgatgtcatgaaacagaatccaatggcaaactattcatcgattcctgctgaaatcatggaccactccatttctccattcatgagaaaaggggcagtgggagactggaagaaacacttcaccgtggctcagaatgagagatttgatgaagattacaagaagaaaatgactgataccagactaactttccacttccagttctagtaaggaagaaaaactgaaaatgttttagtttattacccagtatatttgggtaataatgaaagtttaattctcataacaaatgatatcagattccagttatcagaatagtttactgtgtttgctcttattcactctactaaaaaattattttaaaaggctggaggcaaggtggtgacaggcagcagggtggcgacatggagagagggaagctcaataaatcactaggtacaatcctggtatcattgccaattatcatcatatttacattttctacaatcatgtgcttattaacatattggaaatgcttcagtcctcacatgataatacactaacattttcagattaagttttggttca

SEQ ID NO: 8162 - protein, 137 aa, Homo sapiens
MKIPSLGSVCWGSWHEHVKGWWEAKDKHRILYLFYEDMKKNPKHEIQKLAEFIGKKLDDKVLDKIVHYTSFDVMKQNPMANYSSIPAEIMDHSISPFMRKGAVGDWKKHFTVAQNERFDEDYKKKMTDTRLTFHFQF

SEQ ID NO: 8163 - DNA, 7539 bp, Homo sapiens
ccttcgggaaagggtggcctcgggccccctactctacagagtctcctcccacggctgcccagttccctggccgactatcttgcctccaccacatcaccatcagtaccgggcggctgcagggcagagctgtccagggacctcctcacagcctccagagtcaagaaatgcctcctcagggaagccctctaccgcatccctgacctgtgagtcacggagctcccgggcaccatgctggccacaaatgcctaaggagccccccggaaccagctgtgggtcccgcaggcactcgcaggctagcggacacctttggaggactgagagacctgtcctgcaatccaatgttcctcactctcacaagattttacagacgtggaaaccgaggcccgaggccccaaggggtaatcggcccgccttcccatgccaataaccggcagtggcgggacccacacctactccgtgacctgcaggcccaggggtcgagccccaggtagaacgtctagacggactccgcccttagcgccgtacggggaaccttctcccggacgcagacacggaagcggaagtgctgccgagctgtagctatggagacgtggggggcgggccgcccggagagcgcgacctttgacctgcagtagagcctacgtcagaggctggcgcaaacagaagtgcagcggtggcggcggctggttgcgggccggcggcgggctggcggagatggaggatcttgttcaagatggggtggcttcaccagctacccctgggaccgggaaatctaagctggaaacattgcccaaagaagacctcatcaagtttgccaagaaacagatgatgctaatacagaaagctaaatcaaggtgtacagaattggagaaagaaattgaagaactcagatcaaaacctgttactgaaggaactggtgatattattaaggcattaactgaacgtctggatgctcttcttctggaaaaagcagagactgagcaacagtgtctttctctgaaaaaggaaaatataaaaatgaagcaagaggttgaggattctgtaacaaagatgggagatgcacataaggagttggaacaatcacatataaactatgtgaaagaaattgaaaatttgaaaaatgagttgatggcagtacgttccaaatacagtgaagacaaagctaacttacaaaagcagctggaagaagcaatgaatacgcaattagaactttcagaacaacttaaatttcagaacaactctgaagataatgttaaaaaactacaagaagagattgagaaaattaggccaggctttgaggagcaaattttatatctgcaaaagcaattagacgctaccactgatgaaaagaaggaaacagttactcaactccaaaatatcattgaggctaattctcagcattaccaaaaaaatattaatagtttgcaggaagagcttttacagttgaaagctatacaccaagaagaggtgaaagagttgatgtgccagattgaagcatcagctaaggaacatgaagcagagataaataagttgaacgagctaaaagagaacttagtaaaacaatgtgaggcaagtgaaaagaacatccagaagaaatatgaatgtgagttagaaaatttaaggaaagccacctcaaatgcaaaccaagacaatcagatatgttctattctcttgcaagaaaatacatttgtagaacaagtagtaaatgaaaaagtcaaacacttagaagataccttaaaagaacttgaatctcaacacagtatcttaaaagatgaggtaacttatatgaataatcttaagttaaaacttgaaatggatgctcaacatataaaggatgagttttttcatgaacgggaagacttagagtttaaaattaatgaattattactagctaaagaagaacagggctgtgtaattgaaaaattaaaatctgagctagcaggtttaaataaacagttttgctatactgtagaacagcataacagagaagtacagagtcttaaggaacaacatcaaaaagaaatatcagaactaaatgagacatttttgtcagattcagaaaaagaaaaattaacattaatgtttgaaatacagggtcttaaggaacagtgtgaaaacctacagcaagaaaagcaagaagcaattttaaattatgagagtttacgagagattatggaaattttacaaacagaactgggggaatctgctggaaaaataagtcaagagttcgaatcaatgaagcaacagcaagcatctgatgttcatgaactgcagcagaagctcagaactgcttttactgaaaaagatgcccttctcgaaactgtgaatcgcctccagggagaaaatgaaaagttactatctcaacaagaattggtaccagaacttgaaaataccataaagaaccttcaagaaaagaatggagtatacttacttagtctcagtcaaagagataccatgttaaaagaattagaaggaaagataaattctcttactgaggaaaaagatgattttataaataaactgaaaaattcccatgaagaaatggataatttccataagaaatgtgaaagggaagaaagattgattcttgaacttgggaagaaagtagagcaaacaatccagtacaacagtgaactagaacaaaaggtaaatgaattaacaggaggactagaggagactttaaaagaaaaggatcaaaatgaccaaaaactagaaaaacttatggttcaaatgaaagttctctctgaagacaaagaagtattgtcagctgaagtgaagtctctttatgaggaaaacaataaactcagttcagaaaaaaaacagttgagtagggatttggaggtttttttgtctcaaaaagaagatgttatccttaaagaacatattactcaattagaaaagaaacttcagttaatggttgaagagcaagataatttaaataaactgcttgaaaatgagcaagttcagaagttatttgttaaaactcagttgtatggttttcttaaagaaatgggatcagaagtttcagaagacagtgaagagaaagatgttgttaatgtcctacaggcagtcggtgaatccttggcaaaaataaatgaggaaaaatgcaacctggcttttcagcgtgatgaaaaagtattagagttagaaaaagagattaagtgccttcaagaagagagtgtagttcagtgtgaagaacttaagtctttattgagagactatgagcaagagaaagttctcttaaggaaagagttagaagaaatacagtcagaaaaagaggccctgcagtctgatcttctagaaatgaagaatgctaatgaaaaaacaaggcttgaaaatcagaatcttttaattcaagttgaagaagtatctcaaacatgtagcaaaagtgaaatccataatgaaaaagaaaaatgttttataaaggaacatgaaaacctaaagccactactagaacaaaaagaattacgagataggagagcagagttgatactattaaaggattccttagcaaaatcaccttctgtaaaaaatgatcctctgtcttcagtaaaagagttggaagaaaaaatagaaaatctggaaaaagaatgcaaagaaaaggaggagaaaataaataagataaaattagttgccgtaaaggcaaagaaagaactagattccagcagaaaagagacccagactgtgaaggaagaacttgaatctcttcgatcagaaaaggaccagttatctgcttccatgagagatctcattcaaggagcagaaagctataagaatcttttattagaatatgaaaagcagtcagagcaactggatgtggaaaaagaacgtgctaataattttgagcatcgtattgaagaccttacaagacaattaagaaattcgactttgcagtgtgaaacaataaattctgataatgaagatctcctggctcgtattgagacattacagtctaatgccaaattattagaagtacagattttagaagtccagagagccaaagcaatggtagacaaagaattagaagctgaaaaacttcagaaagaacagaagataaaggaacatgccactactgtaaatgaacttgaagaacttcaggtacaacttcaaaagcaaaagaaacagcttcagaaaaccatgcaagaattagagctggttaaaaaggatgcccaacaaaccacattgatgaatatggaaatagctgattatgaacgtttgatgaaagaactaaatcaaaagttaactaataaaaacaacaagatagaagatttggagcaagaaataaaaattcaaaaacagaaacaagaaaccctacaagaagaaataacttcattacagtcttcagtacaacaatatgaagaaaaaaacaccaaaatcaagcaattgcttgtgaaaaccaaaaaggaactggcagattcaaagcaagcagaaactgatcacttaatacttcaagcatctttaaaaggtgagctggaggcaagccagcagcaagtagaagtctataaaatacagctggctgaaataacatcagagaagcacaaaatccacgagcacctgaaaacctctgcggaacagcaccagcgtacgctaagtgcataccagcagagagtgacagcactacaggaagagtgccgtgctgccaaggcagaacaagctactgtaacctctgaattcgagagctacaaagtccgagttcataatgttctaaaacaacagaaaaataaatctatgtctcaggctgaaactgagggcgctaaacaagaaagggaacatctggaaatgctgattgaccagctaaaaatcaaattacaagatagccaaaataacttacagattaatgtatctgaacttcaaacattgcagtctgaacatgatacactgctagaaaggcacaacaagatgctgcaggaaactgtgtccaaagaggcggaactccgggaaaaattgtgttcaatacagtcagagaacatgatgatgaaatctgaacatacacagactgtgagtcagctaacatcccagaacgaggtccttcgaaatagcttccgagatcaagtgcgacatttgcaggaagaacacagaaagacagtggagacattacagcagcagctctccaagatggaagcacagctcttccagcttaagaatgaaccgaccacaagaagcccagtttcctctcaacaatctttgaagaaccttcgagaaaggagaaacacagacctcccgcttctagacatgcacactgtaacccgggaagagggagaaggcatggagacaactgatacggagtctgtgtcttccgccagcacatacacacagtctttagagcagctgcttaactctcccgaaactaaacttgagcctccattatggcatgctgaatttaccaaagaagaattggttcagaagctcagttccaccacaaaaagtgcagatcacttaaacggcctgcttcgggaaacagaagcaaccaatgcaattcttatggagcaaattaagcttctcaaaagtgaaataagaagattggaaaggaatcaagagcgagagaagtctgcagctaacctggaatacttgaagaacgtcttgctgcagttcattttcttgaaaccaggtagtgaaagagagagacttcttcctgttataaatacgatgttgcagctcagccctgaagaaaagggaaaacttgctgcggttgctcaaggtgaggaagaaaatgcttcccgttcttctggatgggcatcctatcttcatagttggtctggacttcgataggttgatggaaggaatatttttattaaccaaatagaatctatttacaaaaatggttcacgtatattaccacaattcttttgtcaaaaagtgtgtatatatgtttgcatctacatatatttgtacatctatatgacagatgtattttaaaagtttcatcttgaagtaaaagtacaacagcttgaagtgttgatagcaggccacagccctctaactcatgtgatttcccatgcatgctgccagaataaaaccaccaggaatgaattcactccccacttctctggaacctcaggacccgcccatttctcggcagtactgtgaattttgaagttaaactaaattttggtaccataccaactggaatttaggctttaaaaataatgtttcaaggccaggtgtggtgattcatgcctgaaatcccactactttgggaggctgaggctggagaattgcttgaggctagtgagctgtgactcccactgcactccagctcggggaacagagcgagaccttgtctctaaaaataatagtaataaaataaaaataacgttttatgactatttattgcaaggtcagagttacagattgttataaattgttgagaaatttttgtgattagaatatgaaggaaaaagctttgttggtaaaagtgacatgttaaggggctatgaagtaaatatgctgcagttaattatgctaagttaaaatacagtttagttatttgctttaaaataaactcttctttttttctttaaagtatactatctcaaaactcattatgttgtcagagccctagagctggctagtgtaacactgactatgagtaggtgggcccacacttgagttgaggtgatttcatggtgtctttccaggctcttgatagggtgtcactgcatgcaagccatgaatctgttttgagaatcctctccattttcccaaataaaaacctatcacaacagtgactatatcactcagcattggatctaaatataaaagtggtgctttcagtgtttttggcagatagtgttccataagctttccatcagaagggattttagacaccttagaggtccgtgctacatcgtcacagttcctccgaataaccttaggtggtagtgttacttgcctttgacacctctgcatatgttttaatgactagatccaaactgtgttgttcttaaatcaaaaattggataatttgtaatatttatgtgttaatcacacagtatgctctctgaagttctcttaagccttcagtttatactcttaatttaattttctttctgagctggagaactggctttgcactttggttacacagaacattggtttccaattcagtttaactgaaatttgctgctgatatgttgagtttgttctttaaaaaatagctcatatatctcatctttcctcctgtcttagaagaacagacctaactagtgaatgtattaatgaaaatgcatctatttcagagctgacatgaagagtttagtttttttactttataaactgtgaatatgagtatgccagctgcatacgatgtaactaatcatatttaaatatatttcactttctctttgactttagaccttttgaagtctgtataaacttgttttgaaatatagtctctgcttacgaatgtcataacaaaataattttttgcatgataaaaaattactttgattacaaaaggcatattctttcatggtttctgcaatgagaggaagtgtaatgattattttaatatttctattaaatatgtttaactgtata

SEQ ID NO: 8164 - protein, 1684 aa, Homo sapiens
MEDLVQDGVASPATPGTGKSKLETLPKEDLIKFAKKQMMLIQKAKSRCTELEKEIEELRSKPVTEGTGDIIKALTERLDALLLEKAETEQQCLSLKKENIKMKQEVEDSVTKMGDAHKELEQSHINYVKEIENLKNELMAVRSKYSEDKANLQKQLEEAMNTQLELSEQLKFQNNSEDNVKKLQEEIEKIRPGFEEQILYLQKQLDATTDEKKETVTQLQNIIEANSQHYQKNINSLQEELLQLKAIHQEEVKELMCQIEASAKEHEAEINKLNELKENLVKQCEASEKNIQKKYECELENLRKATSNANQDNQICSILLQENTFVEQVVNEKVKHLEDTLKELESQHSILKDEVTYMNNLKLKLEMDAQHIKDEFFHEREDLEFKINELLLAKEEQGCVIEKLKSELAGLNKQFCYTVEQHNREVQSLKEQHQKEISELNETFLSDSEKEKLTLMFEIQGLKEQCENLQQEKQEAILNYESLREIMEILQTELGESAGKISQEFESMKQQQASDVHELQQKLRTAFTEKDALLETVNRLQGENEKLLSQQELVPELENTIKNLQEKNGVYLLSLSQRDTMLKELEGKINSLTEEKDDFINKLKNSHEEMDNFHKKCEREERLILELGKKVEQTIQYNSELEQKVNELTGGLEETLKEKDQNDQKLEKLMVQMKVLSEDKEVLSAEVKSLYEENNKLSSEKKQLSRDLEVFLSQKEDVILKEHITQLEKKLQLMVEEQDNLNKLLENEQVQKLFVKTQLYGFLKEMGSEVSEDSEEKDVVNVLQAVGESLAKINEEKCNLAFQRDEKVLELEKEIKCLQEESVVQCEELKSLLRDYEQEKVLLRKELEEIQSEKEALQSDLLEMKNANEKTRLENQNLLIQVEEVSQTCSKSEIHNEKEKCFIKEHENLKPLLEQKELRDRRAELILLKDSLAKSPSVKNDPLSSVKELEEKIENLEKECKEKEEKINKIKLVAVKAKKELDSSRKETQTVKEELESLRSEKDQLSASMRDLIQGAESYKNLLLEYEKQSEQLDVEKERANNFEHRIEDLTRQLRNSTLQCETINSDNEDLLARIETLQSNAKLLEVQILEVQRAKAMVDKELEAEKLQKEQKIKEHATTVNELEELQVQLQKQKKQLQKTMQELELVKKDAQQTTLMNMEIADYERLMKELNQKLTNKNNKIEDLEQEIKIQKQKQETLQEEITSLQSSVQQYEEKNTKIKQLLVKTKKELADSKQAETDHLILQASLKGELEASQQQVEVYKIQLAEITSEKHKIHEHLKTSAEQHQRTLSAYQQRVTALQEECRAAKAEQATVTSEFESYKVRVHNVLKQQKNKSMSQAETEGAKQEREHLEMLIDQLKIKLQDSQNNLQINVSELQTLQSEHDTLLERHNKMLQETVSKEAELREKLCSIQSENMMMKSEHTQTVSQLTSQNEVLRNSFRDQVRHLQEEHRKTVETLQQQLSKMEAQLFQLKNEPTTRSPVSSQQSLKNLRERRNTDLPLLDMHTVTREEGEGMETTDTESVSSASTYTQSLEQLLNSPETKLEPPLWHAEFTKEELVQKLSSTTKSADHLNGLLRETEATNAILMEQIKLLKSEIRRLERNQEREKSAANLEYLKNVLLQFIFLKPGSERERLLPVINTMLQLSPEEKGKLAAVAQGEEENASRSSGWASYLHSWSGLR

SEQ ID NO: 8165 - DNA, 6835 bp, Homo sapiens
ctttgacctgcagtagagcctacgtcagaggctggcgcaaacagaagtgcagcggtggcggcggctggttgcgggccggcggcgggctggcggagatggaggatcttgttcaagatggggtggcttcaccagctacccctgggaccgggaaatctaagaattggagaaagaaattgaagaactcagatcaaaacctgttactgaaggaactggtgatattattaaggcattaactgaacgtctggatgctcttcttctggaaaaagcagagactgagcaacagtgtctttctctgaaaaaggaaaatataaaaatgaagcaagaggttgaggattctgtaacaaagatgggagatgcacataaggagttggaacaatcacatataaactatgtgaaagaaattgaaaatttgaaaaatgagttgatggcagtacgttccaaatacagtgaagacaaagctaacttacaaaagcagctggaagaagcaatgaatacgcaattagaactttcagaacaacttaaatttcagaacaactctgaagataatgttaaaaaactacaagaagagattgagaaaattaggccaggctttgaggagcaaattttatatctgcaaaagcaattagacgctaccactgatgaaaagaaggaaacagttactcaactccaaaatatcattgaggctaattctcagcattaccaaaaaaatattaatagtttgcaggaagagcttttacagttgaaagctatacaccaagaagaggtgaaagagttgatgtgccagattgaagcatcagctaaggaacatgaagcagagataaataagttgaacgagctaaaagagaacttagtaaaacaatgtgaggcaagtgaaaagaacatccagaagaaatatgaatgtgagttagaaaatttaaggaaagccacctcaaatgcaaaccaagacaatcagatatgttctattctcttgcaagaaaatacatttgtagaacaagtagtaaatgaaaaagtcaaacacttagaagataccttaaaagaacttgaatctcaacacagtatcttaaaagatgaggtaacttatatgaataatcttaagttaaaacttgaaatggatgctcaacatataaaggatgagttttttcatgaacgggaagacttagagtttaaaattaatgaattattactagctaaagaagaacagggctgtgtaattgaaaaattaaaatctgagctagcaggtttaaataaacagttttgctatactgtagaacagcataacagagaagtacagagtcttaaggaacaacatcaaaaagaaatatcagaactaaatgagacatttttgtcagattcagaaaaagaaaaattaacattaatgtttgaaatacagggtcttaaggaacagtgtgaaaacctacagcaagaaaagcaagaagcaattttaaattatgagagtttacgagagattatggaaattttacaaacagaactgggggaatctgctggaaaaataagtcaagagttcgaatcaatgaagcaacagcaagcatctgatgttcatgaactgcagcagaagctcagaactgcttttactgaaaaagatgcccttctcgaaactgtgaatcgcctccagggagaaaatgaaaagttactatctcaacaagaattggtaccagaacttgaaaataccataaagaaccttcaagaaaagaatggagtatacttacttagtctcagtcaaagagataccatgttaaaagaattagaaggaaagataaattctcttactgaggaaaaagatgattttataaataaactgaaaaattcccatgaagaaatggataatttccataagaaatgtgaaagggaagaaagattgattcttgaacttgggaagaaagtagagcaaacaatccagtacaacagtgaactagaacaaaaggtaaatgaattaacaggaggactagaggagactttaaaagaaaaggatcaaaatgaccaaaaactagaaaaacttatggttcaaatgaaagttctctctgaagacaaagaagtattgtcagctgaagtgaagtctctttatgaggaaaacaataaactcagttcagaaaaaaaacagttgagtagggatttggaggtttttttgtctcaaaaagaagatgttatccttaaagaacatattactcaattagaaaagaaacttcagttaatggttgaagagcaagataatttaaataaactgcttgaaaatgagcaagttcagaagttatttgttaaaactcagttgtatggttttcttaaagaaatgggatcagaagtttcagaagacagtgaagagaaagatgttgttaatgtcctacaggcagtcggtgaatccttggcaaaaataaatgaggaaaaatgcaacctggcttttcagcgtgatgaaaaagtattagagttagaaaaagagattaagtgccttcaagaagagagtgtagttcagtgtgaagaacttaagtctttattgagagactatgagcaagagaaagttctcttaaggaaagagttagaagaaatacagtcagaaaaagaggccctgcagtctgatcttctagaaatgaagaatgctaatgaaaaaacaaggcttgaaaatcagaatcttttaattcaagttgaagaagtatctcaaacatgtagcaaaagtgaaatccataatgaaaaagaaaaatgttttataaaggaacatgaaaacctaaagccactactagaacaaaaagaattacgagataggagagcagagttgatactattaaaggattccttagcaaaatcaccttctgtaaaaaatgatcctctgtcttcagtaaaagagttggaagaaaaaatagaaaatctggaaaaagaatgcaaagaaaaggaggagaaaataaataagataaaattagttgccgtaaaggcaaagaaagaactagattccagcagaaaagagacccagactgtgaaggaagaacttgaatctcttcgatcagaaaaggaccagttatctgcttccatgagagatctcattcaaggagcagaaagctataagaatcttttattagaatatgaaaagcagtcagagcaactggatgtggaaaaagaacgtgctaataattttgagcatcgtattgaagaccttacaagacaattaagaaattcgactttgcagtgtgaaacaataaattctgataatgaagatctcctggctcgtattgagacattacagtctaatgccaaattattagaagtacagattttagaagtccagagagccaaagcaatggtagacaaagaattagaagctgaaaaacttcagaaagaacagaagataaaggaacatgccactactgtaaatgaacttgaagaacttcaggtacaacttcaaaagcaaaagaaacagcttcagaaaaccatgcaagaattagagctggttaaaaaggatgcccaacaaaccacattgatgaatatggaaatagctgattatgaacgtttgatgaaagaactaaatcaaaagttaactaataaaaacaacaagatagaagatttggagcaagaaataaaaattcaaaaacagaaacaagaaaccctacaagaagaaataacttcattacagtcttcagtacaacaatatgaagaaaaaaacaccaaaatcaagcaattgcttgtgaaaaccaaaaaggaactggcagattcaaagcaagcagaaactgatcacttaatacttcaagcatctttaaaaggtgagctggaggcaagccagcagcaagtagaagtctataaaatacagctggctgaaataacatcagagaagcacaaaatccacgagcacctgaaaacctctgcggaacagcaccagcgtacgctaagtgcataccagcagagagtgacagcactacaggaagagtgccgtgctgccaaggcagaacaagctactgtaacctctgaattcgagagctacaaagtccgagttcataatgttctaaaacaacagaaaaataaatctatgtctcaggctgaaactgagggcgctaaacaagaaagggaacatctggaaatgctgattgaccagctaaaaatcaaattacaagatagccaaaataacttacagattaatgtatctgaacttcaaacattgcagtctgaacatgatacactgctagaaaggcacaacaagatgctgcaggaaactgtgtccaaagaggcggaactccgggaaaaattgtgttcaatacagtcagagaacatgatgatgaaatctgaacatacacagactgtgagtcagctaacatcccagaacgaggtccttcgaaatagcttccgagatcaagtgcgacatttgcaggaagaacacagaaagacagtggagacattacagcagcagctctccaagatggaagcacagctcttccagcttaagaatgaaccgaccacaagaagcccagtttcctctcaacaatctttgaagaaccttcgagaaaggagaaacacagacctcccgcttctagacatgcacactgtaacccgggaagagggagaaggcatggagacaactgatacggagtctgtgtcttccgccagcacatacacacagtctttagagcagctgcttaactctcccgaaactaaacttgagcctccattatggcatgctgaatttaccaaagaagaattggttcagaagctcagttccaccacaaaaagtgcagatcacttaaacggcctgcttcgggaaacagaagcaaccaatgcaattcttatggagcaaattaagcttctcaaaagtgaaataagaagattggaaaggaatcaagagcgagagaagtctgcagctaacctggaatacttgaagaacgtcttgctgcagttcattttcttgaaaccaggtagtgaaagagagagacttcttcctgttataaatacgatgttgcagctcagccctgaagaaaagggaaaacttgctgcggttgctcaaggtgaggaagaaaatgcttcccgttcttctggatgggcatcctatcttcatagttggtctggacttcgataggttgatggaaggaatatttttattaaccaaatagaatctatttacaaaaatggttcacgtatattaccacaattcttttgtcaaaaagtgtgtatatatgtttgcatctacatatatttgtacatctatatgacagatgtattttaaaagtttcatcttgaagtaaaagtacaacagcttgaagtgttgatagcaggccacagccctctaactcatgtgatttcccatgcatgctgccagaataaaaccaccaggaatgaattcactccccacttctctggaacctcaggacccgcccatttctcggcagtactgtgaattttgaagttaaactaaattttggtaccataccaactggaatttaggctttaaaaataatgtttcaaggccaggtgtggtgattcatgcctgaaatcccactactttgggaggctgaggctggagaattgcttgaggctagtgagctgtgactcccactgcactccagctcggggaacagagcgagaccttgtctctaaaaataatagtaataaaataaaaataacgttttatgactatttattgcaaggtcagagttacagattgttataaattgttgagaaatttttgtgattagaatatgaaggaaaaagctttgttggtaaaagtgacatgttaaggggctatgaagtaaatatgctgcagttaattatgctaagttaaaatacagtttagttatttgctttaaaataaactcttctttttttctttaaagtatactatctcaaaactcattatgttgtcagagccctagagctggctagtgtaacactgactatgagtaggtgggcccacacttgagttgaggtgatttcatggtgtctttccaggctcttgatagggtgtcactgcatgcaagccatgaatctgttttgagaatcctctccattttcccaaataaaaacctatcacaacagtgactatatcactcagcattggatctaaatataaaagtggtgctttcagtgtttttggcagatagtgttccataagctttccatcagaagggattttagacaccttagaggtccgtgctacatcgtcacagttcctccgaataaccttaggtggtagtgttacttgcctttgacacctctgcatatgttttaatgactagatccaaactgtgttgttcttaaatcaaaaattggataatttgtaatatttatgtgttaatcacacagtatgctctctgaagttctcttaagccttcagtttatactcttaatttaattttctttctgagctggagaactggctttgcactttggttacacagaacattggtttccaattcagtttaactgaaatttgctgctgatatgttgagtttgttctttaaaaaatagctcatatatctcatctttcctcctgtcttagaagaacagacctaactagtgaatgtattaatgaaaatgcatctatttcagagctgacatgaagagtttagtttttttactttataaactgtgaatatgagtatgccagctgcatacgatgtaactaatcatatttaaatatatttcactttctctttgactttagaccttttgaagtctgtataaacttgttttgaaatatagtctctgcttacgaatgtcataacaaaataattttttgcatgataaaaaattactttgattacaaaaggcatattctttcatggtttctgcaatgagaggaagtgtaatgattattttaatatttctattaaatatgtttaactgtata

SEQ ID NO: 8166 - protein, 1583 aa, Homo sapiens
MKQEVEDSVTKMGDAHKELEQSHINYVKEIENLKNELMAVRSKYSEDKANLQKQLEEAMNTQLELSEQLKFQNNSEDNVKKLQEEIEKIRPGFEEQILYLQKQLDATTDEKKETVTQLQNIIEANSQHYQKNINSLQEELLQLKAIHQEEVKELMCQIEASAKEHEAEINKLNELKENLVKQCEASEKNIQKKYECELENLRKATSNANQDNQICSILLQENTFVEQVVNEKVKHLEDTLKELESQHSILKDEVTYMNNLKLKLEMDAQHIKDEFFHEREDLEFKINELLLAKEEQGCVIEKLKSELAGLNKQFCYTVEQHNREVQSLKEQHQKEISELNETFLSDSEKEKLTLMFEIQGLKEQCENLQQEKQEAILNYESLREIMEILQTELGESAGKISQEFESMKQQQASDVHELQQKLRTAFTEKDALLETVNRLQGENEKLLSQQELVPELENTIKNLQEKNGVYLLSLSQRDTMLKELEGKINSLTEEKDDFINKLKNSHEEMDNFHKKCEREERLILELGKKVEQTIQYNSELEQKVNELTGGLEETLKEKDQNDQKLEKLMVQMKVLSEDKEVLSAEVKSLYEENNKLSSEKKQLSRDLEVFLSQKEDVILKEHITQLEKKLQLMVEEQDNLNKLLENEQVQKLFVKTQLYGFLKEMGSEVSEDSEEKDVVNVLQAVGESLAKINEEKCNLAFQRDEKVLELEKEIKCLQEESVVQCEELKSLLRDYEQEKVLLRKELEEIQSEKEALQSDLLEMKNANEKTRLENQNLLIQVEEVSQTCSKSEIHNEKEKCFIKEHENLKPLLEQKELRDRRAELILLKDSLAKSPSVKNDPLSSVKELEEKIENLEKECKEKEEKINKIKLVAVKAKKELDSSRKETQTVKEELESLRSEKDQLSASMRDLIQGAESYKNLLLEYEKQSEQLDVEKERANNFEHRIEDLTRQLRNSTLQCETINSDNEDLLARIETLQSNAKLLEVQILEVQRAKAMVDKELEAEKLQKEQKIKEHATTVNELEELQVQLQKQKKQLQKTMQELELVKKDAQQTTLMNMEIADYERLMKELNQKLTNKNNKIEDLEQEIKIQKQKQETLQEEITSLQSSVQQYEEKNTKIKQLLVKTKKELADSKQAETDHLILQASLKGELEASQQQVEVYKIQLAEITSEKHKIHEHLKTSAEQHQRTLSAYQQRVTALQEECRAAKAEQATVTSEFESYKVRVHNVLKQQKNKSMSQAETEGAKQEREHLEMLIDQLKIKLQDSQNNLQINVSELQTLQSEHDTLLERHNKMLQETVSKEAELREKLCSIQSENMMMKSEHTQTVSQLTSQNEVLRNSFRDQVRHLQEEHRKTVETLQQQLSKMEAQLFQLKNEPTTRSPVSSQQSLKNLRERRNTDLPLLDMHTVTREEGEGMETTDTESVSSASTYTQSLEQLLNSPETKLEPPLWHAEFTKEELVQKLSSTTKSADHLNGLLRETEATNAILMEQIKLLKSEIRRLERNQEREKSAANLEYLKNVLLQFIFLKPGSERERLLPVINTMLQLSPEEKGKLAAVAQGEEENASRSSGWASYLHSWSGLR

SEQ ID NO: 8167 - DNA, 1372 bp, Homo sapiens
gtcagaggctggcgcaaacagaagtgcagcggtggcggcggctggttgcgggccggcggcgggctggcggagatggaggatcttgttcaagatggggtggcttcaccagctacccctgggaccgggaaatctaagctggaaacattgcccaaagaagacctcatcaagtttgccaagaaacagatgatgctaatacagaaagctaaatcaaggtgtacagaattggagaaagaaattgaagaactcagatcaaaacctgttactgaaggaactggtgatattattaaggcattaactgaacgtctggatgctcttcttctggaaaaagcagagactgagcaacagtgtctttctctgaaaaaggaaaatataaaaatgaagcaagaggttgaggattctgtaacaaagatgggagatgcacataaggagttggaacaatcacatataaactatgtgaaagaaattgaaaatttgaaaaatgagttgatggcagtacgttccaaatacagtgaagacaaagctaacttacaaaagcagctggaagaagcaatgaatacgcaattagaactttcagaacaacttaaatttcagaacaactctgaagataatgttaaaaaactacaagaagagattgagaaaattaggccaggctttgaggagcaaattttatatctgcaaaagcaattagacgctaccactgatgaaaagaaggaaacagttactcaactccaaaatatcattgaggctaattctcagcattaccaaaaaaatattaatagtttgcaggaagagcttttacagttgaaagctatacaccaagaagaggtgaaagagttgatgtgccagattgaagcatcagctaaggaacatgaagcagagataaataagttgaacgagctaaaagagaacttagtaaaacaatgtgaggcaagtgaaaagaacatccagaagaaatatgaatgtgagttagaaaatttaaggaaagccacctcaaatgcaaaccaagacaatcagatatgttctattctcttgcaagaaaatacatttgtagaacaagtagtaaatgaaaaagtcaaacacttagaagataccttaaaagaacttgaatctcaacacagtatcttaaaagatgaggtaacttatatgaataatcttaagttaaaacttgaaatggatgctcaacatataaaggatgagttttttcatgaacgggaagacttagagtttaaaattaatgaattattactagctaaagaagaacagggctgtgtaattgaaaaattaaaatctgagctagcaggtttaaataaacagttttgctatactgtagaacagcataacagagaagtacagagtcttaaggaacaacatc

SEQ ID NO: 8168 - protein, 432 aa, Homo sapiens
MEDLVQDGVASPATPGTGKSKLETLPKEDLIKFAKKQMMLIQKAKSRCTELEKEIEELRSKPVTEGTGDIIKALTERLDALLLEKAETEQQCLSLKKENIKMKQEVEDSVTKMGDAHKELEQSHINYVKEIENLKNELMAVRSKYSEDKANLQKQLEEAMNTQLELSEQLKFQNNSEDNVKKLQEEIEKIRPGFEEQILYLQKQLDATTDEKKETVTQLQNIIEANSQHYQKNINSLQEELLQLKAIHQEEVKELMCQIEASAKEHEAEINKLNELKENLVKQCEASEKNIQKKYECELENLRKATSNANQDNQICSILLQENTFVEQVVNEKVKHLEDTLKELESQHSILKDEVTYMNNLKLKLEMDAQHIKDEFFHEREDLEFKINELLLAKEEQGCVIEKLKSELAGLNKQFCYTVEQHNREVQSLKEQ

SEQ ID NO: 8169 - DNA, 543 bp, Homo sapiens
gaagtgcagcggtggcggcggctggttgcgggccggcggcgggctggcggagatggaggatcttgttcaagatggggtggcttcaccagctacccctgggaccgggaaatctaagaattggagaaagaaattgaagaactcagatcaaaacctgttactgaaggaactggtgatattattaagagtcttgctctgtcgcccaggctggagtgcaatgacgtgatctcggctcactgcaacctctacctcctgggttcaagcgattctcctgcctcaagctcgcattaactgaacgtctggatgctcttcttctggaaaaagcagagactgagcaacagtgtctttctctgaaaaaggaaaatataaaaatgaagcaagaggttgagctataatgccatctttactaaaagcgaaaaaaagtaagttgattttcacacatgactaaataccattatctctttagttctacggtattcagaggcatttcttgcctatttcttgcctattaggtctgggctaatttgagtaatagatttaatattg

SEQ ID NO: 8170 - protein, 56 aa, Homo sapiens
MEDLVQDGVASPATPGTGKSKNWRKKLKNSDQNLLLKELVILLRVLLCRPGWSAMT

SEQ ID NO: 8171 - DNA, 2125 bp, Homo sapiens
actgaaaaattcccatgaagaaatggataatttccataagaaatgtgaaagggaagaaagattgattcttgaacttgggaagaaagtagagcaaacaatccagtacaacagtgaactagaacaaaaggtaaatgaattaacaggaggactagaggagactttaaaagaaaaggatcaaaatgaccaaaaactagaaaaacttatggttcaaatgaaagttctctctgaagacaaagaagtattgtcagctgaagtgaagtctctttatgaggaaaacaataaactcagttcagaaaaaaaacagttgagtagggatttggaggtttttttgtctcaaaaagaagatgttatccttaaagaacatattactcaattagaaaagaaacttcagttaatggttgaagagcaagataatttaaataaactgcttgaaaatgagcaagttcagaagttatttgttaaaactcagttgtatggttttcttaaagaaatgggatcagaagtttcagaagacagtgaagagaaagatgttgttaatgtcctacaggcagtcggtgaatccttggcaaaaataaatgaggaaaaatgcaacctggcttttcagcgtgatgaaaaagtattagagttagaaaaagagattaagtgccttcaagaagagagtgtagttcagtgtgaagaacttaagtctttattgagagactatgagcaagagaaagttctcttaaggaaagagttagaagaaatacagtcagaaaaagaggccctgcagtctgatcttctagaaatgaagaatgctaatgaaaaaacaaggcttgaaaatcagaatcttttaattcaagttgaagaagtatctcaaacatgtagcaaaagtgaaatccataatgaaaaagaaaaatgttttataaaggaacatgaaaacctaaagccactactagaacaaaaagaattacgagataggagagcagagttgatactattaaaggattccttagcaaaatcaccttctgtaaaaaatgatcctctgtcttcagtaaaagagttggaagaaaaaataggtaactatggttttgcagatgttgtcacaattaattagacagattcttcttagtgttagaatagattgggaaatatagtagccaaataatgagttgttaaaaacacagttcgtagctgtcttttcctcgagctcacattcttgcccctctaacacctgtttgccttctctttcaaaagtgttactttctattgtttaacccaagcaagattggtgtgatttataaatggcttcatgatttattttggatttttcattcatttagcaaattttatttaaatgcccaactattctagaccctggtgatagaaaagtggttgaggtacagaccatgtgctcagagatctcactgttgtttgaggtgtggacaagatacagtactaacagcataggaacttaacactgttttgagttaaaaaaaaaaaaaaaagcagcgtagaatagggttttcagccaagtcttgaagaatgagaaattttacacaggaagaaaggtattctaggaagaaggaagagcaggtgcttgtaggttgacatatagcatacatcaaggcacgtactaggaagttcctggagaggtaggagcctgatcataaacacactagtatgattgatatgcagaggagttaggactttatcttatccatttattcctcacagtaacattataggatagctcttttattcccatataagaatcaggaaacgaagacttagaagtatgtaatgtgccaatgatccctgaatttagtaccctgttagattagggtaagggaagttgaagagtttagaatgactcccagttgtctataatgggtgattggggcagattgggatgttcagttttagaattaagtttaaataccagtccaagtaaagatgttagaatgctatgcaaatctggagttaaggggagagagctaagctagagataaatacttctagttaaagagtggtcattaaaagccaggagaggccgagtgcggtggctcacgcctataatcccagcactttgggaggcctaagtgggcggatcacgaggtcaggagattgagaccatcctggctaacac

SEQ ID NO: 8172 - protein, 356 aa, Homo sapiens
MDNFHKKCEREERLILELGKKVEQTIQYNSELEQKVNELTGGLEETLKEKDQNDQKLEKLMVQMKVLSEDKEVLSAEVKSLYEENNKLSSEKKQLSRDLEVFLSQKEDVILKEHITQLEKKLQLMVEEQDNLNKLLENEQVQKLFVKTQLYGFLKEMGSEVSEDSEEKDVVNVLQAVGESLAKINEEKCNLAFQRDEKVLELEKEIKCLQEESVVQCEELKSLLRDYEQEKVLLRKELEEIQSEKEALQSDLLEMKNANEKTRLENQNLLIQVEEVSQTCSKSEIHNEKEKCFIKEHENLKPLLEQKELRDRRAELILLKDSLAKSPSVKNDPLSSVKELEEKIGNYGFADVVTIN

SEQ ID NO: 8173 - DNA, 524 bp, Homo sapiens
gggaggctggcgcaaacgcagcgggtggctggggtaggggctcattgggagcccacggagcgcggcggcggctcgggggccgagttccctacaacaaggatggcggtgacgggcgcagggagcggggcccggctctccttgcctcgaggctcctctgattccactcgcgtggctgcgcggccctggcagcggccttcgtcccgggggtgggagctacacagggttccgccccgtcctggcgaggacgcctgagggggctctgtggtaaggctctgtcgggcaggccgggcttccgggaggacctggtctggatcggtcaccgctgggtgcctgagctccgcatggagcctgcagcctttgtttaacttataaagaaatgggggctccgagcagtcaagaagaacatgccccaagttattcgtcagtgaggcggaaattgtggtgtacttgttccagaccaactatgaagataggatgcccatccagaagaacgggaagcattttcttcctcacctttggaaagt

SEQ ID NO: 8174 - protein, 48 aa, Homo sapiens
MGAPSSQEEHAPSYSSVRRKLWCTCSRPTMKIGCPSRRTGSIFFLTFG

SEQ ID NO: 8175 - DNA, 2529 bp, Homo sapiens
atttcagcaccccaggctagtctgggaggctggcgcaaacgcagcgggtggctggggtaggggctcattgggagcccacggagcgcggcggcggctcgggggccgagttccctacaacaaggatggcggtgacgggcgcagggagcggggcccggctctccttgcctcgaggctcctctgattccactcgcgtggctgcgcggccctggcagcggccttcgtcccgggggtgggagctacacagggttccgccccgtcctggcgaggacgcctgagggggctctgtggtaaggctctgtcgggcaggccgggcttccgggaggacctggtctggatcggtcaccgctgggtgcctgagctccgcatggagcctgcagcctttgtttaacttataaagaaatgggggctccgagcagtcaagaagaacatgccccaagttattcgtcagtgaggcggaaattgtggtgtacttgtgtaagttcacattttatactttaccattatactgtgctccaaattatctgatatttactttcaaagcatgtgtagaaagtttactatgatgatgcagagacattgtacagaatccagtcccttgactctcaggtccccagaacactcacttcacgattttgttgacctcttctgtcaacttaaacctggcactctcttggctggctttctctgctctttctgggcactccaaagcttctgtacttacatgctacaattccagtcacaggaagatgctgagttctttagtcccagatccatattcctgagaaaacctaattgcctaggctcaggtcataactctgtatctgtttcagttgattatggctgggcctactgcccctctgtatggtggtggggcagaagttcccagagagaggcaggggtgacagggactgttgtctcaaatgctaggcagacatctggagtggtaaccactacatctgttcacagtgagcacatccttgcagggaaactgggttaatcatctctattattgaaactcagaggtatagtgtttcttcataggaattttctttccttatttgagatgggggtctcactttgttgcccaggctggagtgcagtggtgtgtgatcttggctcactgcagcctcccctcccgagttcaagtgattctcctacctcagcctgctgagtagctgggactacaggcatgggccaacatgcctggctaatttttgtatttttcgtagagacaagttttcaccatattggccaggctggtcttggactcctgacctcaggtgatctgcccaccctggcctccctaagtgccgggatgacaggtgtgagccatcgcgcccggcctatttataggaattttctgtaggtatataagtaataatttgaaggtcccaactagatgccttttcgtgtaaccgtatcttgaatggaacattttctttctacgtaattatacataaataacccaatgctttttaatacccacgaaaaaccattagctcaaagacacttgcaaacttgtatcaggttgttctccttggtgtgtattaagtttgaagcaaaggggattttcagataccaagacgaagcagaagtcttccaccaagttgaaatcatcacgttgcaatttaatcatatgatacaaccaattttttgatgtgttatgccattcgccaaataccaaaaattttttaggggaaactttacatcctcaatactatacacttccagctacaccaccacctaacagggactttaaaaagaatacaaagtatggtatgccttctcagtgccttgttagtaattcagttacagttctgccgaactttctttaaaggaatacaattctcaatcttacaccgttcagagcacaagcatagcttattgtatacaagagatgtgcatcagttcccactcctcagggactgtatgaatttggcttttttttgacggagtctcactctgtcaccgggctggagtgcagtagtgtgatcttggctcactggactctgcctcccgggttcaagtgattctcctgcctcagcctcccaagtagctgggactacaggtgcacaccactatgcccagctgattttttgtgtgtttttagtagagatggggtttcaccatgttggccaggatggtcttgatctcttgacctcatgatctacccgctttggcctcccaaggtgctgggattacaggcatgaggcactgtgctgggccaaatttggttttcttgtggcatctgtgtttctctttctgctctgtctctccccatatcctagtccaaacatccaaagaaattaattacctccaggagatcgagaccatcctggctaacacggtgaaaccccgtctctactaaaaatacaaaaaattagccgggcatggtggcgggcgcctgtagtcccagctacttaggaggctgaggcaggagaatggcgtgaacccgggaggcagagcttgcagtgagccgagatcgcgccattgcactccagcctgggcgacagagcaagactctgtctc

SEQ ID NO: 8176 - protein, 53 aa, Homo sapiens [sequence omitted]

SEQ ID NO: 8177 - DNA, 4401 bp, Homo sapiens
gcgcggccggcccctggccttcctccccttcctgctccgggcccgccagtagccggccgcggcggcgagggactaggacgcggctggagcggcgccgggagacgaggggctgagagacggcggcggccgaaagcggagagatgctgggcgtggcggccgggatgacccacagcaacatggccaacgccctggccagcgccacttgcgagcgctgcaagggcggctttgcgcccgctgagaagatcgtgaacagtaatggggagctgtaccatgagcagtgtttcgtgtgcgctcagtgcttccagcagttcccagaaggactcttctatgagtttgaaggaagaaagtactgtgaacatgactttcagatgctctttgccccttgctgtcatcagtgtggtgaattcatcattggccgagttatcaaagccatgaataacagctggcatccggagtgcttccgctgtgacctctgccaggaagttctggcagatatcgggtttgtcaagaatgctgggagacacctgtgtcgcccctgtcataatcgtgagaaagccagaggccttgggaaatacatctgccagaaatgccatgctatcatcgatgagcagcctctgatattcaagaacgacccctaccatccagaccatttcaactgcgccaactgcgggaaggagctgactgccgatgcacgggagctgaaaggggagctatactgcctcccatgccatgataaaatgggggtccccatctgtggtgcttgccgacggcccatcgaagggcgcgtggtgaacgctatgggcaagcagtggcatgtggagcattttgtttgtgccaagtgtgagaaaccctttcttggacatcgccattatgagaggaaaggcctggcatattgtgaaactcactataaccagctatttggtgatgtttgcttccactgcaatcgtgttatagaaggtgatgtggtctctgctcttaataaggcctggtgcgtgaactgctttgcctgttctacctgcaacactaaattaacactcaagaataagtttgtggagtttgacatgaagccagtctgtaagaagtgctatgagaaatttccattggagctgaagaaaagacttaagaaactagctgagaccttaggaaggaaataagttcctttattttttcttttctatgcaagataagagattaccaacattacttgtcttgatctacccatatttaaagctatatctcaaagcagttgagagaagaggacctatatgaatggttttatgtcatttttttaattaaaaaagaaaaattcatataatcgtgtttaaaacacaaatgaagtcagtatttgcctttgttaacccttatccatttgttgacatgtagactgtttacaaaaaaaaaacacatggttaaatgttaaattttaattaaggcccccaaaaattaaatataactttttaaaatgaaaggagtcaccttttacatgactcaggtgaaaaaacagtataaacattaatttactttgtgttcaaaagaaaattccaactgctgttggggaaggacacagaaaagaaaaataaccacccaagaaaaacaaaaacaagaaaaacaaatcttatacaatcttagtatatttatcaaactagtagctagaaagtgaatatgcacattactaagacaaaaaacaagtgtaattcagaactacttgattttttttagttaaatgcaataattattatgcttagttttataacctgctctccttgtgaattcttccttcaaatgattacttaacgcagtagtaatagctagctgtaggatgtcctttaaatttttgtgcaaaaaaaaatttataccaggtatttggaaatatactttacaatattggaaaatgaagtatttttaatgtattacagcaattatgtttctaagcttaatgttaagcatgtagtcttagaataggacatgaaattaaattgtatgtagcttggaatatattgcttcagaaaactgaatgtgtatgtcggtcatattgcctttataaccatgctaatatctatgctttatacatactcaaacttgccttgccttaaaaacatacatactacatacttaaatcaggaattctagccatctcacagaataccaactaaaactaagtgcattgagatctgagattggtaaacccagattcatttaccacagctgtaattaagtttttagaaactattctctttttggggaaatccattgaagttaatttctgttatcttattagaagaaaatgatgttgatatgtgtttcagattttccatttgaaatcttataattaatttgatttatttactgtaagtaggaggtataaatgacactcttaaattggaaggaggggtgttttagtgtctgttttaggtcaaaattagtgattctatttttatcaaaagttttatcctgaagtttcaggaccactcttccttaataaacttgttaatggaaagcgagctttatgaacatttaaaaatgttgctgctgctttgttgcttaaaaagaaagttgccaagagagacttcttagggaaaatatttgggttttttttccaaaaattgctgaaatattgttttgccatttttaaaaagtctcaggttattaccactctgccattaaatatttgtatgcctgcatttttaaaaattctgtgcatgtactttatggagtacattctatttttgttttcagataccctacaaccaattttttttagtaatcttttagaattgaaattatcataaatgatcgagaataatcatcacatagtttaagattgtatatgttgagtagtttaaaacaatctttgcattttacagtaagaatcaaagtcccttcagtgtgcctttgtcagctaatatgtgaccagcaatgacaaccttgggagtatttattaaatattatgctatgaatataggcaacacagaacagggtttgcagtatagcgtcttgatgctaaattctcatatacctctacacgagaaatatggaggagaaaaacaagcatttacatatattcttcgtcactttgaagatgcatggcctgaactcgactgcttgtgtttgtttacatatcaggcatacccaggcatctcctgcagccagaggttccattgctgtctttgctcagtcctcttttaaaatatgaattagtggacaggcacggtgcctcacacctgtaatcccagcactttgggaggtcgaggcaggtggatcacgaggtcaggagatcaagaccatcctggctaccactgaaaccccatctctactacaaaaaaattagccgggcgtggtggcgggcacctgcagtcccagctactcgggaggctgaggcaggagaatggtgggaacccgggaggcagagcttgcagtgagccaagatcacgccactgcactccagcctgggcaacagagcaagactctgtctcaaaaaaaataaataaataaattatgaatgagtattttctagaaattcaacttgctaagcctgtaatacttaagggtagtttatctagatacagtactttcttccctgataagtagtatcattggagcccttaggtataggagaagaggaagaagtttaaaaagtgtaagtgggccgggcgtggtggctcatgcctgtaatcccagcactttgggaggccgaggggggcggatcacgaggtcaggagatccagactatcctggctaacaaggtgaaaccccgtctctactaaaaatacaaaaaaaaacattagccaggcgtggtggcgggcgcttgtagtcccagctactcgggaggctgaggtaggagaatggcttgaacccaggaggcggagcttgcagtgagccgagattgcaccactgcactccagcctgggcgacagagcaagactccgtctcaaaaaaaaaaaaaaagtgtaagtggattaaaagagaaacttggtctagttcataatatttttaatagggctttccctggctgctggaaaacttaggccagtaagcatctctttgtttaaagtcctacaagacaatttgaaataattcattgttcatgccaaaattctaagtactgtttttcttagcaagtgtaacataatcaggaacaatgggtacaagtaaaacattctttggatgatattcaaagccttattagcactgcacctgaataataggtcattttgcctcactcatttgccaaagtagccatttctaagttaaggaagtttttagataggctcatagccttgtatttcgttttagattgtaagctcaatggcagggatactatattggtaattatgttttcatatagcaaccaccacagtatattcttggtgcttaataaatgtttataattgttaacaataa

SEQ ID NO: 8178 - protein, 337 aa, Homo sapiens
MLGVAAGMTHSNMANALASATCERCKGGFAPAEKIVNSNGELYHEQCFVCAQCFQQFPEGLFYEFEGRKYCEHDFQMLFAPCCHQCGEFIIGRVIKAMNNSWHPECFRCDLCQEVLADIGFVKNAGRHLCRPCHNREKARGLGKYICQKCHAIIDEQPLIFKNDPYHPDHFNCANCGKELTADARELKGELYCLPCHDKMGVPICGACRRPIEGRVVNAMGKQWHVEHFVCAKCEKPFLGHRHYERKGLAYCETHYNQLFGDVCFHCNRVIEGDVVSALNKAWCVNCFACSTCNTKLTLKNKFVEFDMKPVCKKCYEKFPLELKKRLKKLAETLGRK

SEQ ID NO: 8179 - DNA, 422 bp, Homo sapiens
tataaaacaacttagcaggatatgagttatgacatttaggggtgttgtcctattgcttcagaacagtggggttatcgtgtaacacaccatgtcacatgatttgactaaatacaggaaaaaaaaaaaccctgaacttggtttcattggctcaaatatagttcaagacaacagagacaaagctaagatgaggaagttctgtacagtttaggaaatagaggctttcaaagataattcgcataatgcttttggcattttattacattaattttttaaaacattatttctgctgcctagggtctttggtggggaaatgtactatttagcaatatgtttagtgaacttttgtcctgtcatggtaagaagaaagcagctataactaagtaaggagttactcttattcattaacatgtaaaacgctgttt

SEQ ID NO: 8180 - protein, 39 aa, Homo sapiens
MSHDLTKYRKKKNPELGFIGSNIVQDNRDKAKMRKFCTV

SEQ ID NO: 8181 - DNA, 4669 bp, Homo sapiens
atttaggggtgttgtcctattgcttcagaacagtggggttatcgtgtaacacaccatgtcacatgatttgactaaatacaggaaaaaaaaaaaccctgaacttggtttcattggctcaaatatagttcaagacaacagagacaaagctaagatgaggaagttctgtacagtttaggaaatagaggctttcaaagataattcgcagtgatgtgaaactggcctcccaagccctgataagtaagttaaataagagtaggagccaggagggaggttctttactcttgaattaagagaaggggagctggaggtggctcaggtagagtgcgtaggtttgcagaactgggcctgtgtgtgtaaagtgactaaggcaaaggagtggaagtttgagagaagtttaagagaagaaatggacatgattgcctaaatcagccaaacacaggcaacatggccaacgccctggccagcgccacttgcgagcgctgcaagggcggctttgcgcccgctgagaagatcgtgaacagtaatggggagctgtaccatgagcagtgtttcgtgtgcgctcagtgcttccagcagttcccagaaggactcttctatgagtttgaaggaagaaagtactgtgaacatgactttcagatgctctttgccccttgctgtcatcagtgtggtgaattcatcattggccgagttatcaaagccatgaataacagctggcatccggagtgcttccgctgtgacctctgccaggaagttctggcagatatcgggtttgtcaagaatgctgggagacacctgtgtcgcccctgtcataatcgtgagaaagccagaggccttgggaaatacatctgccagaaatgccatgctatcatcgatgagcagcctctgatattcaagaacgacccctaccatccagaccatttcaactgcgccaactgcgggaaggagctgactgccgatgcacgggagctgaaaggggagctatactgcctcccatgccatgataaaatgggggtccccatctgtggtgcttgccgacggcccatcgaagggcgcgtggtgaacgctatgggcaagcagtggcatgtggagcattttgtttgtgccaagtgtgagaaaccctttcttggacatcgccattatgagaggaaaggcctggcatattgtgaaactcactataaccagctatttggtgatgtttgcttccactgcaatcgtgttatagaaggtgatgtggtctctgctcttaataaggcctggtgcgtgaactgctttgcctgttctacctgcaacactaaattaacactcaagaataagtttgtggagtttgacatgaagccagtctgtaagaagtgctatgagaaatttccattggagctgaagaaaagacttaagaaactagctgagaccttaggaaggaaataagttcctttattttttcttttctatgcaagataagagattaccaacattacttgtcttgatctacccatatttaaagctatatctcaaagcagttgagagaagaggacctatatgaatggttttatgtcatttttttaattaaaaaagaaaaattcatataatcgtgtttaaaacacaaatgaagtcagtatttgcctttgttaacccttatccatttgttgacatgtagactgtttacaaaaaaaaaacacatggttaaatgttaaattttaattaaggcccccaaaaattaaatataactttttaaaatgaaaggagtcaccttttacatgactcaggtgaaaaaacagtataaacattaatttactttgtgttcaaaagaaaattccaactgctgttggggaaggacacagaaaagaaaaataaccacccaagaaaaacaaaaacaagaaaaacaaatcttatacaatcttagtatatttatcaaactagtagctagaaagtgaatatgcacattactaagacaaaaaacaagtgtaattcagaactacttgattttttttagttaaatgcaataattattatgcttagttttataacctgctctccttgtgaattcttccttcaaatgattacttaacgcagtagtaatagctagctgtaggatgtcctttaaatttttgtgcaaaaaaaaatttataccaggtatttggaaatatactttacaatattggaaaatgaagtatttttaatgtattacagcaattatgtttctaagcttaatgttaagcatgtagtcttagaataggacatgaaattaaattgtatgtagcttggaatatattgcttcagaaaactgaatgtgtatgtcggtcatattgcctttataaccatgctaatatctatgctttatacatactcaaacttgccttgccttaaaaacatacatactacatacttaaatcaggaattctagccatctcacagaataccaactaaaactaagtgcattgagatctgagattggtaaacccagattcatttaccacagctgtaattaagtttttagaaactattctctttttggggaaatccattgaagttaatttctgttatcttattagaagaaaatgatgttgatatgtgtttcagattttccatttgaaatcttataattaatttgatttatttactgtaagtaggaggtataaatgacactcttaaattggaaggaggggtgttttagtgtctgttttaggtcaaaattagtgattctatttttatcaaaagttttatcctgaagtttcaggaccactcttccttaataaacttgttaatggaaagcgagctttatgaacatttaaaaatgttgctgctgctttgttgcttaaaaagaaagttgccaagagagacttcttagggaaaatatttgggttttttttccaaaaattgctgaaatattgttttgccatttttaaaaagtctcaggttattaccactctgccattaaatatttgtatgcctgcatttttaaaaattctgtgcatgtactttatggagtacattctatttttgttttcagataccctacaaccaattttttttagtaatcttttagaattgaaattatcataaatgatcgagaataatcatcacatagtttaagattgtatatgttgagtagtttaaaacaatctttgcattttacagtaagaatcaaagtcccttcagtgtgcctttgtcagctaatatgtgaccagcaatgacaaccttgggagtatttattaaatattatgctatgaatataggcaacacagaacagggtttgcagtatagcgtcttgatgctaaattctcatatacctctacacgagaaatatggaggagaaaaacaagcatttacatatattcttcgtcactttgaagatgcatggcctgaactcgactgcttgtgtttgtttacatatcaggcatacccaggcatctcctgcagccagaggttccattgctgtctttgctcagtcctcttttaaaatatgaattagtggacaggcacggtgcctcacacctgtaatcccagcactttgggaggtcgaggcaggtggatcacgaggtcaggagatcaagaccatcctggctaccactgaaaccccatctctactacaaaaaaattagccgggcgtggtggcgggcacctgcagtcccagctactcgggaggctgaggcaggagaatggtgggaacccgggaggcagagcttgcagtgagccaagatcacgccactgcactccagcctgggcaacagagcaagactctgtctcaaaaaaaataaataaataaattatgaatgagtattttctagaaattcaacttgctaagcctgtaatacttaagggtagtttatctagatacagtactttcttccctgataagtagtatcattggagcccttaggtataggagaagaggaagaagtttaaaaagtgtaagtgggccgggcgtggtggctcatgcctgtaatcccagcactttgggaggccgaggggggcggatcacgaggtcaggagatccagactatcctggctaacaaggtgaaaccccgtctctactaaaaatacaaaaaaaaacattagccaggcgtggtggcgggcgcttgtagtcccagctactcgggaggctgaggtaggagaatggcttgaacccaggaggcggagcttgcagtgagccgagattgcaccactgcactccagcctgggcgacagagcaagactccgtctcaaaaaaaaaaaaaaagtgtaagtggattaaaagagaaacttggtctagttcataatatttttaatagggctttccctggctgctggaaaacttaggccagtaagcatctctttgtttaaagtcctacaagacaatttgaaataattcattgttcatgccaaaattctaagtactgtttttcttagcaagtgtaacataatcaggaacaatgggtacaagtaaaacattctttggatgatattcaaagccttattagcactgcacctgaataataggtcattttgcctcactcatttgccaaagtagccatttctaagttaaggaagtttttagataggctcatagccttgtatttcgttttagattgtaagctcaatggcagggatactatattggtaattatgttttcatatagcaaccaccacagtatattcttggtgcttaataaatgtttataattgttaacaataa

SEQ ID NO: 8182 - protein, 325 aa, Homo sapiens; identical to SEQ ID NO: 596

SEQ ID NO: 8183 - DNA, 1283 bp, Homo sapiens
ggctcaaatatagttcaagacaacagagacaaagctaagatgaggaagttctgtacagtttaggaaatagaggctttcaaagataattcgcagtgatgtgaaactggcctcccaagccctgataacaacatggccaacgccctggccagcgccacttgcgagcgctgcaagggcggctttgcgcccgctgagaagatcgtgaacagtaatggggagctgtaccatgagcagtgtttcgtgtgcgctcagtgcttccagcagttcccagaaggactcttctatgagtttgaaggaagaaagtactgtgaacatgactttcagatgctctttgccccttgctgtcatcagtgtggtgaattcatcattggccgagttatcaaagccatgaataacagctggcatccggagtgcttccgctgtgacctctgccaggaagttctggcagatatcgggtttgtcaagaatgctgggagacacctgtgtcgcccctgtcataatcgtgagaaagccagaggccttgggaaatacatctgccagaaatgccatgctatcatcgatgagcagcctctgatattcaagaacgacccctaccatccagaccatttcaactgcgccaactgcgggaaggagctgactgccgatgcacgggagctgaaaggggagctatactgcctcccatgccatgataaaatgggggtccccatctgtggtgcttgccgacggcccatcgaagggcgcgtggtgaacgctatgggcaagcagtggcatgtggagcattttgtttgtgccaagtgtgagaaaccctttcttggacatcgccattatgagaggaaaggcctggcatattgtgaaactcactataaccagctatttggtgatgtttgcttccactgcaatcgtgttatagaaggtgatgtggtctctgctcttaataaggcctggtgcgtgaactgctttgcctgttctacctgcaacactaaattaacactcaagaataagtttgtggagtttgacatgaagccagtctgtaagaagtgctatgagaaatttccattggagctgaagaaaagacttaagaaactagctgagaccttaggaaggaaataagttcctttattttttcttttctatgcaagataagagattaccaacattacttgtcttgatctacccatatttaaagctatatctcaaagcagttgagagaagaggacctatatgaatggttttatgtcatttttttaattaaaaaagaaaaattcatataatcgtgtttaaaacac

SEQ ID NO: 8184 - protein, 325 aa, Homo sapiens; identical to SEQ ID NO: 596

SEQ ID NO: 8185 - DNA, 4354 bp, Homo sapiens
ggctcaaatatagttcaagacaacagagacaaagctaagatgaggaagttctgtacagtttaggaaatagaggctttcaaagataattcgcagtgatgtgaaactggcctcccaagccctgataacaacatggccaacgccctggccagcgccacttgcgagcgctgcaagggcggctttgcgcccgctgagaagatcgtgaacagtaatggggagctgtaccatgagcagtgtttcgtgtgcgctcagtgcttccagcagttcccagaaggactcttctatgagtttgaaggaagaaagtactgtgaacatgactttcagatgctctttgccccttgctgtcatcagtgtggtgaattcatcattggccgagttatcaaagccatgaataacagctggcatccggagtgcttccgctgtgacctctgccaggaagttctggcagatatcgggtttgtcaagaatgctgggagacacctgtgtcgcccctgtcataatcgtgagaaagccagaggccttgggaaatacatctgccagaaatgccatgctatcatcgatgagcagcctctgatattcaagaacgacccctaccatccagaccatttcaactgcgccaactgcgggaaggagctgactgccgatgcacgggagctgaaaggggagctatactgcctcccatgccatgataaaatgggggtccccatctgtggtgcttgccgacggcccatcgaagggcgcgtggtgaacgctatgggcaagcagtggcatgtggagcattttgtttgtgccaagtgtgagaaaccctttcttggacatcgccattatgagaggaaaggcctggcatattgtgaaactcactataaccagctatttggtgatgtttgcttccactgcaatcgtgttatagaaggtgatgtggtctctgctcttaataaggcctggtgcgtgaactgctttgcctgttctacctgcaacactaaattaacactcaagaataagtttgtggagtttgacatgaagccagtctgtaagaagtgctatgagaaatttccattggagctgaagaaaagacttaagaaactagctgagaccttaggaaggaaataagttcctttattttttcttttctatgcaagataagagattaccaacattacttgtcttgatctacccatatttaaagctatatctcaaagcagttgagagaagaggacctatatgaatggttttatgtcatttttttaattaaaaaagaaaaattcatataatcgtgtttaaaacacaaatgaagtcagtatttgcctttgttaacccttatccatttgttgacatgtagactgtttacaaaaaaaaaacacatggttaaatgttaaattttaattaaggcccccaaaaattaaatataactttttaaaatgaaaggagtcaccttttacatgactcaggtgaaaaaacagtataaacattaatttactttgtgttcaaaagaaaattccaactgctgttggggaaggacacagaaaagaaaaataaccacccaagaaaaacaaaaacaagaaaaacaaatcttatacaatcttagtatatttatcaaactagtagctagaaagtgaatatgcacattactaagacaaaaaacaagtgtaattcagaactacttgattttttttagttaaatgcaataattattatgcttagttttataacctgctctccttgtgaattcttccttcaaatgattacttaacgcagtagtaatagctagctgtaggatgtcctttaaatttttgtgcaaaaaaaaatttataccaggtatttggaaatatactttacaatattggaaaatgaagtatttttaatgtattacagcaattatgtttctaagcttaatgttaagcatgtagtcttagaataggacatgaaattaaattgtatgtagcttggaatatattgcttcagaaaactgaatgtgtatgtcggtcatattgcctttataaccatgctaatatctatgctttatacatactcaaacttgccttgccttaaaaacatacatactacatacttaaatcaggaattctagccatctcacagaataccaactaaaactaagtgcattgagatctgagattggtaaacccagattcatttaccacagctgtaattaagtttttagaaactattctctttttggggaaatccattgaagttaatttctgttatcttattagaagaaaatgatgttgatatgtgtttcagattttccatttgaaatcttataattaatttgatttatttactgtaagtaggaggtataaatgacactcttaaattggaaggaggggtgttttagtgtctgttttaggtcaaaattagtgattctatttttatcaaaagttttatcctgaagtttcaggaccactcttccttaataaacttgttaatggaaagcgagctttatgaacatttaaaaatgttgctgctgctttgttgcttaaaaagaaagttgccaagagagacttcttagggaaaatatttgggttttttttccaaaaattgctgaaatattgttttgccatttttaaaaagtctcaggttattaccactctgccattaaatatttgtatgcctgcatttttaaaaattctgtgcatgtactttatggagtacattctatttttgttttcagataccctacaaccaattttttttagtaatcttttagaattgaaattatcataaatgatcgagaataatcatcacatagtttaagattgtatatgttgagtagtttaaaacaatctttgcattttacagtaagaatcaaagtcccttcagtgtgcctttgtcagctaatatgtgaccagcaatgacaaccttgggagtatttattaaatattatgctatgaatataggcaacacagaacagggtttgcagtatagcgtcttgatgctaaattctcatatacctctacacgagaaatatggaggagaaaaacaagcatttacatatattcttcgtcactttgaagatgcatggcctgaactcgactgcttgtgtttgtttacatatcaggcatacccaggcatctcctgcagccagaggttccattgctgtctttgctcagtcctcttttaaaatatgaattagtggacaggcacggtgcctcacacctgtaatcccagcactttgggaggtcgaggcaggtggatcacgaggtcaggagatcaagaccatcctggctaccactgaaaccccatctctactacaaaaaaattagccgggcgtggtggcgggcacctgcagtcccagctactcgggaggctgaggcaggagaatggtgggaacccgggaggcagagcttgcagtgagccaagatcacgccactgcactccagcctgggcaacagagcaagactctgtctcaaaaaaaataaataaataaattatgaatgagtattttctagaaattcaacttgctaagcctgtaatacttaagggtagtttatctagatacagtactttcttccctgataagtagtatcattggagcccttaggtataggagaagaggaagaagtttaaaaagtgtaagtgggccgggcgtggtggctcatgcctgtaatcccagcactttgggaggccgaggggggcggatcacgaggtcaggagatccagactatcctggctaacaaggtgaaaccccgtctctactaaaaatacaaaaaaaaacattagccaggcgtggtggcgggcgcttgtagtcccagctactcgggaggctgaggtaggagaatggcttgaacccaggaggcggagcttgcagtgagccgagattgcaccactgcactccagcctgggcgacagagcaagactccgtctcaaaaaaaaaaaaaaagtgtaagtggattaaaagagaaacttggtctagttcataatatttttaatagggctttccctggctgctggaaaacttaggccagtaagcatctctttgtttaaagtcctacaagacaatttgaaataattcattgttcatgccaaaattctaagtactgtttttcttagcaagtgtaacataatcaggaacaatgggtacaagtaaaacattctttggatgatattcaaagccttattagcactgcacctgaataataggtcattttgcctcactcatttgccaaagtagccatttctaagttaaggaagtttttagataggctcatagccttgtatttcgttttagattgtaagctcaatggcagggatactatattggtaattatgttttcatatagcaaccaccacagtatattcttggtgcttaataaatgtttataattgttaacaataa

SEQ ID NO: 8186 - protein, 325 aa, Homo sapiens; identical to SEQ ID NO: 596

SEQ ID NO: 8187 - DNA, 660 bp, Homo sapiens
gaggaagttctgtacagtttaggaaatagaggctttcaaagataattcgcagtgatgtgaaactggcctcccaagccctgataacaacatggccaacgccctggccagcgccacttgcgagcgctgcaagggcggctttgcgcccgctgagaagatcgtgaacagtaatggggagctgtaccatgagcagtgtttcgtgtgcgctcagtgcttccagcagttcccagaaggactcttctatgagggacctgaggacctacttctacctcggcaccatggaggcctgcggggactatggcaaggaaggaggtgagactcccaaggcacattgaagggaattctggaaagctggcttggagagagcatggtcttctcactatatgaatcccttctgtatccctcccttcttttttttctctcctgtagtccagagaggttgaaatgtctgataacatagcaggtttgcgacatgaaagagatgagagcctagctggtctcctagtatctaatacaatattctttcccttacatattctttttaaatataagatatttttattgaaatgggcaattatgacaaaggccttaggagagctcggtccaggggagcaatagagaagaactcagagaaaaagacaggctttgtttttccagacattt

SEQ ID NO: 8188 - protein, 74 aa, Homo sapiens
MANALASATCERCKGGFAPAEKIVNSNGELYHEQCFVCAQCFQQFPEGLFYEGPEDLLLPRHHGGLRGLWQGRR

SEQ ID NO: 8189 - DNA, 816 bp, Homo sapiens
aggaagttctgtacagtttaggaaatagaggctttcaaagataattcgcagtgatgtgaaactggcctcccaagccctgataacaacatggccaacgccctggccagcgccacttgcgagcgctgcaagggcggctttgcgcccgctgagaagatcgtgaacagtaatggggagctgtaccatgagcagtgtttcgtgtgcgctcagtgcttccagcagttcccagaaggactcttctatgaggaacgaacatgatggttaagctaccttcattaagcagcatgaccgcttcctgagctcctgctgccgcatttaggccctgtcagctgtgaggccactggtgctgagtcagagggaaaagctcagaacagccttgagcagtgaagaataaagtgtgactcatctcgtcctgcccacccctcacactggactataaataccctccctgggtctgtgtgctgttattccaaaagatgcgatgaatacccagaactaggctattcatgggctgttgcccagttcaagatctgttgggtcctgaggaagattactattttggctaaattgtttatcattaaaaccagcccagggatgtgtaaacctgcatctggagaataagacatttctttttggttaaatgatattagagaaaaaaactatccaagactgctaacaaataatcttcactttcagttatatccagcaataagttgttttccagaaaagaaagcttggaaacttacccagtttgccttccatttgggacatgactgatgtgcttcagtctttgtataataaatgcatcttcgccactct

SEQ ID NO: 8190 - protein, 55 aa, Homo sapiens
MANALASATCERCKGGFAPAEKIVNSNGELYHEQCFVCAQCFQQFPEGLFYEERT

SEQ ID NO: 8191 - DNA, 4324 bp, Homo sapiens
gaggacacagtgagagggtgccatctatgagcatggagagcttagcttggacagccagctgatgagggacacatcgaatcaagatacatgacatgcaacatggccaacgccctggccagcgccacttgcgagcgctgcaagggcggctttgcgcccgctgagaagatcgtgaacagtaatggggagctgtaccatgagcagtgtttcgtgtgcgctcagtgcttccagcagttcccagaaggactcttctatgagtttgaaggaagaaagtactgtgaacatgactttcagatgctctttgccccttgctgtcatcagtgtggtgaattcatcattggccgagttatcaaagccatgaataacagctggcatccggagtgcttccgctgtgacctctgccaggaagttctggcagatatcgggtttgtcaagaatgctgggagacacctgtgtcgcccctgtcataatcgtgagaaagccagaggccttgggaaatacatctgccagaaatgccatgctatcatcgatgagcagcctctgatattcaagaacgacccctaccatccagaccatttcaactgcgccaactgcgggaaggagctgactgccgatgcacgggagctgaaaggggagctatactgcctcccatgccatgataaaatgggggtccccatctgtggtgcttgccgacggcccatcgaagggcgcgtggtgaacgctatgggcaagcagtggcatgtggagcattttgtttgtgccaagtgtgagaaaccctttcttggacatcgccattatgagaggaaaggcctggcatattgtgaaactcactataaccagctatttggtgatgtttgcttccactgcaatcgtgttatagaaggtgatgtggtctctgctcttaataaggcctggtgcgtgaactgctttgcctgttctacctgcaacactaaattaacactcaagaataagtttgtggagtttgacatgaagccagtctgtaagaagtgctatgagaaatttccattggagctgaagaaaagacttaagaaactagctgagaccttaggaaggaaataagttcctttattttttcttttctatgcaagataagagattaccaacattacttgtcttgatctacccatatttaaagctatatctcaaagcagttgagagaagaggacctatatgaatggttttatgtcatttttttaattaaaaaagaaaaattcatataatcgtgtttaaaacacaaatgaagtcagtatttgcctttgttaacccttatccatttgttgacatgtagactgtttacaaaaaaaaaacacatggttaaatgttaaattttaattaaggcccccaaaaattaaatataactttttaaaatgaaaggagtcaccttttacatgactcaggtgaaaaaacagtataaacattaatttactttgtgttcaaaagaaaattccaactgctgttggggaaggacacagaaaagaaaaataaccacccaagaaaaacaaaaacaagaaaaacaaatcttatacaatcttagtatatttatcaaactagtagctagaaagtgaatatgcacattactaagacaaaaaacaagtgtaattcagaactacttgattttttttagttaaatgcaataattattatgcttagttttataacctgctctccttgtgaattcttccttcaaatgattacttaacgcagtagtaatagctagctgtaggatgtcctttaaatttttgtgcaaaaaaaaatttataccaggtatttggaaatatactttacaatattggaaaatgaagtatttttaatgtattacagcaattatgtttctaagcttaatgttaagcatgtagtcttagaataggacatgaaattaaattgtatgtagcttggaatatattgcttcagaaaactgaatgtgtatgtcggtcatattgcctttataaccatgctaatatctatgctttatacatactcaaacttgccttgccttaaaaacatacatactacatacttaaatcaggaattctagccatctcacagaataccaactaaaactaagtgcattgagatctgagattggtaaacccagattcatttaccacagctgtaattaagtttttagaaactattctctttttggggaaatccattgaagttaatttctgttatcttattagaagaaaatgatgttgatatgtgtttcagattttccatttgaaatcttataattaatttgatttatttactgtaagtaggaggtataaatgacactcttaaattggaaggaggggtgttttagtgtctgttttaggtcaaaattagtgattctatttttatcaaaagttttatcctgaagtttcaggaccactcttccttaataaacttgttaatggaaagcgagctttatgaacatttaaaaatgttgctgctgctttgttgcttaaaaagaaagttgccaagagagacttcttagggaaaatatttgggttttttttccaaaaattgctgaaatattgttttgccatttttaaaaagtctcaggttattaccactctgccattaaatatttgtatgcctgcatttttaaaaattctgtgcatgtactttatggagtacattctatttttgttttcagataccctacaaccaattttttttagtaatcttttagaattgaaattatcataaatgatcgagaataatcatcacatagtttaagattgtatatgttgagtagtttaaaacaatctttgcattttacagtaagaatcaaagtcccttcagtgtgcctttgtcagctaatatgtgaccagcaatgacaaccttgggagtatttattaaatattatgctatgaatataggcaacacagaacagggtttgcagtatagcgtcttgatgctaaattctcatatacctctacacgagaaatatggaggagaaaaacaagcatttacatatattcttcgtcactttgaagatgcatggcctgaactcgactgcttgtgtttgtttacatatcaggcatacccaggcatctcctgcagccagaggttccattgctgtctttgctcagtcctcttttaaaatatgaattagtggacaggcacggtgcctcacacctgtaatcccagcactttgggaggtcgaggcaggtggatcacgaggtcaggagatcaagaccatcctggctaccactgaaaccccatctctactacaaaaaaattagccgggcgtggtggcgggcacctgcagtcccagctactcgggaggctgaggcaggagaatggtgggaacccgggaggcagagcttgcagtgagccaagatcacgccactgcactccagcctgggcaacagagcaagactctgtctcaaaaaaaataaataaataaattatgaatgagtattttctagaaattcaacttgctaagcctgtaatacttaagggtagtttatctagatacagtactttcttccctgataagtagtatcattggagcccttaggtataggagaagaggaagaagtttaaaaagtgtaagtgggccgggcgtggtggctcatgcctgtaatcccagcactttgggaggccgaggggggcggatcacgaggtcaggagatccagactatcctggctaacaaggtgaaaccccgtctctactaaaaatacaaaaaaaaacattagccaggcgtggtggcgggcgcttgtagtcccagctactcgggaggctgaggtaggagaatggcttgaacccaggaggcggagcttgcagtgagccgagattgcaccactgcactccagcctgggcgacagagcaagactccgtctcaaaaaaaaaaaaaaagtgtaagtggattaaaagagaaacttggtctagttcataatatttttaatagggctttccctggctgctggaaaacttaggccagtaagcatctctttgtttaaagtcctacaagacaatttgaaataattcattgttcatgccaaaattctaagtactgtttttcttagcaagtgtaacataatcaggaacaatgggtacaagtaaaacattctttggatgatattcaaagccttattagcactgcacctgaataataggtcattttgcctcactcatttgccaaagtagccatttctaagttaaggaagtttttagataggctcatagccttgtatttcgttttagattgtaagctcaatggcagggatactatattggtaattatgttttcatatagcaaccaccacagtatattcttggtgcttaataaatgtttataattgttaacaataa

SEQ ID NO: 8192 - protein, 329 aa, Homo sapiens
MTCNMANALASATCERCKGGFAPAEKIVNSNGELYHEQCFVCAQCFQQFPEGLFYEFEGRKYCEHDFQMLFAPCCHQCGEFIIGRVIKAMNNSWHPECFRCDLCQEVLADIGFVKNAGRHLCRPCHNREKARGLGKYICQKCHAIIDEQPLIFKNDPYHPDHFNCANCGKELTADARELKGELYCLPCHDKMGVPICGACRRPIEGRVVNAMGKQWHVEHFVCAKCEKPFLGHRHYERKGLAYCETHYNQLFGDVCFHCNRVIEGDVVSALNKAWCVNCFACSTCNTKLTLKNKFVEFDMKPVCKKCYEKFPLELKKRLKKLAETLGRK

SEQ ID NO: 8193 - DNA, 4425 bp, Homo sapiens
cctcggcaagggacgctgctttcccctggcagccacactgctgagcataaatgctttaaagtgtcagcaattgatgtgtggagagaagtatgactgcattacagcttaaagagctttcacattcaggtctctacaggagaagacgagatcgccccgatagtttgagagtaaatgggttaccagaggaagagctaagcaacatggccaacgccctggccagcgccacttgcgagcgctgcaagggcggctttgcgcccgctgagaagatcgtgaacagtaatggggagctgtaccatgagcagtgtttcgtgtgcgctcagtgcttccagcagttcccagaaggactcttctatgagtttgaaggaagaaagtactgtgaacatgactttcagatgctctttgccccttgctgtcatcagtgtggtgaattcatcattggccgagttatcaaagccatgaataacagctggcatccggagtgcttccgctgtgacctctgccaggaagttctggcagatatcgggtttgtcaagaatgctgggagacacctgtgtcgcccctgtcataatcgtgagaaagccagaggccttgggaaatacatctgccagaaatgccatgctatcatcgatgagcagcctctgatattcaagaacgacccctaccatccagaccatttcaactgcgccaactgcgggaaggagctgactgccgatgcacgggagctgaaaggggagctatactgcctcccatgccatgataaaatgggggtccccatctgtggtgcttgccgacggcccatcgaagggcgcgtggtgaacgctatgggcaagcagtggcatgtggagcattttgtttgtgccaagtgtgagaaaccctttcttggacatcgccattatgagaggaaaggcctggcatattgtgaaactcactataaccagctatttggtgatgtttgcttccactgcaatcgtgttatagaaggtgatgtggtctctgctcttaataaggcctggtgcgtgaactgctttgcctgttctacctgcaacactaaattaacactcaagaataagtttgtggagtttgacatgaagccagtctgtaagaagtgctatgagaaatttccattggagctgaagaaaagacttaagaaactagctgagaccttaggaaggaaataagttcctttattttttcttttctatgcaagataagagattaccaacattacttgtcttgatctacccatatttaaagctatatctcaaagcagttgagagaagaggacctatatgaatggttttatgtcatttttttaattaaaaaagaaaaattcatataatcgtgtttaaaacacaaatgaagtcagtatttgcctttgttaacccttatccatttgttgacatgtagactgtttacaaaaaaaaaacacatggttaaatgttaaattttaattaaggcccccaaaaattaaatataactttttaaaatgaaaggagtcaccttttacatgactcaggtgaaaaaacagtataaacattaatttactttgtgttcaaaagaaaattccaactgctgttggggaaggacacagaaaagaaaaataaccacccaagaaaaacaaaaacaagaaaaacaaatcttatacaatcttagtatatttatcaaactagtagctagaaagtgaatatgcacattactaagacaaaaaacaagtgtaattcagaactacttgattttttttagttaaatgcaataattattatgcttagttttataacctgctctccttgtgaattcttccttcaaatgattacttaacgcagtagtaatagctagctgtaggatgtcctttaaatttttgtgcaaaaaaaaatttataccaggtatttggaaatatactttacaatattggaaaatgaagtatttttaatgtattacagcaattatgtttctaagcttaatgttaagcatgtagtcttagaataggacatgaaattaaattgtatgtagcttggaatatattgcttcagaaaactgaatgtgtatgtcggtcatattgcctttataaccatgctaatatctatgctttatacatactcaaacttgccttgccttaaaaacatacatactacatacttaaatcaggaattctagccatctcacagaataccaactaaaactaagtgcattgagatctgagattggtaaacccagattcatttaccacagctgtaattaagtttttagaaactattctctttttggggaaatccattgaagttaatttctgttatcttattagaagaaaatgatgttgatatgtgtttcagattttccatttgaaatcttataattaatttgatttatttactgtaagtaggaggtataaatgacactcttaaattggaaggaggggtgttttagtgtctgttttaggtcaaaattagtgattctatttttatcaaaagttttatcctgaagtttcaggaccactcttccttaataaacttgttaatggaaagcgagctttatgaacatttaaaaatgttgctgctgctttgttgcttaaaaagaaagttgccaagagagacttcttagggaaaatatttgggttttttttccaaaaattgctgaaatattgttttgccatttttaaaaagtctcaggttattaccactctgccattaaatatttgtatgcctgcatttttaaaaattctgtgcatgtactttatggagtacattctatttttgttttcagataccctacaaccaattttttttagtaatcttttagaattgaaattatcataaatgatcgagaataatcatcacatagtttaagattgtatatgttgagtagtttaaaacaatctttgcattttacagtaagaatcaaagtcccttcagtgtgcctttgtcagctaatatgtgaccagcaatgacaaccttgggagtatttattaaatattatgctatgaatataggcaacacagaacagggtttgcagtatagcgtcttgatgctaaattctcatatacctctacacgagaaatatggaggagaaaaacaagcatttacatatattcttcgtcactttgaagatgcatggcctgaactcgactgcttgtgtttgtttacatatcaggcatacccaggcatctcctgcagccagaggttccattgctgtctttgctcagtcctcttttaaaatatgaattagtggacaggcacggtgcctcacacctgtaatcccagcactttgggaggtcgaggcaggtggatcacgaggtcaggagatcaagaccatcctggctaccactgaaaccccatctctactacaaaaaaattagccgggcgtggtggcgggcacctgcagtcccagctactcgggaggctgaggcaggagaatggtgggaacccgggaggcagagcttgcagtgagccaagatcacgccactgcactccagcctgggcaacagagcaagactctgtctcaaaaaaaataaataaataaattatgaatgagtattttctagaaattcaacttgctaagcctgtaatacttaagggtagtttatctagatacagtactttcttccctgataagtagtatcattggagcccttaggtataggagaagaggaagaagtttaaaaagtgtaagtgggccgggcgtggtggctcatgcctgtaatcccagcactttgggaggccgaggggggcggatcacgaggtcaggagatccagactatcctggctaacaaggtgaaaccccgtctctactaaaaatacaaaaaaaaacattagccaggcgtggtggcgggcgcttgtagtcccagctactcgggaggctgaggtaggagaatggcttgaacccaggaggcggagcttgcagtgagccgagattgcaccactgcactccagcctgggcgacagagcaagactccgtctcaaaaaaaaaaaaaaagtgtaagtggattaaaagagaaacttggtctagttcataatatttttaatagggctttccctggctgctggaaaacttaggccagtaagcatctctttgtttaaagtcctacaagacaatttgaaataattcattgttcatgccaaaattctaagtactgtttttcttagcaagtgtaacataatcaggaacaatgggtacaagtaaaacattctttggatgatattcaaagccttattagcactgcacctgaataataggtcattttgcctcactcatttgccaaagtagccatttctaagttaaggaagtttttagataggctcatagccttgtatttcgttttagattgtaagctcaatggcagggatactatattggtaattatgttttcatatagcaaccaccacagtatattcttggtgcttaataaatgtttataattgttaacaataa

SEQ ID NO: 8194 - protein, 362 aa, Homo sapiens
MTALQLKELSHSGLYRRRRDRPDSLRVNGLPEEELSNMANALASATCERCKGGFAPAEKIVNSNGELYHEQCFVCAQCFQQFPEGLFYEFEGRKYCEHDFQMLFAPCCHQCGEFIIGRVIKAMNNSWHPECFRCDLCQEVLADIGFVKNAGRHLCRPCHNREKARGLGKYICQKCHAIIDEQPLIFKNDPYHPDHFNCANCGKELTADARELKGELYCLPCHDKMGVPICGACRRPIEGRVVNAMGKQWHVEHFVCAKCEKPFLGHRHYERKGLAYCETHYNQLFGDVCFHCNRVIEGDVVSALNKAWCVNCFACSTCNTKLTLKNKFVEFDMKPVCKKCYEKFPLELKKRLKKLAETLGRK

SEQ ID NO: 8195 - DNA, 924 bp, Homo sapiens
gcaagggacgctgctttcccctggcagccacactgctgagcataaatgctttaaagtgtcagcaattgatgtgtggagagaagtatgactgcattacagcttaaagagctttcacattcaggtctctacaggagaagacgagatcgccccgatagtttgagagtaaatgggttaccagaggaagagctaagcaacatggccaacgccctggccagcgccacttgcgagcgctgcaagggcggctttgcgcccgctgagaagatcgtgaacagtaatggggagctgtaccatgagcagtgtttcgtgtgcgctcagtgcttccagcagttcccagaaggactcttctatgaggaacgaacatgatggttaagctaccttcattaagcagcatgaccgcttcctgagctcctgctgccgcatttaggccctgtcagctgtgaggccactggtgctgagtcagagggaaaagctcagaacagccttgagcagtgaagaataaagtgtgactcatctcgtcctgcccacccctcacactggactataaataccctccctgggtctgtgtgctgttattccaaaagatgcgatgaatacccagaactaggctattcatgggctgttgcccagttcaagatctgttgggtcctgaggaagattactattttggctaaattgtttatcattaaaaccagcccagggatgtgtaaacctgcatctggagaataagacatttctttttggttaaatgatattagagaaaaaaactatccaagactgctaacaaataatcttcactttcagttatatccagcaataagttgttttccagaaaagaaagcttggaaacttacccagtttgccttccatttgggacatgactgatgtgcttcagtctttgtataataaatgcatcttcgccactct

SEQ ID NO: 8196 - protein, 92 aa, Homo sapiens
MTALQLKELSHSGLYRRRRDRPDSLRVNGLPEEELSNMANALASATCERCKGGFAPAEKIVNSNGELYHEQCFVCAQCFQQFPEGLFYEERT

SEQ ID NO: 8197 - DNA, 4708 bp, Homo sapiens
gtttatagcatagtccactgggactgccgctctgacaaagactgtgtcactactttgtggaatgttattttagaacttccagaatgcctcagtaaatcctgactgccatgtaactgtgtactgtgctgctgagctcttaacatgaagcagcagtagtgaccctggcgggccaggctgacgtgcgtgggaacagtgggagtgaccctggctgggaagcagggaggcctggatattgtttctcctggctctgtgtcctgccattctcgtccctgtgctcagagctctcaagcacccacgatggccttctcaggccgagcgcgcccctgcattatcccagagaacgaagaaatcccccgagcagcccttaacactgtccacgaggccaatgggaccgaggacgagagggctgtttccaaactgcagcgcaggcacagtgacgtgaaagtctacaaggagttctgtgacttttatgcgaaattcaacatggccaacgccctggccagcgccacttgcgagcgctgcaagggcggctttgcgcccgctgagaagatcgtgaacagtaatggggagctgtaccatgagcagtgtttcgtgtgcgctcagtgcttccagcagttcccagaaggactcttctatgagtttgaaggaagaaagtactgtgaacatgactttcagatgctctttgccccttgctgtcatcagtgtggtgaattcatcattggccgagttatcaaagccatgaataacagctggcatccggagtgcttccgctgtgacctctgccaggaagttctggcagatatcgggtttgtcaagaatgctgggagacacctgtgtcgcccctgtcataatcgtgagaaagccagaggccttgggaaatacatctgccagaaatgccatgctatcatcgatgagcagcctctgatattcaagaacgacccctaccatccagaccatttcaactgcgccaactgcgggaaggagctgactgccgatgcacgggagctgaaaggggagctatactgcctcccatgccatgataaaatgggggtccccatctgtggtgcttgccgacggcccatcgaagggcgcgtggtgaacgctatgggcaagcagtggcatgtggagcattttgtttgtgccaagtgtgagaaaccctttcttggacatcgccattatgagaggaaaggcctggcatattgtgaaactcactataaccagctatttggtgatgtttgcttccactgcaatcgtgttatagaaggtgatgtggtctctgctcttaataaggcctggtgcgtgaactgctttgcctgttctacctgcaacactaaattaacactcaagaataagtttgtggagtttgacatgaagccagtctgtaagaagtgctatgagaaatttccattggagctgaagaaaagacttaagaaactagctgagaccttaggaaggaaataagttcctttattttttcttttctatgcaagataagagattaccaacattacttgtcttgatctacccatatttaaagctatatctcaaagcagttgagagaagaggacctatatgaatggttttatgtcatttttttaattaaaaaagaaaaattcatataatcgtgtttaaaacacaaatgaagtcagtatttgcctttgttaacccttatccatttgttgacatgtagactgtttacaaaaaaaaaacacatggttaaatgttaaattttaattaaggcccccaaaaattaaatataactttttaaaatgaaaggagtcaccttttacatgactcaggtgaaaaaacagtataaacattaatttactttgtgttcaaaagaaaattccaactgctgttggggaaggacacagaaaagaaaaataaccacccaagaaaaacaaaaacaagaaaaacaaatcttatacaatcttagtatatttatcaaactagtagctagaaagtgaatatgcacattactaagacaaaaaacaagtgtaattcagaactacttgattttttttagttaaatgcaataattattatgcttagttttataacctgctctccttgtgaattcttccttcaaatgattacttaacgcagtagtaatagctagctgtaggatgtcctttaaatttttgtgcaaaaaaaaatttataccaggtatttggaaatatactttacaatattggaaaatgaagtatttttaatgtattacagcaattatgtttctaagcttaatgttaagcatgtagtcttagaataggacatgaaattaaattgtatgtagcttggaatatattgcttcagaaaactgaatgtgtatgtcggtcatattgcctttataaccatgctaatatctatgctttatacatactcaaacttgccttgccttaaaaacatacatactacatacttaaatcaggaattctagccatctcacagaataccaactaaaactaagtgcattgagatctgagattggtaaacccagattcatttaccacagctgtaattaagtttttagaaactattctctttttggggaaatccattgaagttaatttctgttatcttattagaagaaaatgatgttgatatgtgtttcagattttccatttgaaatcttataattaatttgatttatttactgtaagtaggaggtataaatgacactcttaaattggaaggaggggtgttttagtgtctgttttaggtcaaaattagtgattctatttttatcaaaagttttatcctgaagtttcaggaccactcttccttaataaacttgttaatggaaagcgagctttatgaacatttaaaaatgttgctgctgctttgttgcttaaaaagaaagttgccaagagagacttcttagggaaaatatttgggttttttttccaaaaattgctgaaatattgttttgccatttttaaaaagtctcaggttattaccactctgccattaaatatttgtatgcctgcatttttaaaaattctgtgcatgtactttatggagtacattctatttttgttttcagataccctacaaccaattttttttagtaatcttttagaattgaaattatcataaatgatcgagaataatcatcacatagtttaagattgtatatgttgagtagtttaaaacaatctttgcattttacagtaagaatcaaagtcccttcagtgtgcctttgtcagctaatatgtgaccagcaatgacaaccttgggagtatttattaaatattatgctatgaatataggcaacacagaacagggtttgcagtatagcgtcttgatgctaaattctcatatacctctacacgagaaatatggaggagaaaaacaagcatttacatatattcttcgtcactttgaagatgcatggcctgaactcgactgcttgtgtttgtttacatatcaggcatacccaggcatctcctgcagccagaggttccattgctgtctttgctcagtcctcttttaaaatatgaattagtggacaggcacggtgcctcacacctgtaatcccagcactttgggaggtcgaggcaggtggatcacgaggtcaggagatcaagaccatcctggctaccactgaaaccccatctctactacaaaaaaattagccgggcgtggtggcgggcacctgcagtcccagctactcgggaggctgaggcaggagaatggtgggaacccgggaggcagagcttgcagtgagccaagatcacgccactgcactccagcctgggcaacagagcaagactctgtctcaaaaaaaataaataaataaattatgaatgagtattttctagaaattcaacttgctaagcctgtaatacttaagggtagtttatctagatacagtactttcttccctgataagtagtatcattggagcccttaggtataggagaagaggaagaagtttaaaaagtgtaagtgggccgggcgtggtggctcatgcctgtaatcccagcactttgggaggccgaggggggcggatcacgaggtcaggagatccagactatcctggctaacaaggtgaaaccccgtctctactaaaaatacaaaaaaaaacattagccaggcgtggtggcgggcgcttgtagtcccagctactcgggaggctgaggtaggagaatggcttgaacccaggaggcggagcttgcagtgagccgagattgcaccactgcactccagcctgggcgacagagcaagactccgtctcaaaaaaaaaaaaaaagtgtaagtggattaaaagagaaacttggtctagttcataatatttttaatagggctttccctggctgctggaaaacttaggccagtaagcatctctttgtttaaagtcctacaagacaatttgaaataattcattgttcatgccaaaattctaagtactgtttttcttagcaagtgtaacataatcaggaacaatgggtacaagtaaaacattctttggatgatattcaaagccttattagcactgcacctgaataataggtcattttgcctcactcatttgccaaagtagccatttctaagttaaggaagtttttagataggctcatagccttgtatttcgttttagattgtaagctcaatggcagggatactatattggtaattatgttttcatatagcaaccaccacagtatattcttggtgcttaataaatgtttataattgttaacaataa

SEQ ID NO: 8198 - protein, 387 aa, Homo sapiens
MAFSGRARPCIIPENEEIPRAALNTVHEANGTEDERAVSKLQRRHSDVKVYKEFCDFYAKFNMANALASATCERCKGGFAPAEKIVNSNGELYHEQCFVCAQCFQQFPEGLFYEFEGRKYCEHDFQMLFAPCCHQCGEFIIGRVIKAMNNSWHPECFRCDLCQEVLADIGFVKNAGRHLCRPCHNREKARGLGKYICQKCHAIIDEQPLIFKNDPYHPDHFNCANCGKELTADARELKGELYCLPCHDKMGVPICGACRRPIEGRVVNAMGKQWHVEHFVCAKCEKPFLGHRHYERKGLAYCETHYNQLFGDVCFHCNRVIEGDVVSALNKAWCVNCFACSTCNTKLTLKNKFVEFDMKPVCKKCYEKFPLELKKRLKKLAETLGRK

SEQ ID NO: 8199 - DNA, 777 bp, Homo sapiens
aaagggaaagttgtcttccagaggtgtggaggggagtgaagcaacaacatggccaacgccctggccagcgccacttgcgagcgctgcaagggcggctttgcgcccgctgagaagatcgtgaacagtaatggggagctgtaccatgagcagtgtttcgtgtgcgctcagtgcttccagcagttcccagaaggactcttctatgaggaacgaacatgatggttaagctaccttcattaagcagcatgaccgcttcctgagctcctgctgccgcatttaggccctgtcagctgtgaggccactggtgctgagtcagagggaaaagctcagaacagccttgagcagtgaagaataaagtgtgactcatctcgtcctgcccacccctcacactggactataaataccctccctgggtctgtgtgctgttattccaaaagatgcgatgaatacccagaactaggctattcatgggctgttgcccagttcaagatctgttgggtcctgaggaagattactattttggctaaattgtttatcattaaaaccagcccagggatgtgtaaacctgcatctggagaataagacatttctttttggttaaatgatattagagaaaaaaactatccaagactgctaacaaataatcttcactttcagttatatccagcaataagttgttttccagaaaagaaagcttggaaacttacccagtttgccttccatttgggacatgactgatgtgcttcagtctttgtataataaatgcatcttcgccactct

SEQ ID NO: 8200 - protein, 55 aa, Homo sapiens; identical to SEQ ID NO: 8190

SEQ ID NO: 8201 - DNA, 651 bp, Homo sapiens
ctgaagtgccacatgcatgccaggtatttgatagctgtgaggtcagaggtggcatctctatggcccatatgggcagtggcatgattgggacaccctcacagaccctgcatttgtattgctcagttcatcgtcctatttcagaacccagagtcccttatgacagagcctttcagacctaagcagctcagctccacatagaaaattctttctgagtcttcagccacactcaggccccccacacacctcacccactcctgtctctgtgtctttcccccttctcagaggaccactggacctgctctaaaggagagcgtgtggtgtacgtcaccccctccacaacttcccagcctcgagccaggagcgtccatgcatttattttctaagggaaaaaaaaataagtattttagggaactatactgtctacatttagctctcctgggtgtctatgttcttttctaaatatttgtttttcttgatcctcgggtgttagcatatggtctgcacttcctttgtagtgtatttggtattttcaacattaccgaaacccctttcttgttgttttttattgttttgttttgtttgagacaaagtctcattgtatagcccaggtgcactccagcctgaaaaaacagggcaagaccgtttctgaaa

SEQ ID NO: 8202 - protein, 39 aa, Homo sapiens
MAHMGSGMIGTPSQTLHLYCSVHRPISEPRVPYDRAFQT

SEQ ID NO: 8203 - DNA, 477 bp, Homo sapiens
aggtgatgtctgcagggagccatgaatcatgctgaaaacaggattgttcaaaactttgccaggaagtctctggcagaagtgtgttagcgagtcttagcaaacacagctgcttcctttctgttccaatcaatcagcccagcctaattaccacagtacaagggtgaggagggaaggaaattgtaattcacagtgatgttatcagccagcaccatgcctgggagatcaccagggcaggagaggtataaaatgctccaggggcaaggttctgagaagatgccctgccactgtatgaggccacaacctgctgtgtataacctcatctaagcacagagaagcaccagactgagcttgggaaatgataaagcaaactgtggacttgaatgaaagacatacaggtattctttgtatattttatagttagcttctgagtctgaaattatttcccaaataaaaagttaaaaacaaatctctactgaa

SEQ ID NO: 8204 - protein, 43 aa, Homo sapiens
MLSASTMPGRSPGQERYKMLQGQGSEKMPCHCMRPQPAVYNLI

SEQ ID NO: 8205 - DNA, 2064 bp, Homo sapiens
ttagaagaaaatgatgttgatatgtgtttcagattttccatttgaaatcttataattaatttgatttatttactgtaagtaggaggtataaatgacactcttaaattggaaggaggggtgttttagtgtctgttttaggtcaaaattagtgattctatttttatcaaaagttttatcctgaagtttcaggaccactcttccttaataaacttgttaatggaaagcgagctttatgaacatttaaaaatgttgctgctgctttgttgcttaaaaagaaagttgccaagagagacttcttagggaaaatatttgggttttttttccaaaaattgctgaaatattgttttgccatttttaaaaagtctcaggttattaccactctgccattaaatatttgtatgcctgcatttttaaaaattctgtgcatgtactttatggagtacattctatttttgttttcagataccctacaaccaattttttttagtaatcttttagaattgaaattatcataaatgatcgagaataatcatcacatagtttaagattgtatatgttgagtagtttaaaacaatctttgcattttacagtaagaatcaaagtcccttcagtgtgcctttgtcagctaatatgtgaccagcaatgacaaccttgggagtatttattaaatattatgctatgaatataggcaacacagaacagggtttgcagtatagcgtcttgatgctaaattctcatatacctctacacgagaaatatggaggagaaaaacaagcatttacatatattcttcgtcactttgaagatgcatggcctgaactcgactgcttgtgtttgtttacatatcaggcatacccaggcatctcctgcagccagaggttccattgctgtctttgctcagtcctcttttaaaatatgaattagtggacaggcacggtgcctcacacctgtaatcccagcactttgggaggtcgaggcaggtggatcacgaggtcaggagatcaagaccatcctggctaccactgaaaccccatctctactacaaaaaaattagccgggcgtggtggcgggcacctgcagtcccagctactcgggaggctgaggcaggagaatggtgggaacccgggaggcagagcttgcagtgagccaagatcacgccactgcactccagcctgggcaacagagcaagactctcctgtaatacttaagggtagtttatctagatacagtactttcttccctgataagtagtatcattggagcccttaggtataggagaagaggaagaagtttaaaaagtgtaagtgggccgggcgtggtggctcatgcctgtaatcccagcactttgggaggccgaggggggcggatcacgaggtcaggagatccagactatcctggctaacaaggtgaaaccccgtctctactaaaaatacaaaaaaaaacattagccaggcgtggtggcgggcgcttgtagtcccagctactcgggaggctgaggtaggagaatggcttgaacccaggaggcggagcttgcagtgagccgagattgcaccactgcactccagcctgggcgacagagcaagactccgtctcaaaaaaaaaaaaaaagtgtaagtggattaaaagagaaacttggtctagttcataatatttttaatagggctttccctggctgctggaaaacttaggccagtaagcatctctttgtttaaagtcctacaagacaatttgaaataattcattgttcatgccaaaattctaagtactgtttttcttagcaagtgtaacataatcaggaacaatgggtacaagtaaaacattctttggatgatattcaaagccttattagcactgcacctgaataataggtcattttgcctcactcatttgccaaagtagccatttctaagttaaggaagtttttagataggctcatagccttgtatttcgttttagattgtaagctcaatggcagggatactatattggtaattatgttttcatatagcaaccaccacagtatattcttggtgcttaataaatgtttataattgttaacaataa

SEQ ID NO: 8206 - protein, 89 aa, Homo sapiens [sequence omitted]

SEQ ID NO: 8207 - DNA, 8192 bp, Homo sapiens
cacagtggtcctccgccggctacggcgctgcgtcactggtttgcaggcgctttcctcttggaagtggcgactgctgcgggcctgagcgctggtctcacgcgcctcgggagccaggttggcggcgcgatgaggcgcagcaaggctgacgtggagcggtacatcgcctcggtgcagggctccaccccgtcgcctcgacagaagtcaatgaaaggattctattttgcaaagctgtattatgaagctaaagaatatgatcttgctaaaaaatacatatgtacttacattaatgtgcaagagagggatcccaaagctcacagatttctgggtcttctttatgaattggaagaaaacacagacaaagccgttgaatgttacaggcgttcagtggaattaaacccaacacaaaaagatcttgtgttgaagattgcagaattgctttgtaaaaatgatgttactgatggaagagcaaaatactggcttgaaagagcagccaaacttttcccaggaagtcctgcaatttataaactaaaggaacagcttctagattgtgaaggtgaagatggatggaataaactttttgacttgattcagtcagaactttatgtaagacctgatgacgtccatgtgaacatccggctagtggaggtgtatcgctcaactaaaagattgaaggatgctgtggcccactgccatgaggcagagaggaacatagctttgcgttcaagtttagaatggaattcgtgtgttgtacagacccttaaggaatatctggagtctttacagtgtttggagtctgataaaagtgactggcgagcaaccaatacagacttactgctggcctatgctaatcttatgcttcttacgctttccactagagatgtgcaggaaagtagagaattactgcaaagttttgatagtgctcttcagtctgtgaaatctttgggtggaaatgatgaactgtcagctactttcttagaaatgaaaggacatttctacatgcatgctggttctctgcttttgaagatgggtcagcatagtagtaatgttcaatggcgagctctttctgagctggctgcattgtgctatctcatagcatttcaggttccaagaccaaagattaaattaataaaaggtgaagctggacaaaatctgctggaaatgatggcctgtgaccgactgagccaatcagggcacatgttgctaaacttaagtcgtggcaagcaagattttttaaaagagattgttgaaacttttgccaacaaaagcgggcagtctgcattatatgatgctctgttttctagtcagtcacctaaggatacatcttttcttggtagcgatgatattggaaacattgatgtacgagaaccagagcttgaagatttgactagatacgatgttggtgctattcgagcacataatggtagtcttcagcaccttacttggcttggcttacagtggaattcattgcctgctttacctggaatccgaaaatggctaaaacagcttttccatcatttgccccatgaaacctcaaggcttgaaacaaatgcacctgaatcaatatgtattttagatcttgaagtatttctccttggagtagtatataccagccacttacaattaaaggagaaatgtaattctcaccacagctcctatcagccgttatgcctgccccttcctgtgtgtaaacagctttgtacagaaagacaaaaatcttggtgggatgcggtttgtactctgattcacagaaaagcagtacctggaaacgtagcaaaattgagacttctagttcagcatgaaataaacactctaagagcccaggaaaaacatggccttcaacctgctctgcttgtacattgggcagaatgccttcagaaaacgggcagcggtcttaattctttttatgatcaacgagaatacatagggagaagtgttcattattggaagaaagttttgccattgttgaagataataaaaaagaagaacagtattcctgaacctattgatcctctgtttaaacattttcatagtgtagacattcaggcatcagaaattgttgaatatgaagaagacgcacacataacttttgctatattggatgcagtaaatggaaatatagaagatgctgtgactgcttttgaatctataaaaagtgttgtttcttattggaatcttgcactgatttttcacaggaaggcagaagacattgaaaatgatgccctttctcctgaagaacaagaagaatgcaaaaattatctgagaaagaccagggactacctaataaagattatagatgacagtgattcaaatctttcagtggtcaagaaattgcctgtgcccctggagtctgtaaaagagatgcttaattcagtcatgcaggaactcgaagactatagtgaaggaggtcctctctataaaaatggttctttgcgaaatgcagattcagaaataaaacattctacaccgtctcctaccagatattcactatcaccaagtaaaagttacaagtattctcccaaaacaccacctcgatgggcagaagatcagaattctttactgaaaatgatttgccaacaagtagaggccattaagaaagaaatgcaggagttgaaactaaatagcagtaactcagcatcccctcatcgttggcccacagagaattatggaccagactcagtgcctgatggatatcaggggtcacagacatttcatggggctccactaacagttgcaactactggcccttcagtatattatagtcagtcaccagcatataattcccagtatcttctcagaccagcagctaatgttactcccacaaagggcccagtctatggcatgaataggcttccaccccaacagcatatttatgcctatccgcaacagatgcacacaccgccagtgcaaagctcatctgcttgtatgttctctcaggagatgtatggtcctcctgcattgcgttttgagtctcctgcaacgggaattctatcgcccaggggtgatgattactttaattacaatgttcaacagacaagcacaaatccacctttgccagaaccaggatatttcacaaaacctccgattgcagctcatgcttcaagatctgcagaatctaagactatagaatttgggaaaactaattttgttcagcccatgccgggtgaaggattaaggccatctttgccaacacaagcacacacaacacagccaactccttttaaatttaactcaaatttcaaatcaaatgatggtgacttcacgttttcctcaccacaggttgtgacacagccccctcctgcagcttacagtaacagtgaaagccttttaggtctcctgacttcagataaacccttgcaaggagatggctatagtggagccaaaccaattcctggtggtcaaaccattgggcctcgaaatacattcaattttggaagcaaaaatgtgtctggaatttcatttacagaaaacatggggtcgagtcagcaaaagaattctggttttcggcgaagtgatgatatgtttactttccatggtccagggaaatcagtatttggaacacccactttagagacagcaaacaagaatcatgagacagatggaggaagtgcccatggggatgatgatgatgacggtcctcactttgagcctgtagtacctcttcctgataagattgaagtaaaaactggtgaggaagatgaagaagaattcttttgcaaccgcgcgaaattgtttcgtttcgatgtagaatccaaagaatggaaagaacgtgggattggcaatgtaaaaatactgaggcataaaacatctggtaaaattcgccttctaatgagacgagagcaagtattgaaaatctgtgcaaatcattacatcagtccagatatgaaattgacaccaaatgctggatcagacagatcttttgtatggcatgcccttgattatgcagatgagttgccaaaaccagaacaacttgctattaggttcaaaactcctgaggaagcagcactttttaaatgcaagtttgaagaagcccagagcattttaaaagccccaggaacaaatgtagccatggcgtcaaatcaggctgtcagaattgtaaaagaacccacaagtcatgataacaaggatatttgcaaatctgatgctggaaacctgaattttgaatttcaggttgcaaagaaagaagggtcttggtggcattgtaacagctgctcattaaagaatgcttcaactgctaagaaatgtgtatcatgccaaaatctaaacccaagcaataaagagctcgttggcccaccattagctgaaactgtttttactcctaaaaccagcccagagaatgttcaagatcgatttgcattggtgactccaaagaaagaaggtcactgggattgtagtatttgtttagtaagaaatgaacctactgtatctaggtgcattgcgtgtcagaatacaaaatctgctaacaaaagtggatcttcatttgttcatcaagcttcatttaaatttggccagggagatcttcctaaacctattaacagtgatttcagatctgttttttctacaaaggaaggacagtgggattgcagtgcatgtttggtacaaaatgaggggagctctacaaaatgtgctgcttgtcagaatccgagaaaacagagtctacctgctacttctattccaacacctgcctcttttaagtttggtacttcagagacaagtaaaactctaaaaagtggatttgaagacatgtttgctaagaaggaaggacagtgggattgcagttcatgcttagtgcgaaatgaagcaaatgctacaagatgtgttgcttgtcagaatccggataaaccaagtccatctacttctgttccagctcctgcctcttttaagtttggtacttcagagacaagcaaggctccaaagagcggatttgagggaatgttcactaagaaggagggacagtgggattgcagtgtgtgcttagtaagaaatgaagccagtgctaccaaatgtattgcttgtcagaatccaggtaaacaaaatcaaactacttctgcagtttcaacacctgcctcttcagagacaagcaaggctccaaagagcggatttgagggaatgttcactaagaaggagggacagtgggattgcagtgtgtgcttagtaagaaatgaagccagtgctaccaaatgtattgcttgtcagaatccaggtaaacaaaatcaaactacttctgcagtttcaacacctgcctcttcagagacaagcaaggctccaaagagcggatttgagggaatgttcactaagaaggaaggacagtgggattgcagtgtgtgcttagtaagaaatgaagccagtgctaccaaatgtattgcttgtcagtgtccaagtaaacaaaatcaaacaactgcaatttcaacacctgcctcttcggagataagcaaggctccaaagagtggatttgaaggaatgttcatcaggaaaggacagtgggattgtagtgtttgctgtgtacaaaatgagagttcttccttaaaatgtgtggcttgtgatgcctctaaaccaactcataaacctattgcagaagctccttcagctttcacactgggctcagaaatgaagttgcatgactcttctggaagtcaggtgggaacaggatttaaaagtaatttctcagaaaaagcttctaagtttggcaatacagagcaaggattcaaatttgggcatgtggatcaagaaaattcaccttcatttatgtttcagggttcttctaatacagaatttaagtcaaccaaagaaggattttccatccctgtgtctgctgatggatttaaatttggcatttcggaaccaggaaatcaagaaaagaaaagtgaaaagcctcttgaaaatggtactggcttccaggctcaggatattagtggccagaagaatggccgtggtgtgatttttggccaaacaagtagcacttttacatttgcagatcttgcaaaatcaacttcaggagaaggatttcagtttggcaaaaaagaccccaatttcaagggattttcaggtgctggagaaaaattattctcatcacaatacggtaaaatggccaataaagcaaacacttccggtgactttgagaaagatgatgatgcctataagactgaggacagcgatgacatccattttgaaccagtagttcaaatgcccgaaaaagtagaacttgtaacaggagaagaagatgaaaaagttctgtattcacagcgggtaaaactatttagatttgatgctgaggtaagtcagtggaaagaaaggggcttggggaacttaaaaattctcaaaaacgaggtcaatggcaaactaagaatgctgatgcgaagagaacaagtactaaaagtgtgtgctaatcattggataacgactacgatgaacctgaagcctctctctggatcagatagagcatggatgtggttagccagtgatttctctgatggtgatgccaaactagagcagttggcagcaaaatttaaaacaccagagctggctgaagaattcaagcagaaatttgaggaatgccagcggcttctgttagacataccacttcaaactccccataaacttgtagatactggcagagctgccaagttaatacagagagctgaagaaatgaagagtggactgaaagatttcaaaacatttttgacaaatgatcaaacaaaagtcactgaggaagaaaataagggttcaggtacaggtgcggccggtgcctcagacacaacaataaaacccaatcctgaaaacactgggcccacattagaatgggataactatgatttaagggaagatgctttggatgatagtgtcagtagtagctcagtacatgcttctccattggcaagtagccctgtgagaaaaaatcttttccgttttggtgagtcaacaacaggatttaacttcagttttaaatctgctttgagtccatctaagtctcctgccaagttgaatcagagtgggacttcagttggcactgatgaagaatctgatgttactcaagaagaagagagagatggacagtactttgaacctgttgttcctttacctgatctagttgaagtatccagtggtgaggaaaatgaacaagttgtttttagtcacagggcaaaactctacagatatgataaagatgttggtcaatggaaagaaaggggcattggtgatataaagattttacagaattatgataataagcaagttcgtatagtgatgagaagggaccaagtattaaaactttgtgccaatcacagaataactccagacatgactttgcaaaatatgaaagggacagaaagagtatggttgtggactgcatgtgattttgcagatggagaaagaaaagtagagcatttagctgttcgttttaaactacaggatgttgcagactcgtttaagaaaatttttgatgaagcaaaaacagcccaggaaaaagattctttgataacacctcatgtttctcggtcaagcactcccagagagtcaccatgtggcaaaattgctgtagctgtattagaagaaaccacaagagagaggacagatgttattcagggtgatgatgtagcagatgcaacttcagaagttgaagtgtctagcacatctgaaacaacaccaaaagcagtggtttctcctccaaagtttgtatttggttcagagtctgttaaaagcatttttagtagtgaaaaatcaaaaccatttgcattcggcaacagttcagccactgggtctttgtttggatttagttttaatgcacctttgaaaagtaacaatagtgaaactagttcagtagcccagagtggatctgaaagcaaagtggaacctaaaaaatgtgaactgtcaaagaactctgatatcgaacagtcttcagatagcaaagtcaaaaatctctttgcttcctttccaacggaagaatcttcaatcaactacacatttaaaacaccagaaaaggcaaaagagaagaaaaaacctgaagattctccctcagatgatgatgttctcattgtatatgaactaactccaaccgctgagcagaaagcccttgcaaccaaacttaaacttcctccaactttcttctgctacaagaatagaccagattatgttagtgaagaagaggaggatgatgaagatttcgaaacagctgtcaagaaacttaatggaaaactata

SEQ ID NO: 8208 - protein, 3224 aa, Homo sapiens
MRRSKADVERYIASVQGSTPSPRQKSMKGFYFAKLYYEAKEYDLAKKYICTYINVQERDPKAHRFLGLLYELEENTDKAVECYRRSVELNPTQKDLVLKIAELLCKNDVTDGRAKYWLERAAKLFPGSPAIYKLKEQLLDCEGEDGWNKLFDLIQSELYVRPDDVHVNIRLVEVYRSTKRLKDAVAHCHEAERNIALRSSLEWNSCVVQTLKEYLESLQCLESDKSDWRATNTDLLLAYANLMLLTLSTRDVQESRELLQSFDSALQSVKSLGGNDELSATFLEMKGHFYMHAGSLLLKMGQHSSNVQWRALSELAALCYLIAFQVPRPKIKLIKGEAGQNLLEMMACDRLSQSGHMLLNLSRGKQDFLKEIVETFANKSGQSALYDALFSSQSPKDTSFLGSDDIGNIDVREPELEDLTRYDVGAIRAHNGSLQHLTWLGLQWNSLPALPGIRKWLKQLFHHLPHETSRLETNAPESICILDLEVFLLGVVYTSHLQLKEKCNSHHSSYQPLCLPLPVCKQLCTERQKSWWDAVCTLIHRKAVPGNVAKLRLLVQHEINTLRAQEKHGLQPALLVHWAECLQKTGSGLNSFYDQREYIGRSVHYWKKVLPLLKIIKKKNSIPEPIDPLFKHFHSVDIQASEIVEYEEDAHITFAILDAVNGNIEDAVTAFESIKSVVSYWNLALIFHRKAEDIENDALSPEEQEECKNYLRKTRDYLIKIIDDSDSNLSVVKKLPVPLESVKEMLNSVMQELEDYSEGGPLYKNGSLRNADSEIKHSTPSPTRYSLSPSKSYKYSPKTPPRWAEDQNSLLKMICQQVEAIKKEMQELKLNSSNSASPHRWPTENYGPDSVPDGYQGSQTFHGAPLTVATTGPSVYYSQSPAYNSQYLLRPAANVTPTKGPVYGMNRLPPQQHIYAYPQQMHTPPVQSSSACMFSQEMYGPPALRFESPATGILSPRGDDYFNYNVQQTSTNPPLPEPGYFTKPPIAAHASRSAESKTIEFGKTNFVQPMPGEGLRPSLPTQAHTTQPTPFKFNSNFKSNDGDFTFSSPQVVTQPPPAAYSNSESLLGLLTSDKPLQGDGYSGAKPIPGGQTIGPRNTFNFGSKNVSGISFTENMGSSQQKNSGFRRSDDMFTFHGPGKSVFGTPTLETANKNHETDGGSAHGDDDDDGPHFEPVVPLPDKIEVKTGEEDEEEFFCNRAKLFRFDVESKEWKERGIGNVKILRHKTSGKIRLLMRREQVLKICANHYISPDMKLTPNAGSDRSFVWHALDYADELPKPEQLAIRFKTPEEAALFKCKFEEAQSILKAPGTNVAMASNQAVRIVKEPTSHDNKDICKSDAGNLNFEFQVAKKEGSWWHCNSCSLKNASTAKKCVSCQNLNPSNKELVGPPLAETVFTPKTSPENVQDRFALVTPKKEGHWDCSICLVRNEPTVSRCIACQNTKSANKSGSSFVHQASFKFGQGDLPKPINSDFRSVFSTKEGQWDCSACLVQNEGSSTKCAACQNPRKQSLPATSIPTPASFKFGTSETSKTLKSGFEDMFAKKEGQWDCSSCLVRNEANATRCVACQNPDKPSPSTSVPAPASFKFGTSETSKAPKSGFEGMFTKKEGQWDCSVCLVRNEASATKCIACQNPGKQNQTTSAVSTPASSETSKAPKSGFEGMFTKKEGQWDCSVCLVRNEASATKCIACQNPGKQNQTTSAVSTPASSETSKAPKSGFEGMFTKKEGQWDCSVCLVRNEASATKCIACQCPSKQNQTTAISTPASSEISKAPKSGFEGMFIRKGQWDCSVCCVQNESSSLKCVACDASKPTHKPIAEAPSAFTLGSEMKLHDSSGSQVGTGFKSNFSEKASKFGNTEQGFKFGHVDQENSPSFMFQGSSNTEFKSTKEGFSIPVSADGFKFGISEPGNQEKKSEKPLENGTGFQAQDISGQKNGRGVIFGQTSSTFTFADLAKSTSGEGFQFGKKDPNFKGFSGAGEKLFSSQYGKMANKANTSGDFEKDDDAYKTEDSDDIHFEPVVQMPEKVELVTGEEDEKVLYSQRVKLFRFDAEVSQWKERGLGNLKILKNEVNGKLRMLMRREQVLKVCANHWITTTMNLKPLSGSDRAWMWLASDFSDGDAKLEQLAAKFKTPELAEEFKQKFEECQRLLLDIPLQTPHKLVDTGRAAKLIQRAEEMKSGLKDFKTFLTNDQTKVTEEENKGSGTGAAGASDTTIKPNPENTGPTLEWDNYDLREDALDDSVSSSSVHASPLASSPVRKNLFRFGESTTGFNFSFKSALSPSKSPAKLNQSGTSVGTDEESDVTQEEERDGQYFEPVVPLPDLVEVSSGEENEQVVFSHRAKLYRYDKDVGQWKERGIGDIKILQNYDNKQVRIVMRRDQVLKLCANHRITPDMTLQNMKGTERVWLWTACDFADGERKVEHLAVRFKLQDVADSFKKIFDEAKTAQEKDSLITPHVSRSSTPRESPCGKIAVAVLEETTRERTDVIQGDDVADATSEVEVSSTSETTPKAVVSPPKFVFGSESVKSIFSSEKSKPFAFGNSSATGSLFGFSFNAPLKSNNSETSSVAQSGSESKVEPKKCELSKNSDIEQSSDSKVKNLFASFPTEESSINYTFKTPEKAKEKKKPEDSPSDDDVLIVYELTPTAEQKALATKLKLPPTFFCYKNRPDYVSEEEEDDEDFETAVKKLNGKLYLDGSEKCRPLEENTADNEKECIIVWEKKPTVEEKAKADTLKLPPTFFCGVCSDTDEDNGNGEDFQSELQKVQEAQKSQTEEITSTTDSVYTGGTEVMVPSFCKSEEPDSITKSISSPSVSSETMDKPVDLSTRKEIDTDSTSQGESKIVSFGFGSSTGLSFADLASSNSGDFAFGSKDKNFQWANTGAAVFGTQSVGTQSAGKVGEDEDGSDEEVVHNEDIHFEPIVSLPEVEVKSGEEDEEILFKERAKLYRWDRDVSQWKERGVGDIKILWHTMKNYYRILMRRDQVFKVCANHVITKTMELKPLNVSNNALVWTASDYADGEAKVEQLAVRFKTKEVADCFKKTFEECQQNLMKLQKGHVSLAAELSKETNPVVFFDVCADGEPLGRITMELFSNIVPRTAENFRALCTGEKGFGFKNSIFHRVIPDFVCQGGDITKHDGTGGQSIYGDKFEDENFDVKHTGPGLLSMANQGQNTNNSQFVITLKKAEHLDFKHVVFGFVKDGMDTVKKIESFGSPKGSVCRRITITECGQI

SEQ ID NO: 8209 - DNA, 8192 bp, Homo sapiens; identical to SEQ ID NO: 8207

SEQ ID NO: 8210 - protein, 3224 aa, Homo sapiens; identical to SEQ ID NO: 8208

SEQ ID NO: 8211 - DNA, 8192 bp, Homo sapiens; identical to SEQ ID NO: 8207

SEQ ID NO: 8212 - protein, 3224 aa, Homo sapiens; identical to SEQ ID NO: 8208

SEQ ID NO: 8213 - DNA, 1417 bp, Homo sapiens
aaaacagatacatatgtacttacattaatgtgcaagagagggatcccaaagctcacagatttctgggtcttctttatgaattggaagaaaacacagacaaagccgttgaatgttacaggcgttcagtggaattaaacccaacacaaaaagatcttgtgttgaagattgcagaattgctttgtaaaaatgatgttactgatggaagagcaaaatactggcttgaaagagcagccaaacttttcccaggaagtcctgcaatttataaactaaaggaacagcttctagattgtgaaggtgaagatggatggaataaactttttgacttgattcagtcagaactttatgtaagacctgatgacgtccatgtgaacatccggctagtggaggtgtatcgctcaactaaaagattgaaggatgctgtggcccactgccatgaggcagagaggaacatagctttgcgttcaagtttagaatggaattcgtgtgttgtacagaccaataactatcacagaatgtggacagatataaaatcattgttgttcatagaaaatttcatctgtataagcagttggattgaagcttagctattacaatttgatagttatgttcagcttttgaaaatggacgtttccgatttacaaatgtaaaattgcagcttatagctgttgtcactttttaatgtgttataattgaccttgcatggtgtgaaataaaagtttaaacactggtgtatttcaggtgtacttgtgtttatgtactcctgacgtattaaaatggaataatactaatcttgttaaaagcaatagacctcaaactattgaaggaatatgatatatgcaatttaattttaattccttttaagatatttggacttcctgcatggatatacttaccatttgaataaagggaccacaacttggataatttaattttaggtttgaaatatatttggtaatcttaactattggtgtactcatttatgcatagagactcgtttatgaatgggtagagccacagaacgtatagagttaaccaaagtgctcttctctagaatctttacacctcctgtgtggttacaagttaactttgtaagtagcgtaccttccttccttaaaatatctagcttcctgtgccctttcatagatattcgattaatttttacattttaaacaagttgactatttcctttaggggttttgtttcaaacttttctgtcatctgtctctactacctcagaaactgcagcttggttctgatgatagaaattgaatttttccttgtagttattgtgataaagtatgaatatttttagaaagtctataccatgttctttcgttaaagatttgctttatacaagattgttgcagtacctttttctggtaaattttgtagcagaaataaaatgacaattcctaag

SEQ ID NO: 8214 - protein, 35 aa, Homo sapiens
MCKRGIPKLTDFWVFFMNWKKTQTKPLNVTGVQWN

SEQ ID NO: 8215 - DNA, 2440 bp, Homo sapiens
aaaacagatacatatgtacttacattaatgtgcaagagagggatcccaaagctcacagatttctgggtcttctttatgaattggaagaaaacacagacaaagccgttgaatgttacaggcgttcagtggaattaaacccaacacaaaaagatcttgtgttgaagattgcagaattgctttgtaaaaatgatgttactgatggaagagcaaaatactggcttgaaagagcagccaaacttttcccaggaagtcctgcaatttataaactaaaggaacagcttctagattgtgaaggtgaagatggatggaataaactttttgacttgattcagtcagaactttatgtaagacctgatgacgtccatgtgaacatccggctagtggaggtgtatcgctcaactaaaagattgaaggatgctgtggcccactgccatgaggcagagaggaacatagctttgcgttcaagtttagaatggaattcgtgtgttgtacagaccaataactatcacagaatgtggacagatataaaatcattgttgttcatagaaaatttcatctgtataagcagttggattgaagcttagctattacaatttgatagttatgttcagcttttgaaaatggacgtttccgatttacaaatgtaaaattgcagcttatagctgttgtcactttttaatgtgttataattgaccttgcatggtgtgaaataaaagtttaaacactggtgtatttcaggtgtacttgtgtttatgtactcctgacgtattaaaatggaataatactaatcttgttaaaagcaatagacctcaaactattgaaggaatatgatatatgcaatttaattttaattccttttaagatatttggacttcctgcatggatatacttaccatttgaataaagggaccacaacttggataatttaattttaggtttgaaatatatttggtaatcttaactattggtgtactcatttatgcatagagactcgtttatgaatgggtagagccacagaacgtatagagttaaccaaagtgctcttctctagaatctttacacctcctgtgtggttacaagttaactttgtaagtagcgtaccttccttccttaaaatatctagcttcctgtgccctttcatagatattcgattaatttttacattttaaacaagttgactatttcctttaggggttttgtttcaaacttttctgtcatctgtctctactacctcagaaactgcagcttggttctgatgatagaaattgaatttttccttgtagttattgtgataaagtatgaatatttttagaaagtctataccatgttctttcgttaaagatttgctttatacaagattgttgcagtacctttttctggtaaattttgtagcagaaataaaatgacaattcctaagagccactgacatccaaaaaattcattacttacgcttcgggttcattctaaagtaaggaagacaatttaaaggcagtaaattcaaactgctgcataatttccagagctcctagtttctcaagtttgatacacaccaaaaacgtatttggaaatggcttgtatcaaatgttaggcaaattgctaaagaaaagaggatgttcttattggcctactcaatatggaactacaaagaatccaggtagaacacaaaattttgtatattgcaattatgaatattgactgtcttccacccatctgtgttctttcgggtgaaattacctcattttatttagtgaggaaagacaggtttattccctgttacatggggatttggaaattgggtatcctaaagcaagtaactgttcaaccaccagtcaaaagaggggagggatgttgtgcgagtaatgagtgatggtataccatcaccattccactcggccacaaagccagatacttgaaataaacctactccaaatgtatcagttcagtcttgaaccatggattacatatgtttacactaaatatttcaaattggcttatttggaaatctatgtaatataaactgatgtaaagtgtgttgtaacttttcagctgagacagttgatgccttcgtcatgattttagaataaattcttaagttaatgcaagtgctttttaagagactttttacagatttgtatgctttcctaaagcactaaagttacaaattaaaaagctttaaaaactttgaccaaaaatttgacaaaatgacatgtaaactgacttttcccgtattagtattccaaagatgcttaaaagtggcttgtggcatttatgagaaagtctttgtgtcacatttcaggaaaggactttgatttctctttgttatttaatcactgatgtggtctaaacccacgataatatgtatctttccttttaaactggattttatgttgtctcattaaaatctgcttaaagatagaataaaattcattatttgtacatc

SEQ ID NO: 8216 - protein, 35 aa, Homo sapiens; identical to SEQ ID NO: 8214

SEQ ID NO: 8217 - DNA, 2209 bp, Homo sapiens
ggccgcgtagcgccgcgggtttgatgaacgcggttcccggggagactggtacggttgctgtgtgctatggagccgagggtcgtcaagccaccggggcaggatttagtagtggagagtctcaaaagccgctacggactcgggggcagctgccccgacgagtatgatttttcaaatttttatcagtctaagtataagagaagaactctaacctccccaggtgatttggatatctactctggagataaagttggttcatcgttaaaatattctgatgaaagcaagcattgtagaacaccattgggcagcttattcaagcacgtaaatgtgaattgcctagatgatgaactggattctttccatgatttgaagaaacaggaaacagaagaagagttaattgaaaatgattatagagttagtacctcgaaaataaccaagcagtcttttaaagaaatagaaaaagttgccttgccaactaatacgacctcatcgagacctcggactgagtgttgtagtgatgcaggtgactctcctttgaaacctgtcagctgtccaaaatctaaagcatcagacaagcggagtttacttccacatcagatcagtcagatatatgacgaattatttcagatacatctgaaattgcagtgtgaaactgcagcacaacagaaatttgctgaagaacttcaaaagcgagaacgttttttacttgaaagagaacaactgcttttcagacatgaaaatgccttgagtaaaattaaaggtgttgaagaagaggttcttacaagatttcaaattataaaagagcagcatgatgcagaagttgaacacttaaccgaagttcttaaggaaaagaataaagaaaccaagagactgaggtcctcttttgatgcattgaaagaattgaatgataccttaaaaaaacagttaaatgaagcaagtgaagaaaacaggaagatagacattcaggctaaaagagttcaagctcgtttagataatttacagaggaagtacgagtttatgacaatacagagattgaaaggaagttcccatgctgttcatgaaatgaaaagtttaaaacaagaaaaagcaccagtttcaaaaacttacaaggtaccacttaatgggcaagtttatgaacttttaactgtcttcatggactggatttcggatcatcatcttagcaaagtgaaacatgaagaatctggaatggatggtaaaaaaccacaactcaaatttgcttcccagagaaatgatattcaggagaagtgtgtaaagcttttgcctctaatgacagagcagctacagtggatgccatttgtgaatatcaaacttcacgagccttttgtaaaatttatatattggtccctaaggcagctagatgctggagcacagcactcgactatgacatcaacattgaggagattgggtgaagacatttttaaaggagtggtaactaaaggaattcaggataattctccacagcattctgtggagaataaaccaaagacagctgctttctttaagagctccaatttgccattgagatttttatcaaccttaattgttctcaaaacagtcactcaagctgattacctggctcaggcatttgattctctttgtttggacttgaagacagaagaaggaaaaaccttgtttttggagtatcaggctgttccagtaatattaagtcatctaagaatatccagtaaaggactcctgtctaatgttattgatagtttgctccagatgacggtggaatctaaatccttgcagcctttcctggaagcctgtagcaactctttattttttcgtacttgctctgtgctgcttcgagcccctaagcttgatcttcaaatactagaaaaactcagtattattttacagaaactttccaaaatcaagagtaataagaagctctttgaactttttacgattcatctgatgcttcaagaaatacaaaggacaacaaacccagagcatgcatttctctgtattaatctaaattcaactctgttcaatctgggtttaacaaaatgtaactccctggtctccagtgcaagcccttagactggctaattttttaatatagtatatgtggtgcttatttataaacatgtagaaattaccaaagtaactacaattctaccaagtaaagttatcagtagcatcatttatcatgaaaaataaataatttttttgaactgtaaaaatg

SEQ ID NO: 8218 - protein, 665 aa, Homo sapiens; identical to SEQ ID NO: 600

SEQ ID NO: 8219 - DNA, 2400 bp, Homo sapiens
ggccgcgtagcgccgcgggtttgatgaacgcggttcccggggagactggtacggttgctgtgtgctatggagccgagggtcgtcaagccaccggggcaggatttagtagtggagagtctcaaaagccgctacggactcgggggcagctgccccgacgagtatgatttttcaaatttttatcagtctaagtataagagaagaactctaacctccccaggtgatttggatatctactctggagataaagttggttcatcgttaaaatattctgatgaaagcaagcattgtagaacaccattgggcagcttattcaagcacgtaaatgtgaattgcctagatgatgaactggattctttccatgatttgaagaaacaggaaacagaagaagagttaattgaaaatgattatagagttagtacctcgaaaataaccaagcagtcttttaaagaaatagaaaaagttgccttgccaactaatacgacctcatcgagacctcggactgagtgttgtagtgatgcaggtgactctcctttgaaacctgtcagctgtccaaaatctaaagcatcagacaagcggagtttacttccacatcagatcagtcagatatatgacgaattatttcagatacatctgaaattgcagtgtgaaactgcagcacaacagaaatttgctgaagaacttcaaaagcgagaacgttttttacttgaaagagaacaactgcttttcagacatgaaaatgccttgagtaaaattaaaggtgttgaagaagaggttcttacaagatttcaaattataaaagagcagcatgatgcagaagttgaacacttaaccgaagttcttaaggaaaagaataaagaaaccaagagactgaggtcctcttttgatgcattgaaagaattgaatgataccttaaaaaaacagttaaatgaagcaagtgaagaaaacaggaagatagacattcaggctaaaagagttcaagctcgtttagataatttacagaggaagtacgagtttatgacaatacagagattgaaaggaagttcccatgctgttcatgaaatgaaaagtttaaaacaagaaaaagcaccagtttcaaaaacttacaaggtaccacttaatgggcaagtttatgaacttttaactgtcttcatggactggatttcggatcatcatcttagcaaagtgaaacatgaagaatctggaatggatggtaaaaaaccacaactcaaatttgcttcccagagaaatgatattcaggagaagtgtgtaaagcttttgcctctaatgacagagcagctacagtggatgccatttgtgaatatcaaacttcacgagccttttgtaaaatttatatattggtccctaaggcagctagatgctggagcacagcactcgactatgacatcaacattgaggagattgggtgaagacatttttaaaggagtggtaactaaaggaattcaggataattctccacagcattctgtggagaataaaccaaagacagctgctttctttaagagctccaatttgccattgagatttttatcaaccttaattgttctcaaaacagtcactcaagctgattacctggctcaggcatttgattctctttgtttggacttgaagacagaagaaggaaaaaccttgtttttggagtatcaggctgttccagtaatattaagtcatctaagaatatccagtaaaggactcctgtctaatgttattgatagtttgctccagatgacggtggaatctaaatccttgcagcctttcctggaagcctgtagcaactctttattttttcgtacttgctctgtgctgcttcgagcccctaagcttgatcttcaaatactagaaaaactcagtattattttacagaaactttccaaaatcaagagtaataagaagctctttgaactttttacgattcatctgatgcttcaagaaatacaaaggacaacaaacccagagcatgcatttctctgtattaatctaaattcaactctgttcaatctgggtttaacaaaatgtaactccctggtctccagtgcaagcccttagactggctaattttttaatatagtatatgtggtgcttatttataaacatgtagaaattaccaaagtaactacaattctaccaagtaaagttatcagtagcatcatttatcatgaaaaataaataatttttttgaactgtaaaaatgaaatctgtagaaggtattggaacttttggaatgtttcagttcaggtaaggtaatactaatatacaagatggcgtttctagaatgtatgacactgaagtgactttttgtaaaaatatattaggaaaattatttcttaaaattatgtgattatttggaataaaattggtgcttatgtgagaacagggttaaat

SEQ ID NO: 8220 - protein, 665 aa, Homo sapiens; identical to SEQ ID NO: 600

SEQ ID NO: 8221 - DNA, 2261 bp, Homo sapiens
ggccgcgtagcgccgcgggtttgatgaacgcggttcccggggagactggtacggttgctgtgtgctatggagccgagggtcgtcaagccaccggggcaggatttagtagtggagagtctcaaaagccgctacggactcgggggcagctgccccgacgagtatgatttttcaaatttttatcagtctaagtataagagaagaactctaacctccccaggtgatttggatatctactctggagataaagttggttcatcgttaaaatattctgatgaaagcaagcattgtagaacaccattgggcagcttattcaagcacgtaaatgtgaattgcctagatgatgaactggattctttccatgatttgaagaaacaggaaacagaagaagagttaattgaaaatgattatagagttagtacctcgaaaataaccaagcagtcttttaaagaaatagaaaaagttgccttgccaactaatacgacctcatcgagacctcggactgagtgttgtagtgatgcaggtgactctcctttgaaacctgtcagctgtccaaaatctaaagcatcagacaagcggagtttacttccacatcagatcagtcagatatatgacgaattatttcagatacatctgaaattgcagtgtgaaactgcagcacaacagaaatttgctgaagaacttcaaaagcgagaacgttttttacttgaaagagaacaactgcttttcagacatgaaaatgccttgagtaaaattaaaggtgttgaagaagaggttcttacaagatttcaaattataaaagagcagcatgatgcagaagttgaacacttaaccgaagttcttaaggaaaagaataaagaaaccaagagactgaggtcctcttttgatgcattgaaagaattgaatgataccttaaaaaaacagttaaatgaagcaagtgaagaaaacaggaagatagacattcaggctaaaagagttcaagctcgtttagataatttacagaggaagtacgagtttatgacaatacagagattgaaaggaagttcccatgctgttcatgaaatgaaaagtttaaaacaagaaaaagcaccagtttcaaaaacttacaaggtaccacttaatgggcaagtttatgaacttttaactgtcttcatggactggatttcggatcatcatcttagcaaagtgaaacatgaagaatctggaatggatggtaaaaaaccacaactcaaatttgcttcccagagaaatgatattcaggagaagtgtgtaaagcttttgcctctaatgacagagcagctacagtggatgccatttgtgaatatcaaacttcacgagccttttgtaaaatttatatattggtccctaaggcagctagatgctggagcacagcactcgactatgacatcaacattgaggagattgggtgaagacatttttaaaggagtggtaactaaaggaattcaggataattctccacagcattctgtggagaataaaccaaagacagctgctttctttaagagctccaatttgccattgagatttttatcaaccttaattgttctcaaaacagtcactcaagctgattacctggctcaggcatttgattctctttgtttggacttgaagacagaagaaggaaaaaccttgtttttggagtatcaggctgttccagtaatattaagtcatctaagaatatccagtaaaggactcctgtctaatgttattgatagtttgctccagatgacggtggaatctagagtaataagaagctctttgaactttttacgattcatctgatgcttcaagaaatacaaaggacaacaaacccagagcatgcatttctctgtattaatctaaattcaactctgttcaatctgggtttaacaaaatgtaactccctggtctccagtgcaagcccttagactggctaattttttaatatagtatatgtggtgcttatttataaacatgtagaaattaccaaagtaactacaattctaccaagtaaagttatcagtagcatcatttatcatgaaaaataaataatttttttgaactgtaaaaatgaaatctgtagaaggtattggaacttttggaatgtttcagttcaggtaaggtaatactaatatacaagatggcgtttctagaatgtatgacactgaagtgactttttgtaaaaatatattaggaaaattatttcttaaaattatgtgattatttggaataaaattggtgcttatgtgagaacagggttaaat

SEQ ID NO: 8222 - protein, 577 aa, Homo sapiens
MEPRVVKPPGQDLVVESLKSRYGLGGSCPDEYDFSNFYQSKYKRRTLTSPGDLDIYSGDKVGSSLKYSDESKHCRTPLGSLFKHVNVNCLDDELDSFHDLKKQETEEELIENDYRVSTSKITKQSFKEIEKVALPTNTTSSRPRTECCSDAGDSPLKPVSCPKSKASDKRSLLPHQISQIYDELFQIHLKLQCETAAQQKFAEELQKRERFLLEREQLLFRHENALSKIKGVEEEVLTRFQIIKEQHDAEVEHLTEVLKEKNKETKRLRSSFDALKELNDTLKKQLNEASEENRKIDIQAKRVQARLDNLQRKYEFMTIQRLKGSSHAVHEMKSLKQEKAPVSKTYKVPLNGQVYELLTVFMDWISDHHLSKVKHEESGMDGKKPQLKFASQRNDIQEKCVKLLPLMTEQLQWMPFVNIKLHEPFVKFIYWSLRQLDAGAQHSTMTSTLRRLGEDIFKGVVTKGIQDNSPQHSVENKPKTAAFFKSSNLPLRFLSTLIVLKTVTQADYLAQAFDSLCLDLKTEEGKTLFLEYQAVPVILSHLRISSKGLLSNVIDSLLQMTVESRVIRSSLNFLRFI

SEQ ID NO: 8223 - DNA, 2920 bp, Homo sapiens
ggccgcgtagcgccgcgggtttgatgaacgcggttcccggggagactggtacggttgctgtgtgctatggagccgagggtcgtcaagccaccggggcaggatttagtagtggagagtctcaaaagccgctacggactcgggggcagctgccccgacgagtatgatttttcaaatttttatcagtctaagtataagagaagaactctaacctccccaggtgatttggatatctactctggagataaagttggttcatcgttaaaatattctgatgaaagcaagcattgtagaacaccattgggcagcttattcaagcacgtaaatgtgaattgcctagatgatgaactggattctttccatgatttgaagaaacaggaaacagaagaagagttaattgaaaatgattatagagttagtacctcgaaaataaccaagcagtcttttaaagaaatagaaaaagttgccttgccaactaatacgacctcatcgagacctcggactgagtgttgtagtgatgcaggtgactctcctttgaaacctgtcagctgtccaaaatctaaagcatcagacaagcggagtttacttccacatcagatcagtcagatatatgacgaattatttcagatacatctgaaattgcagtgtgaaactgcagcacaacagaaatttgctgaagaacttcaaaagcgagaacgttttttacttgaaagagaacaactgcttttcagacatgaaaatgccttgagtaaaattaaaggtgttgaagaagaggttcttacaagatttcaaattataaaagagcagcatgatgcagaagttgaacacttaaccgaagttcttaaggaaaagaataaagaaaccaagagactgaggtcctcttttgatgcattgaaagaattgaatgataccttaaaaaaacagttaaatgaagcaagtgaagaaaacaggaagatagacattcaggctaaaagagttcaagctcgtttagataatttacagaggaagtacgagtttatgacaatacagagattgaaaggaagttcccatgctgttcatgaaatgaaaagtttaaaacaagaaaaagcaccagtttcaaaaacttacaaggtaccacttaatgggcaagtttatgaacttttaactgtcttcatggactggatttcggatcatcatcttagcaaagtgaaacatgaagaatctggaatggatggtaaaaaaccacaactcaaatttgcttcccagagaaatgatattcaggagaagtgtgtaaagcttttgcctctaatgacagagcagctacagtggatgccatttgtgaatatcaaacttcacgagccttttgtaaaatttatatattggtccctaaggcagctagatgctggagcacagcactcgactatgacatcaacattgaggagattgggtgaagacatttttaaaggagtggtaactaaaggaattcaggataattctccacagcattctgtggagaataaaccaaagacagctgctttctttaagagctccaatttgccattgagatttttatcaaccttaattgttctcaaaacagtcactcaagctgattacctggctcaggcatttgattctctttgtttggacttgaagacagaagaaggaaaaaccttgtttttggagtatcaggctgttccagtaatattaagtcatctaagaatatccagtaaaggactcctgtctaatgttattgatagtttgctccagatgacggtggaatctaaatccttgcagcctttcctggaagcctgtagcaactctttattttttcgtacttgctctgtgctgcttcgagcccctaagcttgatcttcaaatactagaaaaactcagtattattttacagaaactttccaaaatcaagagtaataagaagctctttgaactttttacgattcatctgatgcttcaagaaatacaaaggacaacaaacccagagcatgcatttctctgtattaatctaaattcaactctgttcaatctgggtttaacaaaatgtaactccctggtctccagtgcaagcccttagactggctaattttttaatatagtatatgtggtgcttatttataaacatgtagaaattaccaaagtaactacaattctaccaagtaaagttatcagtagcatcatttatcatgaaaaataaataatttttttgaactgtaaaaatgaaatctgtagaaggtattggaacttttggaatgtttcagttcaggtaaggtaatactaatatacaagatggcgtttctagaatgtatgacactgaagtgactttttgtaaaaatatattaggaaaattatttcttaaaattatgtgattatttggaataaaattggtgcttatgtgagaacagggttaaataatactgtctttctattttcctaatatattagaatccttgcttttgaaagcaaaaatgtatatctttaaactatcatcttgataccataacttttctatatactgtatcctagattaacagatgttgattttttttttattgtgctctttgtgggatagaaaaagttttttattatgctgttcacaggtttaaaaacttttgttttcaaaataattattactggagcatgtatatacaaggcaagacattttttaaacattgaaaggtaaacaaaaataatcgtcctgttaccagagatatctcttggtatagccaaagatgagtaaagtggccacaggtctgggtgaagtaaaggtggtaaaacttgggacttaggacaggatactgagaaacattgttttaaagagtcataaaatcatatatgatcagtgtataatctcagtttcaggagttagaagaaattttcaagaaactattgggcctcttcaaaaaaataccagaaaatgtgccatttttgaa

SEQ ID NO: 8224 - protein, 665 aa, Homo sapiens; identical to SEQ ID NO: 600

SEQ ID NO: 8225 - DNA, 2377 bp, Homo sapiens
gcgtagcgccgcgggtttgatgaacgcggttcccggggagactggtacggttgctgtgtgctatggagccgagggtcgtcaagccaccggggcaggatttagtagtggagagtctcaaaagccgctacggactcgggggcagctgccccgacgagtatgatttttcaaatttttatcagtctaagtataagagaagaactctaacctccccaggtgatttggatatctactctggagataaagttggttcatcgttaaaatattctgatgaaagcaagcattgtagaacaccattgggcagcttattcaagcacgtaaatgtgaattgtttaaaaaatgtttttacattttttctcagttatgctgttaatatttgaaaagcagttttatctttttaaagtgctatagtaaacttctagattgctgtgatacaattatttttttaaagcctagatgatgaactggattctttccatgatttgaagaaacaggaaacagaagaagagttaattgaaaatgattatagagttagtacctcgaaaataaccaagcagtcttttaaagaaatagaaaaagttgccttgccaactaatacgacctcatcgagacctcggactgagtgttgtagtgatgcaggtgactctcctttgaaacctgtcagctgtccaaaatctaaagcatcagacaagcggagtttacttccacatcagatcagtcagatatatgacgaattatttcagatacatctgaaattgcagtgtgaaactgcagcacaacagaaatttgctgaagaacttcaaaagcgagaacgttttttacttgaaagagaacaactgcttttcagacatgaaaatgccttgagtaaaattaaaggtgttgaagaagaggttcttacaagatttcaaattataaaagagcagcatgatgcagaagttgaacacttaaccgaagttcttaaggaaaagaataaagaaaccaagagactgaggtcctcttttgatgcattgaaagaattgaatgataccttaaaaaaacagttaaatgaagcaagtgaagaaaacaggaagatagacattcaggctaaaagagttcaagctcgtttagataatttacagaggaagtacgagtttatgacaatacagagattgaaaggaagttcccatgctgttcatgaaatgaaaagtttaaaacaagaaaaagcaccagtttcaaaaacttacaaggtaccacttaatgggcaagtttatgaacttttaactgtcttcatggactggatttcggatcatcatcttagcaaagtgaaacatgaagaatctggaatggatggtaaaaaaccacaactcaaatttgcttcccagagaaatgatattcaggagaagtgtgtaaagcttttgcctctaatgacagagcagctacagtggatgccatttgtgaatatcaaacttcacgagccttttgtaaaatttatatattggtccctaaggcagctagatgctggagcacagcactcgactatgacatcaacattgaggagattgggtgaagacatttttaaaggagtggtaactaaaggaattcaggataattctccacagcattctgtggagaataaaccaaagacagctgctttctttaagagctccaatttgccattgagatttttatcaaccttaattgttctcaaaacagtcactcaagctgattacctggctcaggcatttgattctctttgtttggacttgaagacagaagaaggaaaaaccttgtttttggagtatcaggctgttccagtaatattaagtcatctaagaatatccagtaaaggactcctgtctaatgttattgatagtttgctccagatgacggtggaatctagagtaataagaagctctttgaactttttacgattcatctgatgcttcaagaaatacaaaggacaacaaacccagagcatgcatttctctgtattaatctaaattcaactctgttcaatctgggtttaacaaaatgtaactccctggtctccagtgcaagcccttagactggctaattttttaatatagtatatgtggtgcttatttataaacatgtagaaattaccaaagtaactacaattctaccaagtaaagttatcagtagcatcatttatcatgaaaaataaataatttttttgaactgtaaaaatgaaatctgtagaaggtattggaacttttggaatgtttcagttcaggtaaggtaatactaatatacaagatggcgtttctagaatgtatgacactgaagtgactttttgtaaaaatatattaggaaaattatttcttaaaattatgtgattatttggaataaaattggtgcttatgtgagaacagggttaaat

SEQ ID NO: 8226 - protein, 261 aa, Homo sapiens
MTIQRLKGSSHAVHEMKSLKQEKAPVSKTYKVPLNGQVYELLTVFMDWISDHHLSKVKHEESGMDGKKPQLKFASQRNDIQEKCVKLLPLMTEQLQWMPFVNIKLHEPFVKFIYWSLRQLDAGAQHSTMTSTLRRLGEDIFKGVVTKGIQDNSPQHSVENKPKTAAFFKSSNLPLRFLSTLIVLKTVTQADYLAQAFDSLCLDLKTEEGKTLFLEYQAVPVILSHLRISSKGLLSNVIDSLLQMTVESRVIRSSLNFLRFI

SEQ ID NO: 8227 - DNA, 2897 bp, Homo sapiens
gcgtagcgccgcgggtttgatgaacgcggttcccggggagactggtacggttgctgtgtgctatggagccgagggtcgtcaagccaccggggcaggatttagtagtggagagtctcaaaagccgctacggactcgggggcagctgccccgacgagtatgatttttcaaatttttatcagtctaagtataagagaagaactctaacctccccaggtgatttggatatctactctggagataaagttggttcatcgttaaaatattctgatgaaagcaagcattgtagaacaccattgggcagcttattcaagcacgtaaatgtgaattgtttaaaaaatgtttttacattttttctcagttatgctgttaatatttgaaaagcagttttatctttttaaagtgctatagtaaacttctagattgctgtgatacaattatttttttaaagcctagatgatgaactggattctttccatgatttgaagaaacaggaaacagaagaagagttaattgaaaatgattatagagttagtacctcgaaaataaccaagcagtcttttaaagaaatagaaaaagttgccttgccaactaatacgacctcatcgagacctcggactgagtgttgtagtgatgcaggtgactctcctttgaaacctgtcagctgtccaaaatctaaagcatcagacaagcggagtttacttccacatcagatcagtcagatatatgacgaattatttcagatacatctgaaattgcagtgtgaaactgcagcacaacagaaatttgctgaagaacttcaaaagcgagaacgttttttacttgaaagagaacaactgcttttcagacatgaaaatgccttgagtaaaattaaaggtgttgaagaagaggttcttacaagatttcaaattataaaagagcagcatgatgcagaagttgaacacttaaccgaagttcttaaggaaaagaataaagaaaccaagagactgaggtcctcttttgatgcattgaaagaattgaatgataccttaaaaaaacagttaaatgaagcaagtgaagaaaacaggaagatagacattcaggctaaaagagttcaagctcgtttagataatttacagaggaagtacgagtttatgacaatacagagattgaaaggaagttcccatgctgttcatgaaatgaaaagtttaaaacaagaaaaagcaccagtttcaaaaacttacaaggtaccacttaatgggcaagtttatgaacttttaactgtcttcatggactggatttcggatcatcatcttagcaaagtgaaacatgaagaatctggaatggatggtaaaaaaccacaactcaaatttgcttcccagagaaatgatattcaggagaagtgtgtaaagcttttgcctctaatgacagagcagctacagtggatgccatttgtgaatatcaaacttcacgagccttttgtaaaatttatatattggtccctaaggcagctagatgctggagcacagcactcgactatgacatcaacattgaggagattgggtgaagacatttttaaaggagtggtaactaaaggaattcaggataattctccacagcattctgtggagaataaaccaaagacagctgctttctttaagagctccaatttgccattgagatttttatcaaccttaattgttctcaaaacagtcactcaagctgattacctggctcaggcatttgattctctttgtttggacttgaagacagaagaaggaaaaaccttgtttttggagtatcaggctgttccagtaatattaagtcatctaagaatatccagtaaaggactcctgtctaatgttattgatagtttgctccagatgacggtggaatctagagtaataagaagctctttgaactttttacgattcatctgatgcttcaagaaatacaaaggacaacaaacccagagcatgcatttctctgtattaatctaaattcaactctgttcaatctgggtttaacaaaatgtaactccctggtctccagtgcaagcccttagactggctaattttttaatatagtatatgtggtgcttatttataaacatgtagaaattaccaaagtaactacaattctaccaagtaaagttatcagtagcatcatttatcatgaaaaataaataatttttttgaactgtaaaaatgaaatctgtagaaggtattggaacttttggaatgtttcagttcaggtaaggtaatactaatatacaagatggcgtttctagaatgtatgacactgaagtgactttttgtaaaaatatattaggaaaattatttcttaaaattatgtgattatttggaataaaattggtgcttatgtgagaacagggttaaataatactgtctttctattttcctaatatattagaatccttgcttttgaaagcaaaaatgtatatctttaaactatcatcttgataccataacttttctatatactgtatcctagattaacagatgttgattttttttttattgtgctctttgtgggatagaaaaagttttttattatgctgttcacaggtttaaaaacttttgttttcaaaataattattactggagcatgtatatacaaggcaagacattttttaaacattgaaaggtaaacaaaaataatcgtcctgttaccagagatatctcttggtatagccaaagatgagtaaagtggccacaggtctgggtgaagtaaaggtggtaaaacttgggacttaggacaggatactgagaaacattgttttaaagagtcataaaatcatatatgatcagtgtataatctcagtttcaggagttagaagaaattttcaagaaactattgggcctcttcaaaaaaataccagaaaatgtgccatttttgaa

SEQ ID NO: 8228 - protein, 261 aa, Homo sapiens; identical to SEQ ID NO: 8226

SEQ ID NO: 8229 - DNA, 4216 bp, Homo sapiens
ggggcagacggccggagagccaggtgtgccagggacctatggcagcagggctgaacgtgcccgctccagcctctccagtgctgggagagacctctagatggtgcaggtgagtttgcaatgagggaaagcccctcggcaaggactgagtttccaaacttgcagacagggcagggagcggtcaaggaagagttcccgggaagccctttaaacggaaaggaagcggggctagtgtcagagaggtgtgccaggtcccaggcagccctgctggcccctaaggacatagagtacctgcttctgagagggctgccacggtggccacctgtgaagcctgtcacccagaactggatggtacctgactttcttcatagacccatcttctgctgggactgaagctgacctccaacagaagccaggtgagcccttgggagaggatggcccatgtgggggactgcacgcagacgccctggctccccgtcctggtggtgtctctgatgtgctcagcccgagcggaatactcaaactgcggtgagaacgagtactacaaccagactacggggctgtgccaggagtgccccccgtgtgggccgggagaggagccctacctgtcctgtggctacggcaccaaagacgaggactacggctgcgtcccctgcccggcggagaagttttccaaaggaggctaccagatatgcaggcgtcacaaagactgtgagggcttcttccgggccaccgtgctgacaccaggggacatggagaatgacgctgagtgtggcccttgcctccctggctactacatgctggagaacagaccgaggaacatctatggcatggtctgctactcctgcctcctggcaccccccaacaccaaggaatgtgtgggagccacttcaggagcttctgccaacttccctggcacctcgggcagcagcaccctgtctcccttccagcacgcccacaaagaactctcaggccaaggacacctggccactgccctgatcattgcaatgtccaccatcttcatcatggccatcgccatcgtcctcatcatcatgttctacatcctgaagacaaagccctctgccccagcctgttgcaccagccacccggggaagagcgtggaggcccaagtgagcaaggacgaggagaagaaagaggccccagacaacgtggtgatgttctccgagaaggatgaatttgagaagctgacagcaactccagcaaagcccaccaagagcgagaacgatgcctcatccgagaatgagcagctgctgagccggagcgtcgacagtgatgaggagcccgcccctgacaagcagggctccccggagctgtgcctgctgtcgctggttcacctggccagggagaagtctgccaccagcaacaagtcagccgggattcaaagccggaggaaaaagatcctcgatgtgtatgccaacgtgtgtggagtcgtggaaggtcttagccccacggagctgccatttgattgcctcgagaagactagccgaatgctcagctccacgtacaactctgagaaggctgttgtgaaaacgtggcgccacctcgccgagagcttcggcctgaagagggatgagattgggggcatgacagacggcatgcaactctttgaccgcatcagcacggcaggctacagcatccctgagctactcacaaaactggtgcagattgagcggctggatgctgtggagtccttgtgtgcagacatactggagtgggcgggggttgtgccacctgcctcccagccacatgctgcatcctgaaaagcatgcctgtgggctgtcctcccaggacaagccaaggagccaacgagggctctggagctgtgagtggtgccaaaagactgccaagaatcaaggcttttgtgatatgtcaccgtatgccttaggatgttcaaggagccagacgaaataaggcctgtcttccaatttaaccaaagataaaggactagagccgggatactttcagatgctcgcctgtacctcaccaggcagagtaaatatctactcactcatacagccagcccaccagcccaccattaactcactgaacaatgagacaatgttgaggactcaaatgaatcaaaccccgtgggaatgacagaagtgaagaatctggtccctgtctttaaggagtttgcactccagtagaagacagaaggaacgtatgtttacaaaccacttcactggaagacgtcaaacaagctgaatgaaggggcgcttagaaaacgttaatagaagttctaagcgggagatgactccctactgggatgatgaaggatggcatcctagtgaagaagcagctcaaacattttgataaaatggcaacaaaatgcagacaccctgctccaggtattatttcaggtttagtacaagtctgttaataccctatgtggtttcattaggataactttttacctatccttgaggtcatccatattcttacaggccttccagtcaataatggaagagctcactctatacaaaaccaatatgcaaggcatgtgtttgtccaagcaattggatgtgtgcagtagccaatttcatttactgcattactctttggcctgggaaccctgtggtctgcactacatgtgaatggccttccacttcagtcttaggcagatttgaccttttaggggcagcaatgctgaaggacacagcaatttaaattataatgtgtcaggctgtgttttcacttcaaacatgtatgagtagtcagctgtaattagagaaatgatgacttcctaagagttcagccacgcataattctagatttcaagagcatctaagacttgtggattagcctcatggcatgagagtttcagactcagccttctgagccagtcagggaaagtggagttctgcagcgcaaatgagagcctgggcttgatgtcgagggagctggcttctagttgtgccaccttgggccttgtcttttcctctctctgcctcagtttctcgtctgccaatgagatgttagttagtgattctataattggggcaggtagggttcaggtgagcaaaaagaaagtggagctataggaaatgccaggcctttgaggtgctctatggaagtcaacacagtgtggtttgtccatttaaatgggaataaaaacagaaaaactcagacttggcattttcacaataactgcaatggtttgacataacatttataggcagaaagttaataaactggcattgttcttggcatattattgtactatccctgtaactgccaagagctcaggagccaggctagtgatcacaccaggggttagagttcactgctgaactccctgatggcaggtctgtgtttattactacattaaaacaaagtctctgacttataaagcgaggttgtaaaaattacaagttgcatgactgaaaaaatgctttagggggaaaatcagtcatatctttaacaccaacaagcaatttcccaccaacgaatgtagtacatactgtgagaggatcataatgaggtcctgaatatttaatatcatcatttactgtgtctgtttgctgctgtttttcgaacctatttggtttaccctgcaagctaaatactccacggcagagcttaattatccttttaattcctctttgaaatcctgtggtgcccccttccccctgccttgtgatgatgatgagtgagtctccccttaattagactgcaaatgtcacttgtgatgagtgtgccattccaggataacagcttgcaccctcctcagaatgttttcagcgaaagagtggggtggctgttctctgctcctggtgctttggcctcatttcacactattagaattctggggctgtaaggccagccagtgtcagctcatgttccattggctctccacctgccatttttagggagctattccttatatagttacaaattcccttgtcatttacttatttggaaacatgggatttactctgacaagctttagcctatgttatgggattcagaacaatgagatcataataattctcactgaccaaagctgggactccatcctgccatttttgtgtggagatattcataattctgcaatactttaaaacatttagaaaacaccccagggtaggtctgtggcccttagacagtgaagtcttaattgtcaatattatttttgtctaattctgtatatatataacttattatattttataatctcaataaacacattaataagatt

SEQ ID NO: 8230 - protein, 448 aa, Homo sapiens; identical to SEQ ID NO: 602

SEQ ID NO: 8231 - DNA, 1230 bp, Homo sapiens
atggggcactgggccacaaaactttgcttacccttccatgctctggcttttggccgttatccctgtattttcctggaaatcagctgtaaccacttcacatttcaacagctgacgtcgttctcaaccacagcccagttcagcctggggaatggtgcccaccgcctttatccaattcccagggcttcggagtcgtggagctgcccatgtgttcagctgaaaagaggagaggaagcacagaggtcacatgagccagtgggtcacgtgagaggttcctacggccagcccggaagtggcggtgttgcttccgtgggttccattggcccaccggcagtcacgtggctgcccatagcagaaacgtgtgtggggttgcgggggaacaatgtgaacgcgtgtggagtgacgctactggctgaaacacttagcaattatttggggaagccggggcgtcgggaaggagagcgcgaattcaccctcctctgcgcctccgtaggaaaaaattggagcgggggttcacgagactgcgccgcggcgggcgctagagcccctcgcacagcgtcgccaagggtgcggcgtggagccgggcgcctggcgccagggtgctggtcggcgggcagcggcgccagcctccgacccgcgactccggcgagccaaggctgcgccgggaggagtcggcgcgggccccggggtgcccccttcaactggagcgccttcccctcctgccttgcggcgcatccccacacctacaccggaacgaagctccggggctgtcacttctgcgcgcttctcggaaaggagtctgaactgggagcgctccggggggtcgtcggggaggatgcccgggcgtcggctgtgtccccaagctgctcgccggcgctggcgaggaaggcagtcgggataacgccgcccaaactttccttcgcagcagcgttggcaggaaacgtccctctctgaggctcacgaaaagccgaaaaagactcggacgcttggaggaggcagggccaagcctgcgcaggagaggttccccggagccctggagatgtcctaggggaccaggctaatcgccggcttgcgcccaagcgaagggaagtcctgcaggcacggcgcctccttccctgagccccgcagtgaccgtgacctccgcgcgcacccccgcgcacgtgctcgcggccgaggaagaggaacggtcctgctgaatcctctggaggacagcgactagcgagcaggccaggg

SEQ ID NO: 8232 - protein, 316 aa, Homo sapiens
MGHWATKLCLPFHALAFGRYPCIFLEISCNHFTFQQLTSFSTTAQFSLGNGAHRLYPIPRASESWSCPCVQLKRGEEAQRSHEPVGHVRGSYGQPGSGGVASVGSIGPPAVTWLPIAETCVGLRGNNVNACGVTLLAETLSNYLGKPGRREGEREFTLLCASVGKNWSGGSRDCAAAGARAPRTASPRVRRGAGRLAPGCWSAGSGASLRPATPASQGCAGRSRRGPRGAPFNWSAFPSCLAAHPHTYTGTKLRGCHFCALLGKESELGALRGVVGEDARASAVSPSCSPALARKAVGITPPKLSFAAALAGNVPL

SEQ ID NO: 8233 - DNA, 3596 bp, Homo sapiens
gggagtcagccagacccccatcctgacaaggcttgtggaactgctgactcaggatgtcggggttcaggctgggtgaccacgtgtggctggagcctccctccacccacaagaccggcgtggccatcgggggcatcatcaaagaggcaaagccaggcaaagtcttggttgaagatgacgagggcaaggaacactggatccgagcagaggactttggtgtcctcagtcccatgcaccccaactcagtccagggtgtggacgacatgatccgcctgggggacctgaacgaggcaggcatggtgcacaacctcctgatccgctaccagcagcacaagatctatacatacacaggctccatcctggtggccgtcaacccgttccaggtgctgccgctctacaccctggagcaggtacagctctactacagccgccatatgggcgagctgcccccgcatgtctttgccatcgccaacaactgctacttcagcatgaagaggaacaagagggaccagtgctgcatcatcagcggcgagtctggggctggcaagacggagaccaccaagctcatcctgcagttcctggccaccatcagtggccagcattcgtggattgagcagcaggtcctggaagccaaccccatcctggaggcctttggaaatgccaagacaatccgcaacgacaactcaagccgctttgggaagtacattgacatctactttaaccccagcggggtgatcgagggcgcgcgcatcgagcaatttctcctggagaagtcccgggtctgccggcaggctcccgaggagcggaactaccatatcttctactgcatgctcatgggggtgagtgctgaggacaagcagctgctgagcctgggcacgccctccgagtaccactacctgaccatggggaactgcacttcctgtgaggggctcaacgacgccaaggactacgcccacatccgctcggccatgaagatcctccagttctccgactccgagagctgggacgtcatcaagctgctggctgccattctccacctggggaatgtggggttcatggcttcggtcttcgagaacctggacgcctcagacgtgatggagacgcccgcctttcccaccgtgatgaagttactggaggtgcagcaccaggagctccgggactgtctgatcaagcacaccatcctcatccgaggggaatttgtcaccaggtccctgaacattgcccaggctgctgaccggagggacgcctttgtcaagggcatctatgggcacctcttcctgtggattgtcaagaagatcaatgccgccatcttcacaccaccagcccaggaccccaaaaatgtgcggagggccatcggcctcctggacatatttggctttgaaaatttcgagaacaatagcttcgagcagctctgcatcaacttcgccaacgagcacctgcagcagttctttgtgcagcacgtgttcaccatggagcaagaggagtaccgctcggagaacatctcctgggactatatccactacaccgacaatcggcccaccctggacctgctggccctcaagcccatgagcatcatctccctcctggacgaagaaagccgcttcccgcaggggacagatctcaccatgctgcaaaagctgaacagcgtccatgccaacaacaaggccttcctacagcccaagaacatccacgatgccagatttggcattgcccattttgccggcgaggtgtactaccaagcagaaggcttcctggagaagaaccgagacgtgctgagcacagatatcctcaccctggtttactcctccaaaaacaagtttctgagggagatattcaacttggagttagcagagaccaagctgggccatgggaccatccgccaggcaaaggcaggaaaccatctcttcaagtctgcagactcaaataaacggccctccaccttaggaagccagttcaaacagtctctggaccagctgatgaaaatcctgaccaactgccagccttacttcatccgctgcatcaaacctaatgagtacaagaagccgctgctgttcgaccgggagctgtgcctgcggcagctgcgatactcgggcatgatggagaccgtgcacatccgcaagtcgggcttccccatccgctacacgttcgaggagttctcgcagaggttcggcgtgttgctgcccaacgccatgcggatgcagctgcaaggcaagctccgccagatgaccctgggcatcactgacgtgtggctgcggacagacaaagactggaaagcggggaagacaaaaattttcctgagggatcatcaggacactctgctggaggtacagagaagccaggtgctagacagagcggcgctcagcatccagaaagtccttcggggctacagatacaggaaggagttcctgaggcagaggcgggcagctgtgaccctgcaggcctggtggagaggctactgcaacaggaggaatttcaagctgatcctcgtgggctttgagcgcctgcaggctattgcccggagccagccgctggcgaggcagtaccaggccatgcggcagaggacagtccagctgcaggccctgtgcaggggatacctggtgcgccagcaagtccaggccaagaggagggcagtggtggtcattcaggcccatgccaggggcatggctgcccggcgcaacttccagcaaaggaaggccaatgcgccgctggtcatcccggccgaggggcagaaaagccaaggcgctctccctgccaagaagcgcagatccatctacgacaccgtcactgacacggagatggtggagaaggtgttcggcttcctccctgccatgattgggggccaggagggccaggcctcgccgcactttgaggatctggaatcgaagacccagaagctgcttgaggttgacctggacacagtccccatggcggaggagcctgaggaggatgtggatggcctggccgagtacaccttccccaagtttgctgtgacttacttccagaaatcagccagccacacacacatccggcggcccctccgatacccgttgctttaccacgaagatgacactgactgcttggccgccctggtcatatggaacgtcatcctgaggttcatgggtgatctcccagagccagtgctgtatgccaggagcagccagcagggcagctcagtgatgcggcagatccatgacacgctgggcagggagcacggtgcccaggttccacagcacagtagatctgcacaggcaagtggggggcagcagcgggcagaggagggcgacacctaccaggtggccagccagctgaacattggagaggaggcattggagcctgatggccttggtgcagaccggcccatgtccaacctggagaaggtgcacttcatcgtgggctacgccatcctgcggcccagcctcaggatgggctcagaattctccaggaacaagcaggcgctaatgtctttgttcatggaggtccctaactccagagtacaaaagtcaagcactagcaagaactcaatcaacaggctctattctagtaccctgggaggtggcaaatgggcttctggagctcagcaggcatcagatggggagtga

SEQ ID NO: 8234 - protein, 1180 aa, Homo sapiens
MSGFRLGDHVWLEPPSTHKTGVAIGGIIKEAKPGKVLVEDDEGKEHWIRAEDFGVLSPMHPNSVQGVDDMIRLGDLNEAGMVHNLLIRYQQHKIYTYTGSILVAVNPFQVLPLYTLEQVQLYYSRHMGELPPHVFAIANNCYFSMKRNKRDQCCIISGESGAGKTETTKLILQFLATISGQHSWIEQQVLEANPILEAFGNAKTIRNDNSSRFGKYIDIYFNPSGVIEGARIEQFLLEKSRVCRQAPEERNYHIFYCMLMGVSAEDKQLLSLGTPSEYHYLTMGNCTSCEGLNDAKDYAHIRSAMKILQFSDSESWDVIKLLAAILHLGNVGFMASVFENLDASDVMETPAFPTVMKLLEVQHQELRDCLIKHTILIRGEFVTRSLNIAQAADRRDAFVKGIYGHLFLWIVKKINAAIFTPPAQDPKNVRRAIGLLDIFGFENFENNSFEQLCINFANEHLQQFFVQHVFTMEQEEYRSENISWDYIHYTDNRPTLDLLALKPMSIISLLDEESRFPQGTDLTMLQKLNSVHANNKAFLQPKNIHDARFGIAHFAGEVYYQAEGFLEKNRDVLSTDILTLVYSSKNKFLREIFNLELAETKLGHGTIRQAKAGNHLFKSADSNKRPSTLGSQFKQSLDQLMKILTNCQPYFIRCIKPNEYKKPLLFDRELCLRQLRYSGMMETVHIRKSGFPIRYTFEEFSQRFGVLLPNAMRMQLQGKLRQMTLGITDVWLRTDKDWKAGKTKIFLRDHQDTLLEVQRSQVLDRAALSIQKVLRGYRYRKEFLRQRRAAVTLQAWWRGYCNRRNFKLILVGFERLQAIARSQPLARQYQAMRQRTVQLQALCRGYLVRQQVQAKRRAVVVIQAHARGMAARRNFQQRKANAPLVIPAEGQKSQGALPAKKRRSIYDTVTDTEMVEKVFGFLPAMIGGQEGQASPHFEDLESKTQKLLEVDLDTVPMAEEPEEDVDGLAEYTFPKFAVTYFQKSASHTHIRRPLRYPLLYHEDDTDCLAALVIWNVILRFMGDLPEPVLYARSSQQGSSVMRQIHDTLGREHGAQVPQHSRSAQASGGQQRAEEGDTYQVASQLNIGEEALEPDGLGADRPMSNLEKVHFIVGYAILRPSLRMGSEFSRNKQALMSLFMEVPNSRVQKSSTSKNSINRLYSSTLGGGKWASGAQQASDGE

SEQ ID NO: 8235 - DNA, 532 bp, Homo sapiens
ggttgtgcagctgggttcctgggggtccctggagtttgaaggggtgccttaagagccatctgagggcgccgctggtcatcccggccgaggggcagaaaagccaaggcgctctccctgccaagaagcgcagatccatctacgacaccgtcactgacacggagatggtggagaaggtgttcggcttcctccctgccatgattgggggccaggagggccaggcctcgccgcactttgaggatctggaatcgaagacccagaagctgcttgaggttgacctggacacagtccccatggcggaggagcctgaggaggatgtggatggcctggccgagtacaccttccccaagtttgctgtgacttacttccagaaatcagccagccacacacacatccggcggcccctccgatacccgttgctttaccacgaagatgacactgactgcttggtaccagggttcactggcttctagtggatcaggccagccccgagcctggggtgtgagctatggctcggggaaagaaggaaggggcc

SEQ ID NO: 8236 - protein, 102 aa, Homo sapiens
MVEKVFGFLPAMIGGQEGQASPHFEDLESKTQKLLEVDLDTVPMAEEPEEDVDGLAEYTFPKFAVTYFQKSASHTHIRRPLRYPLLYHEDDTDCLVPGFTGF

SEQ ID NO: 8237 - DNA, 3686 bp, Homo sapiens
tcaccgtgagactggggatcccgcacatctgggagcagatgggctgtgcaaagggcgcggctgctgaggacagggctgtggctggagaacctgctgcttcctgaagccgagccccaccctaaaggaccgagagcacaggccatgggagaggaatcgagtagggatgcagagcctggtggcactgtcctgagagaggaggaggctgggcagggccccggcgctggagaggtgccctgcatatgggacctctcagaggtgcacaagagctgtgtgcccaggtacccctgtctcctctcctcctccagcccccagcctactctcctaatggtctgtgtctttcagggatgagatttactgccagatctgcaagcagctctcggagaacttcaaaacaagcagcctggcccggggctggatcctgctcagcctctgcctcggctgcttcccaccctcagagaggttcatgaagtatctactgaacttcatcggccaagggccggcgacctacggccccttctgtgccgagcgcctgagacgcacctatgccaatggggtgcgtgcggagccccccacctggctggagctgcaggctgtcaagtccaagaagcacatccccatccaagtcatcttggccactggagagagcctaaccgtccccgtggactcagcctccacatctcgggaaatgtgcatgcacatcgctcacaagcagggcctcagcgaccacctgggcttctccctccaggtcgccgtgtacgacaagttctggtccctgggcagcgggcgcgaccacatgatggatgccatcgcccggtgtgagcagatggcccaggagaggggcgagagccagcgccagtcaccctggcgcatctacttccggaaggaattcttcaccccctggcacgactcccgggaggaccctgtcagcaccgagcttatttaccgccaagtcctccgaggagtctggtctggcgagtacagcttcgagaaggaggaagagctggttgagctgctggcccggcactgctacgtgcagctcggcgcctcagcagagagcaaggctgtccaggagctgctgcccagctgcatcccccacaagctgtacaggaccaagcccccagacaggtgggcgagcctcgtcactgccgcctgcgccaaggccccatacactcagaagcaagtcacaccactggccgtgcgagagcaggtggtggacgccgcccgcctgcagtggccgctgctcttctcccggctcttcgaagtcatcacactctcaggcccccgcctgcccaagacgcagctgatcttggctgttaactggaaggggctttgcttcctggaccagcaggagaagatgctgctggaactctctttcccagaggtcatgggtctggccaccaacagggaggcccagggcgggcagaggctgctgctctccacgatgcatgaggagtacgagtttgtgtcacccagcagtgtggccatcgctgagctggtggccctgttcctggagggcctgaaggagaggtccattttcgccatggccctgcaggacaggaaggccacagatgacaccaccctcctggccttcaagaagggggacctgttggtcctcacaaagaagcaggggctgctggcctctgagaactggaccctcggccagaacgacaggacaggcaagacggggctggtgcccatggcctgcctctacaccatccccacggtcactaagccctcggcacagctgctgagcttgcttgccatgtcaccagagaagaggaagctggcggctcaggaggggcagttcacagagccacgtcctgaggagccacccaaggaaaagctgcacaccctggaggagttctcctatgagttcttcagggctccagagaaggacatggtgagcatggccgtgctgcccctggcccgtgcccgtggccacctgtgggcctattcctgcgagccgctgcgacagccgctgctcaagcgagtccacgccaacgtcgacctctgggacatcgcctgccagatctttccacacccatcctccggtacatgggcgactacccttctcggcaggcctggcccaccctggagctcaccgaccagatcttcacactggccctgcagcacccggccctccaggacgaggtctactgccagatcctgaagcagctgacgcacaactccaacaggcacagcgaagagcggggctggcagctgctgtggctgtgcacgggcctcttcccgcccagcaaggggctgctgccccatgcccagaagtttatagacactcggagggggaagctgctggcccccgactgcagccgccgaatccagaaggtcctgaggacggggccccggaagcagcccccgcaccaggtggaggtggaggccgcagagcagaacgtctcccgcatctgccacaagatctacttccccaatgacaccagtgagatgctggaggtggttgccaacacacgggtgcgggatgtgtgtgacagcattgccaccaggctgcagctggcctcctgggagggctgcagcctcttcatcaagatttcagacaaggtcatcagccagaaggagggagacttcttctttgattccttgagggaggtgtctgactgggtgaagaagaacaagccccagaaagaaggggcccccgtgacgctcccctaccaggtgtacttcatgcggaaattgtggctcaacatatctccagggaaggatgtgaatgcagacaccatactccattaccaccaggagctgcccaagtacctgcgcggattccacaagtgttcgcgggaggatgccatccacctggcgggcctcatctacaaggcccagttcaacaacgaccggtcccagctggctagtgtccccaagatcctgagggaactggtgcctgagaacctcacacgcctgatgtcctcggaggagtggaaaaagagcatccttctagcctatgacaagcataaggacaagacagtggaggaggccaaggtggccttcctgaagtggatctgccggtggcccaccttcggatccgccttcttcgaggtgaagcaaacctcggagccttcctacccggacgtcatcctcatcgccatcaaccgacatggggttctgctcatccaccccaagaccaaggacctgctcaccacctatcccttcaccaagatctccagctggagcagcggcagcacctacttccacatggcgctggggagcctgggccgtggcagccgcctgctgtgcgagacctccctgggctataagatggatgacctgctgacctcatatgtgcagcagctcctgagtgccatgaacaagcagcggggctccaaggccccagccctggccagcacctagcagcggatgctggcgtgtctgctcaggcgcccttcccgacctctagcctggcggcaccttcccaggccctctcaacccagggcctgtccttggcgggcagccttccatgctgccccccatacaaagcccactcagccccgcaggcggccccctctgtcctgggcgctgcccagggaggccaaaagacgggcccagaatggggtcgggagtctcggacccccaggctattggtggatgactgactgacaggacacctcccaaccccaccccaccccaccagaatgttcaataaaaactcctggagcaggaga

SEQ ID NO: 8238 - protein, 568 aa, Homo sapiens
MKYLLNFIGQGPATYGPFCAERLRRTYANGVRAEPPTWLELQAVKSKKHIPIQVILATGESLTVPVDSASTSREMCMHIAHKQGLSDHLGFSLQVAVYDKFWSLGSGRDHMMDAIARCEQMAQERGESQRQSPWRIYFRKEFFTPWHDSREDPVSTELIYRQVLRGVWSGEYSFEKEEELVELLARHCYVQLGASAESKAVQELLPSCIPHKLYRTKPPDRWASLVTAACAKAPYTQKQVTPLAVREQVVDAARLQWPLLFSRLFEVITLSGPRLPKTQLILAVNWKGLCFLDQQEKMLLELSFPEVMGLATNREAQGGQRLLLSTMHEEYEFVSPSSVAIAELVALFLEGLKERSIFAMALQDRKATDDTTLLAFKKGDLLVLTKKQGLLASENWTLGQNDRTGKTGLVPMACLYTIPTVTKPSAQLLSLLAMSPEKRKLAAQEGQFTEPRPEEPPKEKLHTLEEFSYEFFRAPEKDMVSMAVLPLARARGHLWAYSCEPLRQPLLKRVHANVDLWDIACQIFPHPSSGTWATTLLGRPGPPWSSPTRSSHWPCSTRPSRTRSTARS

SEQ ID NO: 8239 - DNA, 4394 bp, Homo sapiens
tcaccgtgagactggggatcccgcacatctgggagcagatgggctgtgcaaagggcgcggctgctgaggacagggctgtggctggagaacctgctgcttcctgaagccgagccccaccctaaaggaccgagagcacaggccatgggagaggaatcgagtagggatgcagagcctggtggcactgtcctgagagaggaggaggctgggcagggccccggcgctggagaggtgccctgcatatgggacctctcagaggtgcacaagagctgtgtgcccaggtacccctgtctcctctcctcctccagcccccagcctactctcctaatggtctgtgtctttcagggatgagatttactgccagatctgcaagcagctctcggagaacttcaaaacaagcagcctggcccggggctggatcctgctcagcctctgcctcggctgcttcccaccctcagagaggttcatgaagtatctactgaacttcatcggccaagggccggcgacctacggccccttctgtgccgagcgcctgagacgcacctatgccaatggggtgcgtgcggagccccccacctggctggagctgcaggctgtcaagtccaagaagcacatccccatccaagtcatcttggccactggagagagcctaaccgtccccgtggactcagcctccacatctcgggaaatgtgcatgcacatcgctcacaagcagggcctcagcgaccacctgggcttctccctccaggtcgccgtgtacgacaagttctggtccctgggcagcgggcgcgaccacatgatggatgccatcgcccggtgtgagcagatggcccaggagaggggcgagagccagcgccagtcaccctggcgcatctacttccggaaggaattcttcaccccctggcacgactcccgggaggaccctgtcagcaccgagcttatttaccgccaagtcctccgaggagtctggtctggcgagtacagcttcgagaaggaggaagagctggttgagctgctggcccggcactgctacgtgcagctcggcgcctcagcagagagcaaggctgtccaggagctgctgcccagctgcatcccccacaagctgtacaggaccaagcccccagacaggtgggcgagcctcgtcactgccgcctgcgccaaggccccatacactcagaagcaagtcacaccactggccgtgcgagagcaggtggtggacgccgcccgcctgcagtggccgctgctcttctcccggctcttcgaagtcatcacactctcaggcccccgcctgcccaagacgcagctgatcttggctgttaactggaaggggctttgcttcctggaccagcaggagaagatgctgctggaactctctttcccagaggtcatgggtctggccaccaacagggaggcccagggcgggcagaggctgctgctctccacgatgcatgaggagtacgagtttgtgtcacccagcagtgtggccatcgctgagctggtggccctgttcctggagggcctgaaggagaggtccattttcgccatggccctgcaggacaggaaggccacagatgacaccaccctcctggccttcaagaagggggacctgttggtcctcacaaagaagcaggggctgctggcctctgagaactggaccctcggccagaacgacaggacaggcaagacggggctggtgcccatggcctgcctctacaccatccccacggtcactaagccctcggcacagctgctgagcttgcttgccatgtcaccagagaagaggaagctggcggctcaggaggggcagttcacagagccacgtcctgaggagccacccaaggaaaagctgcacaccctggaggagttctcctatgagttcttcagggctccagagaaggacatggtgagcatggccgtgctgcccctggcccgtgcccgtggccacctgtgggcctattcctgcgagccgctgcgacagccgctgctcaagcgagtccacgccaacgtcgacctctgggacatcgcctgccagatctttccacacccatcctccggtacatgggcgactacccttctcggcaggcctggcccaccctggagctcaccgaccagatcttcacactggccctgcagcacccggccctccaggacgaggtctactgccagatcctgaagcagctgacgcacaactccaacaggcacagcgaagagcggggctggcagctgctgtggctgtgcacgggcctcttcccgcccagcaaggggctgctgccccatgcccagaagtttatagacactcggagggggaagctgctggcccccgactgcagccgccgaatccagaaggtcctgaggacggggccccggaagcagcccccgcaccaggtggaggtggaggccgcagagcagaacgtctcccgcatctgccacaagatctacttccccaatgacaccagtgagatgctggaggtggttgccaacacacgggtgcgggatgtgtgtgacagcattgccaccaggctgcagctggcctcctgggagggctgcagcctcttcatcaagatttcagacaaggtgggccgggctggggctgggcagacggtgggcggacgggcagtgagcgaggccctaggtgctgcctgtgggggcctcagcctaccaggggcacccatgctggaccaggctgcacggccagggctgctgggacagaggtaggtggggtcctggagcagagccagctccacacgccaatagcccacgcacagccgactccagcgcagcacccaggccgtaggcggccactggaccagaacccagcaggttctcaggaggacagtccccggaagccacccaacttccctgtaccttccccttccccaggtcatcagccagaaggagggagacttcttctttgattccttgagggaggtgtctgactgggtgaagaagaacaagccccagaaagaaggggcccccgtgacgctcccctaccaggtgtacttcatgcggaaattgtggctcaacatatctccagggaaggatgtgaatgcagacaccatactccattaccaccaggagctgcccaagtacctgcgcggattccacaagtgttcgcgggaggatgccatccacctggcgggcctcatctacaaggcccagttcaacaacgaccggtcccagctggctagtgtccccaagatcctgagggaactggtgcctgagaacctcacacgcctgatgtcctcggaggagtggaaaaagagcatccttctagcctatgacaagcataaggacaagacagtggaggaggccaaggtggccttcctgaagtggatctgccggtggcccaccttcggatccgccttcttcgaggtgaagcaaacctcggagccttcctacccggacgtcatcctcatcgccatcaaccgacatggggttctgctcatccaccccaagaccaaggacctgctcaccacctatcccttcaccaagatctccagctggagcagcggcagcacctacttccacatggcgctggggagcctgggccgtggcagccgcctgctgtgcgagacctccctggtgagctcaggttctttctcccatccaagatgcataggacagagctgctggagactgggttccccaccctcacccctttcaagtggctcactaagagggctcagtcacagggcccaggcggggccagcagatctggagagggcctgggtgcatccccaggaccagcagccaaggtggcaaggccaggcgggaccccctgcgcccttggcccattccaaggagggagggagacccagctccagcagggcaagcagaaatgacggccccaatggcaggagcccgccttccctttctccatgccctgcactgctggttgctgaggaagagaaggtggtccctgagtccaggacccccacctgccctctgcacccacagcctctgacccccccgtcccctgtccagggctataagatggatgacctgctgacctcatatgtgcagcagctcctgagtgccatgaacaagcagcggggctccaaggccccagccctggccagcacctagcagcggatgctggcgtgtctgctcaggcgcccttcccgacctctagcctggcggcaccttcccaggccctctcaacccagggcctgtccttggcgggcagccttccatgctgccccccatacaaagcccactcagccccgcaggcggccccctctgtcctgggcgctgcccagggaggccaaaagacgggcccagaatggggtcgggagtctcggacccccaggctattggtggatgactgactgacaggacacctcccaaccccaccccaccccaccagaatgttcaataaaaactcctggagcaggaga

SEQ ID NO: 8240 - protein, 568 aa, Homo sapiens; identical to SEQ ID NO: 8238

SEQ ID NO: 8241 - DNA, 4923 bp, Homo sapiens
tcaccgtgagactggggatcccgcacatctgggagcagatgggctgtgcaaagggcgcggctgctgaggacagggctgtggctggagaacctgctgcttcctgaagccgagccccaccctaaaggaccgagagcacaggccatgggagaggaatcgagtagggatgcagagcctggtggcactgtcctgagagaggaggaggctgggcagggccccggcgctggagaggtgccctgcatatgggacctctcagaggtgcacaagagctgtgtgcccaggtacccctgtctcctctcctcctccagcccccagcctactctcctaatggtctgtgtctttcagggatgagatttactgccagatctgcaagcagctctcggagaacttcaaaacaagcagcctggcccggggctggatcctgctcagcctctgcctcggctgcttcccaccctcagagaggttcatgaagtatctactgaacttcatcggccaagggccggcgacctacggccccttctgtgccgagcgcctgagacgcacctatgccaatggggtgcgtgcggagccccccacctggctggagctgcaggctgtcaagtccaagaagcacatccccatccaagtcatcttggccactggagagagcctaaccgtccccgtggactcagcctccacatctcgggaaatgtgcatgcacatcgctcacaagcagggcctcagcgaccacctgggcttctccctccaggtcgccgtgtacgacaagttctggtccctgggcagcgggcgcgaccacatgatggatgccatcgcccggtgtgagcagatggcccaggagaggggcgagagccagcgccagtcaccctggcgcatctacttccggaaggaattcttcaccccctggcacgactcccgggaggaccctgtcagcaccgagcttatttaccgccaagtcctccgaggagtctggtctggcgagtacagcttcgagaaggaggaagagctggttgagctgctggcccggcactgctacgtgcagctcggcgcctcagcagagagcaaggctgtccaggagctgctgcccagctgcatcccccacaagctgtacaggaccaagcccccagacaggtgggcgagcctcgtcactgccgcctgcgccaaggccccatacactcagaagcaagtcacaccactggccgtgcgagagcaggtggtggacgccgcccgcctgcagtggccgctgctcttctcccggctcttcgaagtcatcacactctcaggcccccgcctgcccaagacgcagctgatcttggctgttaactggaaggggctttgcttcctggaccagcaggagaagatgctgctggaactctctttcccagaggtcatgggtctggccaccaacagggaggcccagggcgggcagaggctgctgctctccacgatgcatgaggagtacgagtttgtgtcacccagcagtgtggccatcgctgagctggtggccctgttcctggagggcctgaaggagaggtccattttcgccatggccctgcaggacaggaaggccacagatgacaccaccctcctggccttcaagaagggggacctgttggtcctcacaaagaagcaggggctgctggcctctgagaactggaccctcggccagaacgacaggacaggcaagacggggctggtgcccatggcctgcctctacaccatccccacggtcactaagccctcggcacagctgctgagcttgcttgccatgtcaccagagaagaggaagctggcggctcaggaggggcagttcacagagccacgtcctgaggagccacccaaggaaaagctgcacaccctggaggagttctcctatgagttcttcagggctccagagaaggacatggtgagcatggccgtgctgcccctggcccgtgcccgtggccacctgtgggcctattcctgcgagccgctgcgacagccgctgctcaagcgagtccacgccaacgtcgacctctgggacatcgcctgccagatctttccacacccatcctccggtacatgggcgactacccttctcggcaggcctggcccaccctggagctcaccgaccagatcttcacactggccctgcagcacccggccctccaggacgaggtctactgccagatcctgaagcagctgacgcacaactccaacaggcacagcgaagagcggggctggcagctgctgtggctgtgcacgggcctcttcccgcccagcaaggggctgctgccccatgcccagaagtttatagacactcggagggggaagctgctggcccccgactgcagccgccgaatccagaaggtcctgaggacggggccccggaagcagcccccgcaccaggtggaggtggaggccgcagagcagaacgtctcccgcatctgccacaagatctacttccccaatgacaccagtgagatgctggaggtggttgccaacacacgggtgcgggatgtgtgtgacagcattgccaccaggctgcagctggcctcctgggagggctgcagcctcttcatcaagatttcagacaaggtgggccgggctggggctgggcagacggtgggcggacgggcagtgagcgaggccctaggtgctgcctgtgggggcctcagcctaccaggggcacccatgctggaccaggctgcacggccagggctgctgggacagaggtaggtggggtcctggagcagagccagctccacacgccaatagcccacgcacagccgactccagcgcagcacccaggccgtaggcggccactggaccagaacccagcaggttctcaggaggacagtccccggaagccacccaacttccctgtaccttccccttccccaggtcatcagccagaaggagggagacttcttctttgattccttgagggaggtgtctgactgggtgaagaagaacaagccccagaaagaaggtgaggaggcctctgtggagctgggggagggcgtggctgggtgggtcgagggggcactggcggcctctgtgcggcccatgcccattcatccatccattcgttcccgtgtgtccctgggttgtgggaacaaccaggccctggggcccggcggtgagggccagctcaggcagaaacaggtggctgcaccttggagtgatgaaggatgccccagggctgaggggcatgaccctcatgggctgggagtgcgagtccaggaatgttcctggagaaggcagcctctacactaatattgaaggaaaatgtggggactggggaggaagaagcgtgggggctttcgaggcagggaggtggcaggcgcagtgtggggggtggcagggggtcagggctggtgtacctgctgggacaggcttggtgcccactgctggccctcgcccaggggcccccgtgacgctcccctaccaggtgtacttcatgcggaaattgtggctcaacatatctccagggaaggatgtgaatgcagacaccatactccattaccaccaggtaccgggcaggctgccctggtgggcactggggccacccccatcttcccacacctgttctgaggctgtagaagccagcaggccagggcagggccagcctcagccctgggtaccagcccatgtggtaggcagaccaagcccctgagggctctggaaccaggagcagagggcagcaatgtttggggacagtgactgcactggcacctgcagcatgacttggagagggtgggacagagggtcctgtgacccatggagcagtggccgtggcctgcagggccaaccacatgggtggagcaggccatcacctccacgcagatgtcagggggccctgccctgactcagggtcattcccctggcctgaaactctctaccctgctcagtccgtcctggatggagtgggctaagccccagttccccaccatctgagcgggaaagaggttgggggcgggtgggccgcagctggagacccagcatgcccagtgtgtccatcacccaggagctgcccaagtacctgcgcggattccacaagtgttcgcgggaggatgccatccacctggcgggcctcatctacaaggcccagttcaacaacgaccggtcccagctggctagtgtccccaagatcctgagggaactggtgcctgagaacctcacacgcctgatgtcctcggaggagtggaaaaagagcatccttctagcctatgacaagcataaggacaagacagtggaggaggccaaggtggccttcctgaagtggatctgccggtggcccaccttcggatccgccttcttcgaggtgaagcaaacctcggagccttcctacccggacgtcatcctcatcgccatcaaccgacatggggttctgctcatccaccccaagaccaaggacctgctcaccacctatcccttcaccaagatctccagctggagcagcggcagcacctacttccacatggcgctggggagcctgggccgtggcagccgcctgctgtgcgagacctccctgggctataagatggatgacctgctgacctcatatgtgcagcagctcctgagtgccatgaacaagcagcggggctccaaggccccagccctggccagcacctagcagcggatgctggcgtgtctgctcaggcgcccttcccgacctctagcctggcggcaccttcccaggccctctcaacccagggcctgtccttggcgggcagccttccatgctgccccccatacaaagcccactcagccccgcaggcggccccctctgtcctgggcgctgcccagggaggccaaaagacgggcccagaatggggtcgggagtctcggacccccaggctattggtggatgactgactgacaggacacctcccaaccccaccccaccccaccagaatgttcaataaaaactcctggagcaggaga

SEQ ID NO: 8242 - protein, 568 aa, Homo sapiens; identical to SEQ ID NO: 8238

SEQ ID NO: 8243 - DNA, 439 bp, Homo sapiens
ggcgtgtgaggttctcaggcaccagttccctcaggatcttggggacactagccagctgggaccggtcgttgttgaactgggccttgtagatgaggcccgccaggtggatggcatcctcccgcgaacacttgtggaatccgcgcagggccatggcgaaaatggacctctccttcaggccctccaggaacagggccaccagctcagcgatggccacactgctgggtgacacaaactcgtactcctcatgcatcgtggagagcagcagcctctgcccgccctgggcctccctggagatgaaggacagcgtgaccaggagccccctccaccttcccctgatccagcccctaaacagcctcgggaggtggggttgggggtcctgagtcacagatgaggacacagagctgctctgccagggccaggactaggccagacaccactg

SEQ ID NO: 8244 - protein, 96 aa, Homo sapiens
MRPARWMASSREHLWNPRRAMAKMDLSFRPSRNRATSSAMATLLGDTNSYSSCIVESSSLCPPWASLEMKDSVTRSPLHLPLIQPLNSLGRWGWGS

SEQ ID NO: 8245 - DNA, 1212 bp, Homo sapiens
ctcgcccaggggcccccgtgacgctcccctaccaggtgtacttcatgcggaaattgtggctcaacatatctccagggaaggatgtgaatgcagacaccatactccattaccaccaggtaccgggcaggctgccctggtgggcactggggccacccccatcttcccacacctgttctgaggctgtagaagccagcaggccagggcagggccagcctcagccctgggtaccagcccatgtggtaggcagaccaagcccctgagggctctggaaccaggagcagagggcagcaatgtttggggacagtgactgcactggcacctgcagcatgacttggagagggtgggacagagggtcctgtgacccatggagcagtggccgtggcctgcagggccaaccacatgggtggagcaggccatcacctccacgcagatgtcagggggccctgccctgactcagggtcattcccctggcctgaaactctctaccctgctcagtccgtcctggatggagtgggctaagccccagttccccaccatctgagcgggaaagaggttgggggcgggtgggccgcagctggagacccagcatgcccagtgtgtccatcacccaggagctgcccaagtacctgcgcggattccacaagtgttcgcgggaggatgccatccacctggcgggcctcatctacaaggcccagttcaacaacgaccggtcccagctggctagtgtccccaagatcctgagggaactggtgcctgagaacctcacacgcctgatgtcctcggaggagtggaaaaagagcatccttctagcctatgacaagcataaggacaagacagtggaggaggccaaggtggccttcctgaagtggatctgccggtggcccaccttcggatccgccttcttcgaggtgaagcaaacctcggagccttcctacccggacgtcatcctcatcgccatcaaccgacatggggttctgctcatccaccccaagaccaaggacctgctcaccacctatcccttcaccaagatctccagctggagcagcggcagcacctacttccacatggcgctggggagcctgggccgtggcagccgcctgctgtgcgagacctccctggtgagctcaggttctttctcccatccaagatgcataggacagagctgctggagactgggttccccaccctcacccctttcaagtggctcactaa

SEQ ID NO: 8246 - protein, 207 aa, Homo sapiens
MPSVSITQELPKYLRGFHKCSREDAIHLAGLIYKAQFNNDRSQLASVPKILRELVPENLTRLMSSEEWKKSILLAYDKHKDKTVEEAKVAFLKWICRWPTFGSAFFEVKQTSEPSYPDVILIAINRHGVLLIHPKTKDLLTTYPFTKISSWSSGSTYFHMALGSLGRGSRLLCETSLVSSGSFSHPRCIGQSCWRLGSPPSPLSSGS

SEQ ID NO: 8247 - DNA, 901 bp, Homo sapiens
ctcattgccttctcccttcctgttccctcatctctgccttccccatgtctctcctctccttggccgtggcttctgtctgtgaggaggcaggagctggggagtgggagcctatgaccccacgtctgacagccatgtccacctgtgcccacagcttccgcccacagacctccagggacaggagcaaattgcaccacagctccccgcctggcctggccctccccaggcggctcagtggctcatgctgtcctgtgagagcccctgccccagagcggccccactaagcgcatgtggctcctgggctacccacagccagggcagcctgctggagccacagggccagggccatgcagatggaggcctctgggagccacctccaatccctcaccactcactcaaccagtggcacagtgtccttgtgcccacactgagccagcaagtcctgctgtccacacccacaagctacctggagggacaggacccacctccatccttcggaaggccttcctggaatcccaccttggcctccgccctcggttccgccccgcccctctccccccgaccttggggcttgtgtcgagcccttgggtggggccaggaggaggtgatggcgtcagaggaggtgtggtcagaggtgacttgttcccacctccagggaggacgcttcgtcttcggccagcgcagacctggtgtttgtttgttgggctcacgcttgcacaatgaaggcttgttcacacaaccacagcagcctgcgtggtttgtggcgggggtcgggggtggaggggatggcagcagctctggacacgctgctgctggggcagttgaacagagggacagacatagacaggcacgagttcagggggccctagcctctatcccaggccaggctgccataagcagttga

SEQ ID NO: 8248 - protein, 220 aa, Homo sapiens
MLSCESPCPRAAPLSACGSWATHSQGSLLEPQGQGHADGGLWEPPPIPHHSLNQWHSVLVPTLSQQVLLSTPTSYLEGQDPPPSFGRPSWNPTLASALGSAPPLSPRPWGLCRALGWGQEEVMASEEVWSEVTCSHLQGGRFVFGQRRPGVCLLGSRLHNEGLFTQPQQPAWFVAGVGGGGDGSSSGHAAAGAVEQRDRHRQARVQGALASIPGQAAISS

SEQ ID NO: 8249 - DNA, 906 bp, Homo sapiens
cgacatgaagcccgtgtgtaagaggtgctacgagaagttcccgctggagctgaagaagcggctgaagaagctgtcggagctgacctcccgcaaggcccagcccaaggccacagacctcaactctgcctgaaggccctcttgcgcagctgcctctcggcccctccgccttctcccctcctgctgtccatgcttggccccctcgtccccatccacctgtgccctccgcatcttaccctccctttctctttcctcattgccttctcccttcctgttccctcatctctgccttccccatgtctctcctctccttggccgtggcttctgtctgtgaggaggcaggagctggggagtgggagcctatgaccccacgtctgacagccatgtccacctgtgcccacagcttccgcccacagacctccagggacaggagcaaattgcaccacagctccccgcctggcctggccctccccaggcggctcagtggctcatgctgtcctgtgagagcccctgccccagagcggccccactaagcgcatgtggctcctgggctacccacatcaaccagtggcacagtgtccttgtgcccacactgagccagcaagtcctgctgtccacacccacaagctacctggagggacaggacccacctccatccttcggaaggccttcctggaatcccaccttggcctccgccctcggttccgccccgcccctctccccccgaccttggggcttgtgtcgagcccttgggtggggccaggaggaggtgatggcgtcagaggaggtgtggtcagaggtgacttgttcccacctccagggaggacgcttcgtcttcggccagcgcagacctggtgtttgtttgttgggctcacgcttgcacaatgaaggcttgttcacacaaccaca

SEQ ID NO: 8250 - protein, 138 aa, Homo sapiens
MLSCESPCPRAAPLSACGSWATHINQWHSVLVPTLSQQVLLSTPTSYLEGQDPPPSFGRPSWNPTLASALGSAPPLSPRPWGLCRALGWGQEEVMASEEVWSEVTCSHLQGGRFVFGQRRPGVCLLGSRLHNEGLFTQ

SEQ ID NO: 8251 - DNA, 881 bp, Homo sapiens
gaacaagtttgtggagttcgacatgaagcccgtgtgtaagaggtgctacgagaagttcccgctggagctgaagaagcggctgaagaagctgtcggagctgacctcccgcaaggcccagcccaaggccacagacctcaactctgcctgaaggccctcttgcgcagctgcctctcggcccctccgccttctcccctcctgctgtccatgcttggccccctcgtccccatccacctgtgccctccgcatcttaccctccctttctctttcctcattgccttctcccttcctgttccctcatctctgccttccccatgtctctcctctccttggccgtggcttctgtctgtgaggaggcaggagctggggagtgggagcctatgaccccacgtctgacagccatgtccacctgtgcccacagcttccgcccacagacctccagggacaggagcaaattgcaccacagctccccgcctggcctggccctccccaggcggctcagtggctcatgctgtcctgtgagagcccctgccccagagcggccccactaagcgcatgtggctcctgggctacccacagccagggcagcctgctggagccacagggccagggccatgcagatggaggcctctgggagccacctccaatccctcaccactcactcaaccagtggcacagtgtccttgtgcccacactgagccagcaagtcctgcttgtcgagcccttgggtggggccaggaggaggtgatggcgtcagaggaggtgtggtcagaggtgacttgttcccacctccagggaggacgcttcgtcttcggccagcgcagacctggtgtttgtttgttgggctcacgcttgcacaatgaaggcttgttcacacaaccaca

SEQ ID NO: 8252 - protein, 108 aa, Homo sapiens
MWLLGYPQPGQPAGATGPGPCRWRPLGATSNPSPLTQPVAQCPCAHTEPASPACRALGWGQEEVMASEEVWSEVTCSHLQGGRFVFGQRRPGVCLLGSRLHNEGLFTQ

SEQ ID NO: 8253 - DNA, 1295 bp, Homo sapiens
ctgcctgcagctactctgacagcctgctcggcccacagctcttcggggacgtctgctacaactgcagccatgtgattgaaggcgatggtgaggccctgtgttccctcccccaccccacctgctctcctggggcctgggtgctgcagctgtgagcccagccgggcctgcggcagcctagccaggcctgctgagtcccacgcttccctcacagtggtgtcggccctcaacaaggcctggtgtgtgagctgcttctcctgctccacctgcaacagcaagctcaccctgaagaacaagtttgtggagttcgacatgaagcccgtgtgtaagaggtgctacgagaagttcccgctggagctgaagaagcggctgaagaagctgtcggagctgacctcccgcaaggcccagcccaaggccacagacctcaactctgcctgaaggccctcttgcgcagctgcctctcggcccctccgccttctcccctcctgctgtccatgcttggccccctcgtccccatccacctgtgccctccgcatcttaccctccctttctctttcctcattgccttctcccttcctgttccctcatctctgccttccccatgtctctcctctccttggccgtggcttctgtctgtgaggaggcaggagctggggagtgggagcctatgaccccacgtctgacagccatgtccacctgtgcccacagcttccgcccacagacctccagggacaggagcaaattgcaccacagctccccgcctggcctggccctccccaggcggctcagtggctcatgctgtcctgtgagagcccctgccccagagcggccccactaagcgcatgtggctcctgggctacccacagccagggcagcctgctggagccacagggccagggccatgcagatggaggcctctgggagccacctccaatccctcaccactcactcaaccagtggcacagtgtccttgtgcccacactgagccagcaagtcctgctgtccacacccacaagctacctggagggacaggacccacctccatccttcggaaggccttcctggaatcccaccttggcctccgccctcggttccgccccgcccctctccccccgaccttggggcttgtgtcgagcccttgggtggggccaggaggaggtgatggcgtcagaggaggtgtggtcagaggtgacttgttcccacctccagggaggacgcttcgtcttcggccagcgcagacctggtgtttgtttgttgggctcacgcttgcacaatgaaggcttgttcacacaaccaca

SEQ ID NO: 8254 - protein, 116 aa, Homo sapiens
MVRPCVPSPTPPALLGPGCCSCEPSRACGSLARPAESHASLTVVSALNKAWCVSCFSCSTCNSKLTLKNKFVEFDMKPVCKRCYEKFPLELKKRLKKLSELTSRKAQPKATDLNSA

SEQ ID NO: 8255 - DNA, 967 bp, Homo sapiens
tgcatgatggccctgggctggggtgtgactgcctgcagctactctgacagcctgctcggcccacagctcttcggggacgtctgctacaactgcagccatgtgattgaaggcgatgtggtgtcggccctcaacaaggcctggtgtgtgagctgcttctcctgctccacctgcaacagcaagctcaccctgaagaacaagtttgtggagttcgacatgaagcccgtgtgtaagaggtgctacgagaagttcccgctggagctgaagaagcggctgaagaagctgtcggagctgacctcccgcaaggcccagcccaaggccacagacctcaactctgcctgaaggccctcttgcgcagctgcctctcggcccctccgccttctcccctcctgctgtccatgcttggccccctcgtccccatccacctgtgccctccgcatcttaccctccctgcggctcagtggctcatgctgtcctgtgagagcccctgccccagagcggccccactaagcgcatgtggctcctgggctacccacagccagggcagcctgctggagccacagggccagggccatgcagatggaggcctctgggagccacctccaatccctcaccactcactcaaccagtggcacagtgtccttgtgcccacactgagccagcaagtcctgctgtccacacccacaagctacctggagggacaggacccacctccatccttcggaaggccttcctggaatcccaccttggcctccgccctcggttccgccccgcccctctccccccgaccttggggcttgtgtcgagcccttgggtggggccaggaggaggtgatggcgtcagaggaggtgtggtcagaggtgacttgttcccacctccagggaggacgcttcgtcttcggccagcgcagacctggtgtttgtttgttgggctcacgcttgcacaatgaaggcttgttcacacaaccaca

SEQ ID NO: 8256 - protein, 189 aa, Homo sapiens
MLGPLVPIHLCPPHLTLPAAQWLMLSCESPCPRAAPLSACGSWATHSQGSLLEPQGQGHADGGLWEPPPIPHHSLNQWHSVLVPTLSQQVLLSTPTSYLEGQDPPPSFGRPSWNPTLASALGSAPPLSPRPWGLCRALGWGQEEVMASEEVWSEVTCSHLQGGRFVFGQRRPGVCLLGSRLHNEGLFTQ

SEQ ID NO: 8257 - DNA, 1142 bp, Homo sapiens
gttggagggccaggctggctgcatgatggccctgggctggggtgtgactgcctgcagctactctgacagcctgctcggcccacagctcttcggggacgtctgctacaactgcagccatgtgattgaaggcgatggaacaagtttgtggagttcgacatgaagcccgtgtgtaagaggtgctacgagaagttcccgctggagctgaagaagcggctgaagaagctgtcggagctgacctcccgcaaggcccagcccaaggccacagacctcaactctgcctgaaggccctcttgcgcagctgcctctcggcccctccgccttctcccctcctgctgtccatgcttggccccctcgtccccatccacctgtgccctccgcatcttaccctccctttctctttcctcattgccttctcccttcctgttccctcatctctgccttccccatgtctctcctctccttggccgtggcttctgtctgtgaggaggcaggagctggggagtgggagcctatgaccccacgtctgacagccatgtccacctgtgcccacagcttccgcccacagacctccagggacaggagcaaattgcaccacagctccccgcctggcctggccctccccaggcggctcagtggctcatgctgtcctgtgagagcccctgccccagagcggccccactaagcgcatgtggctcctgggctacccacagccagggcagcctgctggagccacagggccagggccatgcagatggaggcctctgggagccacctccaatccctcaccactcactcaaccagtggcacagtgtccttgtgcccacactgagccagcaagtcctgctgtccacacccacaagctacctggagggacaggacccacctccatccttcggaaggccttcctggaatcccaccttggcctccgccctcggttccgccccgcccctctccccccgaccttggggcttgtgtcgagcccttgggtggggccaggaggaggtgatggcgtcagaggaggtgtggtcagaggtgacttgttcccacctccagggaggacgcttcgtcttcggccagcgcagacctggtgtttgtttgttgggctcacgcttgcacaatgaaggcttgttcacacaaccaca

SEQ ID NO: 8258 - protein, 45 aa, Homo sapiens
MMALGWGVTACSYSDSLLGPQLFGDVCYNCSHVIEGDGTSLWSST

SEQ ID NO: 8259 - DNA, 1805 bp, Homo sapiens
ctggccagcgctgtgtccggaagctgtgccttgggtggcggcttgggtgggaggccatgcggtcctgccctgatgcaggccccagcccccagccctcatcctcacatgcagatccctgggggaatgcaaggtgctgctcagtgatcccaggcttgcagggggtgcctgcaggaggccccacgtggacaggcagggccgcctctgcctatgagggcccaccatgccgcagcaccaggctggcacctgactcctggggctgaggctgccgagggggaggccagactgggaggggatggtgactcacaaggttaccatcagtgccttagaggaggggtagggtctgctgaccccagggcattcacagaggtgtcagtcccctctgcccagtgtgaatcctgaaaggcctgcacctgcccagactctgctttctgtccccttctgtcactgctgcctcctggggccactgtggtcccctggagtcactggctcctggggtcactgttgtccccgggtcaccactgtccctcggggtcaccgctctagccctgatgccacccggcccgccctttgtccttgcagcactttgtctgtgccaagtgtgagaagccattcctggggcaccggcactatgagaagaagggcctggcctactgcgagactcactacaaccagctcttcggggacgtctgctacaactgcagccatgtgattgaaggcgatgtggtgtcggccctcaacaaggcctggtgtgtgagctgcttctcctgctccacctgcaacagcaagctcaccctgaagaacaagtttgtggagttcgacatgaagcccgtgtgtaagaggtgctacgagaagttcccgctggagctgaagaagcggctgaagaagctgtcggagctgacctcccgcaaggcccagcccaaggccacagacctcaactctgcctgaaggccctcttgcgcagctgcctctcggcccctccgccttctcccctcctgctgtccatgcttggccccctcgtccccatccacctgtgccctccgcatcttaccctccctttctctttcctcattgccttctcccttcctgttccctcatctctgccttccccatgtctctcctctccttggccgtggcttctgtctgtgaggaggcaggagctggggagtgggagcctatgaccccacgtctgacagccatgtccacctgtgcccacagcttccgcccacagacctccagggacaggagcaaattgcaccacagctccccgcctggcctggccctccccaggcggctcagtggctcatgctgtcctgtgagagcccctgccccagagcggccccactaagcgcatgtggctcctgggctacccacagccagggcagcctgctggagccacagggccagggccatgcagatggaggcctctgggagccacctccaatccctcaccactcactcaaccagtggcacagtgtccttgtgcccacactgagccagcaagtcctgctgtccacacccacaagctacctggagggacaggacccacctccatccttcggaaggccttcctggaatcccaccttggcctccgccctcggttccgccccgcccctctccccccgaccttggggcttgtgtcgagcccttgggtggggccaggaggaggtgatggcgtcagaggaggtgtggtcagaggtgacttgttcccacctccagggaggacgcttcgtcttcggccagcgcagacctggtgtttgtttgttgggctcacgcttgcacaatgaaggcttgttcacacaaccaca

SEQ ID NO: 8260 - protein, 166 aa, Homo sapiens
MLSCESPCPRAAPLSACGSWATHSQGSLLEPQGQGHADGGLWEPPPIPHHSLNQWHSVLVPTLSQQVLLSTPTSYLEGQDPPPSFGRPSWNPTLASALGSAPPLSPRPWGLCRALGWGQEEVMASEEVWSEVTCSHLQGGRFVFGQRRPGVCLLGSRLHNEGLFTQ

SEQ ID NO: 8261 - DNA, 1388 bp, Homo sapiens
ctgccctgccatgacaagatgggcgtccccatctgcggggcctgccgccggcccatcgagggccgagtggtcaacgcgctgggcaagcagtggcacgtggaggtgagccaggctggtggacacgtggcctcaggttggggggtgccccagctcagggtcatgcactttgtctgtgccaagtgtgagaagccattcctggggcaccggcactatgagaagaagggcctggcctactgcgagactcactacaaccagctcttcggggacgtctgctacaactgcagccatgtgattgaaggcgatgtggtgtcggccctcaacaaggcctggtgtgtgagctgcttctcctgctccacctgcaacagcaagctcaccctgaagaacaagtttgtggagttcgacatgaagcccgtgtgtaagaggtgctacgagaagttcccgctggagctgaagaagcggctgaagaagctgtcggagctgacctcccgcaaggcccagcccaaggccacagacctcaactctgcctgaaggccctcttgcgcagctgcctctcggcccctccgccttctcccctcctgctgtccatgcttggccccctcgtccccatccacctgtgccctccgcatcttaccctccctttctctttcctcattgccttctcccttcctgttccctcatctctgccttccccatgtctctcctctccttggccgtggcttctgtctgtgaggaggcaggagctggggagtgggagcctatgaccccacgtctgacagccatgtccacctgtgcccacagcttccgcccacagacctccagggacaggagcaaattgcaccacagctccccgcctggcctggccctccccaggcggctcagtggctcatgctgtcctgtgagagcccctgccccagagcggccccactaagcgcatgtggctcctgggctacccacagccagggcagcctgctggagccacagggccagggccatgcagatggaggcctctgggagccacctccaatccctcaccactcactcaaccagtggcacagtgtccttgtgcccacactgagccagcaagtcctgctgtccacacccacaagctacctggagggacaggacccacctccatccttcggaaggccttcctggaatcccaccttggcctccgccctcggttccgccccgcccctctccccccgaccttggggcttgtgtcgagcccttgggtggggccaggaggaggtgatggcgtcagaggaggtgtggtcagaggtgacttgttcccacctccagggaggacgcttcgtcttcggccagcgcagacctggtgtttgtttgttgggctcacgcttgcacaatgaaggcttgttcacacaaccaca

SEQ ID NO: 8262 - protein, 169 aa, Homo sapiens
MGVPICGACRRPIEGRVVNALGKQWHVEVSQAGGHVASGWGVPQLRVMHFVCAKCEKPFLGHRHYEKKGLAYCETHYNQLFGDVCYNCSHVIEGDVVSALNKAWCVSCFSCSTCNSKLTLKNKFVEFDMKPVCKRCYEKFPLELKKRLKKLSELTSRKAQPKATDLNSA

SEQ ID NO: 8263 - DNA, 1469 bp, Homo sapiens
ctcggggagccgtgccctggggtggaggcgctgctggcatgaccctgcagaagggcaggggtggcacctgggggctgcacgctgtcttccaggaaggagctgacagccgaggcccgcgagctgaagggtgagctctactgcctgccctgccatgacaagatgggcgtccccatctgcggggcctgccgccggcccatcgagggccgagtggtcaacgcgctgggcaagcagtggcacgtggagcactttgtctgtgccaagtgtgagaagccattcctggggcaccggcactatgagaagaagggcctggcctactgcgagactcactacaaccagctcttcggggacgtctgctacaactgcagccatgtgattgaaggcgatgtggtgtcggccctcaacaaggcctggtgtgtgagctgcttctcctgctccacctgcaacagcaagctcaccctgaagaacaagtttgtggagttcgacatgaagcccgtgtgtaagaggtgctacgagaagttcccgctggagctgaagaagcggctgaagaagctgtcggagctgacctcccgcaaggcccagcccaaggccacagacctcaactctgcctgaaggccctcttgcgcagctgcctctcggcccctccgccttctcccctcctgctgtccatgcttggccccctcgtccccatccacctgtgccctccgcatcttaccctccctttctctttcctcattgccttctcccttcctgttccctcatctctgccttccccatgtctctcctctccttggccgtggcttctgtctgtgaggaggcaggagctggggagtgggagcctatgaccccacgtctgacagccatgtccacctgtgcccacagcttccgcccacagacctccagggacaggagcaaattgcaccacagctccccgcctggcctggccctccccaggcggctcagtggctcatgctgtcctgtgagagcccctgccccagagcggccccactaagcgcatgtggctcctgggctacccacagccagggcagcctgctggagccacagggccagggccatgcagatggaggcctctgggagccacctccaatccctcaccactcactcaaccagtggcacagtgtccttgtgcccacactgagccagcaagtcctgctgtccacacccacaagctacctggagggacaggacccacctccatccttcggaaggccttcctggaatcccaccttggcctccgccctcggttccgccccgcccctctccccccgaccttggggcttgtgtcgagcccttgggtggggccaggaggaggtgatggcgtcagaggaggtgtggtcagaggtgacttgttcccacctccagggaggacgcttcgtcttcggccagcgcagacctggtgtttgtttgttgggctcacgcttgcacaatgaaggcttgttcacacaaccaca

SEQ ID NO: 8264 - protein, 149 aa, Homo sapiens
MGVPICGACRRPIEGRVVNALGKQWHVEHFVCAKCEKPFLGHRHYEKKGLAYCETHYNQLFGDVCYNCSHVIEGDVVSALNKAWCVSCFSCSTCNSKLTLKNKFVEFDMKPVCKRCYEKFPLELKKRLKKLSELTSRKAQPKATDLNSA

SEQ ID NO: 8265 - DNA, 2106 bp, Homo sapiens
caaagtgcccagagatcagaaggcgctgccgcctcggctctgcagggacagaatgggcccctcggggagccgtgccctggggtggaggcgctgctggcatgaccctgcagaagggcaggggtggcacctgggggctgcacgctgtcttccaggaaggagctgacagccgaggcccgcgagctgaagggtgagctctactgcctgccctgccatgacaagatgggcgtccccatctgcggggcctgccgccggcccatcgagggccgagtggtcaacgcgctgggcaagcagtggcacgtggagcactttgtctgtgccaagtgtgagaagccattcctggggcaccggcactatgagaagaagggcctggcctactgcgagactcactacaaccaggtgagcccggtgcagaaccttcagggatgcgggtctggaggggtggccaggagagctgccgtgagcaagggaggctgtgggcaccccctcaggagctctgccaggtgctgagcccaggcctgcaccctcagccctggctcctggcctggggtctcgagacctgggcagctctcttcagtctcagtgtcttcctttgaagaatgttctggggctggtgtgaggtcccgggcacatggggctgacagtgccagcaaccccctccctcccttgctctggtacagaaggcagggggcgctggtgggatgcagtcaccacctgggcccacctccttgcaggacagcagtggccagagcagaggggccttctggggagcaacgccccagcctgttgtccttcccggaagggtggttctcatgggttgccgtgccctcaacccagccttgcagctgggccctgggaggcagggcctgggagatgcctgagaggggccgtgttggagggccaggctggctgcatgatggccctgggctggggtgtgactgcctgcagctactctgacagcctgctcggcccacagctcttcggggacgtctgctacaactgcagccatgtgattgaaggcgatgtggtgtcggccctcaacaaggcctggtgtgtgagctgcttctcctgctccacctgcaacagcaagctcaccctgaagaacaagtttgtggagttcgacatgaagcccgtgtgtaagaggtgctacgagaagttcccgctggagctgaagaagcggctgaagaagctgtcggagctgacctcccgcaaggcccagcccaaggccacagacctcaactctgcctgaaggccctcttgcgcagctgcctctcggcccctccgccttctcccctcctgctgtccatgcttggccccctcgtccccatccacctgtgccctccgcatcttaccctccctttctctttcctcattgccttctcccttcctgttccctcatctctgccttccccatgtctctcctctccttggccgtggcttctgtctgtgaggaggcaggagctggggagtgggagcctatgaccccacgtctgacagccatgtccacctgtgcccacagcttccgcccacagacctccagggacaggagcaaattgcaccacagctccccgcctggcctggccctccccaggcggctcagtggctcatgctgtcctgtgagagcccctgccccagagcggccccactaagcgcatgtggctcctgggctacccacagccagggcagcctgctggagccacagggccagggccatgcagatggaggcctctgggagccacctccaatccctcaccactcactcaaccagtggcacagtgtccttgtgcccacactgagccagcaagtcctgctgtccacacccacaagctacctggagggacaggacccacctccatccttcggaaggccttcctggaatcccaccttggcctccgccctcggttccgccccgcccctctccccccgaccttggggcttgtgtcgagcccttgggtggggccaggaggaggtgatggcgtcagaggaggtgtggtcagaggtgacttgttcccacctccagggaggacgcttcgtcttcggccagcgcagacctggtgtttgtttgttgggctcacgcttgcacaatgaaggcttgttcacacaaccaca

SEQ ID NO: 8266 - protein, 205 aa, Homo sapiens
MGLTVPATPSLPCSGTEGRGRWWDAVTTWAHLLAGQQWPEQRGLLGSNAPACCPSRKGGSHGLPCPQPSLAAGPWEAGPGRCLRGAVLEGQAGCMMALGWGVTACSYSDSLLGPQLFGDVCYNCSHVIEGDVVSALNKAWCVSCFSCSTCNSKLTLKNKFVEFDMKPVCKRCYEKFPLELKKRLKKLSELTSRKAQPKATDLNSA

SEQ ID NO: 8267 - DNA, 2406 bp, Homo sapiens
cagcctgtcagaggggccaacactgggcgtcgggcagccgtggaggctcgtgaggagtggagagggcccctggggctggggggcctgggaagggaggcctggatgcagcaggagcaccagagagagattcgggtggcaggtggagacgggggccagggaggttggattggggcctttgtgtatctttgcctggggactctgaatctagattcctgccacctttgaggtccaaggaaacagaaaccatgttgatttgtctctccgttgagaacacagctgtcgtccaacacagcgagtagcatcagaaattattctgaggtcttcacaaaaagactctgtagtgacagttcctgggtttgggggcctccatctgacatagcagtgcttgtctttggagacagaaatcgcctgtacgtgtttgggcccttcttcatctggcaaaccccgaaggaagggggtgagtgggcctcccgggacactcactggccactctgctgggcacagtgacactcattataactcgtgtgtgttaaatacattgggaaaataatgctttcagcagatatcaattaaatgtctactgtattctgcagcatgccccaggcttagagaaagtagaaagaggaaaataccatccagagacagtaacctcgagcattctggcatctttcctgctgagcatgcgtcccattcccaggacacacttgtgaccttctgggccttgtgacagggcagtctgctttcccataccctgggctgagcccctttgaagcccccagctgctcagtgaagttgcaggggtctggcctctcttctcctggaggtggccaggctgtgtgggagtgggggctctgcccctaatgcccccgcctcccgcaggcatctctgccggccttgccacaaccgtgagaaggccaagggcctgggcaagtacatctgccagcggtgccacctggtcatcgacgagcagcccctcatgttcaggagcgacgcctaccaccctgaccacttcaactgcacccactgtgggaaggagctgacagccgaggcccgcgagctgaagggtgagctctactgcctgccctgccatgacaagatgggcgtccccatctgcggggcctgccgccggcccatcgagggccgagtggtcaacgcgctgggcaagcagtggcacgtggagcactttgtctgtgccaagtgtgagaagccattcctggggcaccggcactatgagaagaagggcctggcctactgcgagactcactacaaccagctcttcggggacgtctgctacaactgcagccatgtgattgaaggcgatgtggtgtcggccctcaacaaggcctggtgtgtgagctgcttctcctgctccacctgcaacagcaagctcaccctgaagaacaagtttgtggagttcgacatgaagcccgtgtgtaagaggtgctacgagaagttcccgctggagctgaagaagcggctgaagaagctgtcggagctgacctcccgcaaggcccagcccaaggccacagacctcaactctgcctgaaggccctcttgcgcagctgcctctcggcccctccgccttctcccctcctgctgtccatgcttggccccctcgtccccatccacctgtgccctccgcatcttaccctccctttctctttcctcattgccttctcccttcctgttccctcatctctgccttccccatgtctctcctctccttggccgtggcttctgtctgtgaggaggcaggagctggggagtgggagcctatgaccccacgtctgacagccatgtccacctgtgcccacagcttccgcccacagacctccagggacaggagcaaattgcaccacagctccccgcctggcctggccctccccaggcggctcagtggctcatgctgtcctgtgagagcccctgccccagagcggccccactaagcgcatgtggctcctgggctacccacagccagggcagcctgctggagccacagggccagggccatgcagatggaggcctctgggagccacctccaatccctcaccactcactcaaccagtggcacagtgtccttgtgcccacactgagccagcaagtcctgctgtccacacccacaagctacctggagggacaggacccacctccatccttcggaaggccttcctggaatcccaccttggcctccgccctcggttccgccccgcccctctccccccgaccttggggcttgtgtcgagcccttgggtggggccaggaggaggtgatggcgtcagaggaggtgtggtcagaggtgacttgttcccacctccagggaggacgcttcgtcttcggccagcgcagacctggtgtttgtttgttgggctcacgcttgcacaatgaaggcttgttcacacaaccaca

SEQ ID NO: 8268 - protein, 189 aa, Homo sapiens
MFRSDAYHPDHFNCTHCGKELTAEARELKGELYCLPCHDKMGVPICGACRRPIEGRVVNALGKQWHVEHFVCAKCEKPFLGHRHYEKKGLAYCETHYNQLFGDVCYNCSHVIEGDVVSALNKAWCVSCFSCSTCNSKLTLKNKFVEFDMKPVCKRCYEKFPLELKKRLKKLSELTSRKAQPKATDLNSA

SEQ ID NO: 8269 - DNA, 1625 bp, Homo sapiens
cagtgctgtgcaggatggagtccagacacccagcagtagcagaaatcgcctgtacgtgtttgggcccttcttcatctggcaaaccccgaaggaagggggcatctctgccggccttgccacaaccgtgagaaggccaagggcctgggcaagtacatctgccagcggtgccacctggtcatcgacgagcagcccctcatgttcaggagcgacgcctaccaccctgaccacttcaactgcacccactgtgggaaggagctgacagccgaggcccgcgagctgaagggtgagctctactgcctgccctgccatgacaagatgggcgtccccatctgcggggcctgccgccggcccatcgagggccgagtggtcaacgcgctgggcaagcagtggcacgtggagcactttgtctgtgccaagtgtgagaagccattcctggggcaccggcactatgagaagaagggcctggcctactgcgagactcactacaaccagctcttcggggacgtctgctacaactgcagccatgtgattgaaggcgatgtggtgtcggccctcaacaaggcctggtgtgtgagctgcttctcctgctccacctgcaacagcaagctcaccctgaagaacaagtttgtggagttcgacatgaagcccgtgtgtaagaggtgctacgagaagttcccgctggagctgaagaagcggctgaagaagctgtcggagctgacctcccgcaaggcccagcccaaggccacagacctcaactctgcctgaaggccctcttgcgcagctgcctctcggcccctccgccttctcccctcctgctgtccatgcttggccccctcgtccccatccacctgtgccctccgcatcttaccctccctttctctttcctcattgccttctcccttcctgttccctcatctctgccttccccatgtctctcctctccttggccgtggcttctgtctgtgaggaggcaggagctggggagtgggagcctatgaccccacgtctgacagccatgtccacctgtgcccacagcttccgcccacagacctccagggacaggagcaaattgcaccacagctccccgcctggcctggccctccccaggcggctcagtggctcatgctgtcctgtgagagcccctgccccagagcggccccactaagcgcatgtggctcctgggctacccacagccagggcagcctgctggagccacagggccagggccatgcagatggaggcctctgggagccacctccaatccctcaccactcactcaaccagtggcacagtgtccttgtgcccacactgagccagcaagtcctgctgtccacacccacaagctacctggagggacaggacccacctccatccttcggaaggccttcctggaatcccaccttggcctccgccctcggttccgccccgcccctctccccccgaccttggggcttgtgtcgagcccttgggtggggccaggaggaggtgatggcgtcagaggaggtgtggtcagaggtgacttgttcccacctccagggaggacgcttcgtcttcggccagcgcagacctggtgtttgtttgttgggctcacgcttgcacaatgaaggcttgttcacacaaccaca

SEQ ID NO: 8270 - protein, 189 aa, Homo sapiens; identical to SEQ ID NO: 8268

SEQ ID NO: 8271 - DNA, 493 bp, Homo sapiens
gcacagagagccagtcggcagcttagccagtgactgctgggcctttgtttgggccccttgccctgcacacagctgatgatgagacaccccagggccatgcagatggaggcctctgggagccacctccaatccctcaccactcactcaaccagtggcacagtgtccttgtgcccacactgagccagcaagtcctgctgtccacacccacaagctacctggagggacaggacccacctccatccttcggaaggccttcctggaatcccaccttggcctccgccctcggttccgccccgcccctctccccccgaccttggggcttgtgtcgagcccttgggtggggccaggaggaggtgatggcgtcagaggaggtgtggtcagaggtgacttgttcccacctccagggaggacgcttcgtcttcggccagcgcagacctggtgtttgtttgttgggctcacgcttgcacaatgaaggcttgttcacacaaccaca

SEQ ID NO: 8272 - protein, 34 aa, Homo sapiens [sequence omitted]

SEQ ID NO: 8273 - DNA, 1693 bp, Homo sapiens
cagggtctgttcttagtccaatgtggagttcctcatggggaccccattccccaggaatccaggttccacagtactctgacttggtctggctggtctcggctggcactttccctaggactgctaaaaccacggtgagggcggagagctgagggccgaagaaggcggggcatctctgccggccttgccacaaccgtgagaaggccaagggcctgggcaagtacatctgccagcggtgccacctggtcatcgacgagcagcccctcatgttcaggagcgacgcctaccaccctgaccacttcaactgcacccactgtgggaaggagctgacagccgaggcccgcgagctgaagggtgagctctactgcctgccctgccatgacaagatgggcgtccccatctgcggggcctgccgccggcccatcgagggccgagtggtcaacgcgctgggcaagcagtggcacgtggagcactttgtctgtgccaagtgtgagaagccattcctggggcaccggcactatgagaagaagggcctggcctactgcgagactcactacaaccagctcttcggggacgtctgctacaactgcagccatgtgattgaaggcgatgtggtgtcggccctcaacaaggcctggtgtgtgagctgcttctcctgctccacctgcaacagcaagctcaccctgaagaacaagtttgtggagttcgacatgaagcccgtgtgtaagaggtgctacgagaagttcccgctggagctgaagaagcggctgaagaagctgtcggagctgacctcccgcaaggcccagcccaaggccacagacctcaactctgcctgaaggccctcttgcgcagctgcctctcggcccctccgccttctcccctcctgctgtccatgcttggccccctcgtccccatccacctgtgccctccgcatcttaccctccctttctctttcctcattgccttctcccttcctgttccctcatctctgccttccccatgtctctcctctccttggccgtggcttctgtctgtgaggaggcaggagctggggagtgggagcctatgaccccacgtctgacagccatgtccacctgtgcccacagcttccgcccacagacctccagggacaggagcaaattgcaccacagctccccgcctggcctggccctccccaggcggctcagtggctcatgctgtcctgtgagagcccctgccccagagcggccccactaagcgcatgtggctcctgggctacccacagccagggcagcctgctggagccacagggccagggccatgcagatggaggcctctgggagccacctccaatccctcaccactcactcaaccagtggcacagtgtccttgtgcccacactgagccagcaagtcctgctgtccacacccacaagctacctggagggacaggacccacctccatccttcggaaggccttcctggaatcccaccttggcctccgccctcggttccgccccgcccctctccccccgaccttggggcttgtgtcgagcccttgggtggggccaggaggaggtgatggcgtcagaggaggtgtggtcagaggtgacttgttcccacctccagggaggacgcttcgtcttcggccagcgcagacctggtgtttgtttgttgggctcacgcttgcacaatgaaggcttgttcacacaaccaca

SEQ ID NO: 8274 - protein, 189 aa, Homo sapiens; identical to SEQ ID NO: 8268

SEQ ID NO: 8275 - DNA, 1471 bp, Homo sapiens
ggcaaacgcagaaccagggcttggaatttcgccgctatgcagctgcacccctgccacccaggagatctgaggctcctcagagctgggaggaccgggcatctctgccggccttgccacaaccgtgagaaggccaagggcctgggcaagtacatctgccagcggtgccacctggtcatcgacgagcagcccctcatgttcaggagcgacgcctaccaccctgaccacttcaactgcacccactgtggcactttgtctgtgccaagtgtgagaagccattcctggggcaccggcactatgagaagaagggcctggcctactgcgagactcactacaaccagctcttcggggacgtctgctacaactgcagccatgtgattgaaggcgatgtggtgtcggccctcaacaaggcctggtgtgtgagctgcttctcctgctccacctgcaacagcaagctcaccctgaagaacaagtttgtggagttcgacatgaagcccgtgtgtaagaggtgctacgagaagttcccgctggagctgaagaagcggctgaagaagctgtcggagctgacctcccgcaaggcccagcccaaggccacagacctcaactctgcctgaaggccctcttgcgcagctgcctctcggcccctccgccttctcccctcctgctgtccatgcttggccccctcgtccccatccacctgtgccctccgcatcttaccctccctttctctttcctcattgccttctcccttcctgttccctcatctctgccttccccatgtctctcctctccttggccgtggcttctgtctgtgaggaggcaggagctggggagtgggagcctatgaccccacgtctgacagccatgtccacctgtgcccacagcttccgcccacagacctccagggacaggagcaaattgcaccacagctccccgcctggcctggccctccccaggcggctcagtggctcatgctgtcctgtgagagcccctgccccagagcggccccactaagcgcatgtggctcctgggctacccacagccagggcagcctgctggagccacagggccagggccatgcagatggaggcctctgggagccacctccaatccctcaccactcactcaaccagtggcacagtgtccttgtgcccacactgagccagcaagtcctgctgtccacacccacaagctacctggagggacaggacccacctccatccttcggaaggccttcctggaatcccaccttggcctccgccctcggttccgccccgcccctctccccccgaccttggggcttgtgtcgagcccttgggtggggccaggaggaggtgatggcgtcagaggaggtgtggtcagaggtgacttgttcccacctccagggaggacgcttcgtcttcggccagcgcagacctggtgtttgtttgttgggctcacgcttgcacaatgaaggcttgttcacacaaccaca

SEQ ID NO: 8276 - protein, 112 aa, Homo sapiens
MQLHPCHPGDLRLLRAGRTGHLCRPCHNREKAKGLGKYICQRCHLVIDEQPLMFRSDAYHPDHFNCTHCGTLSVPSVRSHSWGTGTMRRRAWPTARLTTTSSSGTSATTAAM

SEQ ID NO: 8277 - DNA, 1643 bp, Homo sapiens
gcattctgaacttcagcacaaggcaaacgcagaaccagggcttggaatttcgccgctatgcagctgcacccctgccacccaggagatctgaggctcctcagagctgggaggaccgggcatctctgccggccttgccacaaccgtgagaaggccaagggcctgggcaagtacatctgccagcggtgccacctggtcatcgacgagcagcccctcatgttcaggagcgacgcctaccaccctgaccacttcaactgcacccactgtgggaaggagctgacagccgaggcccgcgagctgaagggtgagctctactgcctgccctgccatgacaagatgggcgtccccatctgcggggcctgccgccggcccatcgagggccgagtggtcaacgcgctgggcaagcagtggcacgtggagcactttgtctgtgccaagtgtgagaagccattcctggggcaccggcactatgagaagaagggcctggcctactgcgagactcactacaaccagctcttcggggacgtctgctacaactgcagccatgtgattgaaggcgatgtggtgtcggccctcaacaaggcctggtgtgtgagctgcttctcctgctccacctgcaacagcaagctcaccctgaagaacaagtttgtggagttcgacatgaagcccgtgtgtaagaggtgctacgagaagttcccgctggagctgaagaagcggctgaagaagctgtcggagctgacctcccgcaaggcccagcccaaggccacagacctcaactctgcctgaaggccctcttgcgcagctgcctctcggcccctccgccttctcccctcctgctgtccatgcttggccccctcgtccccatccacctgtgccctccgcatcttaccctccctttctctttcctcattgccttctcccttcctgttccctcatctctgccttccccatgtctctcctctccttggccgtggcttctgtctgtgaggaggcaggagctggggagtgggagcctatgaccccacgtctgacagccatgtccacctgtgcccacagcttccgcccacagacctccagggacaggagcaaattgcaccacagctccccgcctggcctggccctccccaggcggctcagtggctcatgctgtcctgtgagagcccctgccccagagcggccccactaagcgcatgtggctcctgggctacccacagccagggcagcctgctggagccacagggccagggccatgcagatggaggcctctgggagccacctccaatccctcaccactcactcaaccagtggcacagtgtccttgtgcccacactgagccagcaagtcctgctgtccacacccacaagctacctggagggacaggacccacctccatccttcggaaggccttcctggaatcccaccttggcctccgccctcggttccgccccgcccctctccccccgaccttggggcttgtgtcgagcccttgggtggggccaggaggaggtgatggcgtcagaggaggtgtggtcagaggtgacttgttcccacctccagggaggacgcttcgtcttcggccagcgcagacctggtgtttgtttgttgggctcacgcttgcacaatgaaggcttgttcacacaaccaca

SEQ ID NO: 8278 - protein, 241 aa, Homo sapiens
MQLHPCHPGDLRLLRAGRTGHLCRPCHNREKAKGLGKYICQRCHLVIDEQPLMFRSDAYHPDHFNCTHCGKELTAEARELKGELYCLPCHDKMGVPICGACRRPIEGRVVNALGKQWHVEHFVCAKCEKPFLGHRHYEKKGLAYCETHYNQLFGDVCYNCSHVIEGDVVSALNKAWCVSCFSCSTCNSKLTLKNKFVEFDMKPVCKRCYEKFPLELKKRLKKLSELTSRKAQPKATDLNSA

SEQ ID NO: 8279 - DNA, 1712 bp, Homo sapiens
cctggcgtccggcccactgtcctcggagctgggcggtgcctggcattgagcagcttgtctaaatgaagggctgaggggcagacggtgcagtgcaggggccgagggacagcaccaggagctcgtgctgaccagcaacgtcgccgacagggtgtgtggagcgagcccaatctccttcctgagccaaggcatctctgccggccttgccacaaccgtgagaaggccaagggcctgggcaagtacatctgccagcggtgccacctggtcatcgacgagcagcccctcatgttcaggagcgacgcctaccaccctgaccacttcaactgcacccactgtgggaaggagctgacagccgaggcccgcgagctgaagggtgagctctactgcctgccctgccatgacaagatgggcgtccccatctgcggggcctgccgccggcccatcgagggccgagtggtcaacgcgctgggcaagcagtggcacgtggagcactttgtctgtgccaagtgtgagaagccattcctggggcaccggcactatgagaagaagggcctggcctactgcgagactcactacaaccagctcttcggggacgtctgctacaactgcagccatgtgattgaaggcgatgtggtgtcggccctcaacaaggcctggtgtgtgagctgcttctcctgctccacctgcaacagcaagctcaccctgaagaacaagtttgtggagttcgacatgaagcccgtgtgtaagaggtgctacgagaagttcccgctggagctgaagaagcggctgaagaagctgtcggagctgacctcccgcaaggcccagcccaaggccacagacctcaactctgcctgaaggccctcttgcgcagctgcctctcggcccctccgccttctcccctcctgctgtccatgcttggccccctcgtccccatccacctgtgccctccgcatcttaccctccctttctctttcctcattgccttctcccttcctgttccctcatctctgccttccccatgtctctcctctccttggccgtggcttctgtctgtgaggaggcaggagctggggagtgggagcctatgaccccacgtctgacagccatgtccacctgtgcccacagcttccgcccacagacctccagggacaggagcaaattgcaccacagctccccgcctggcctggccctccccaggcggctcagtggctcatgctgtcctgtgagagcccctgccccagagcggccccactaagcgcatgtggctcctgggctacccacagccagggcagcctgctggagccacagggccagggccatgcagatggaggcctctgggagccacctccaatccctcaccactcactcaaccagtggcacagtgtccttgtgcccacactgagccagcaagtcctgctgtccacacccacaagctacctggagggacaggacccacctccatccttcggaaggccttcctggaatcccaccttggcctccgccctcggttccgccccgcccctctccccccgaccttggggcttgtgtcgagcccttgggtggggccaggaggaggtgatggcgtcagaggaggtgtggtcagaggtgacttgttcccacctccagggaggacgcttcgtcttcggccagcgcagacctggtgtttgtttgttgggctcacgcttgcacaatgaaggcttgttcacacaaccaca

SEQ ID NO: 8280 - protein, 189 aa, Homo sapiens; identical to SEQ ID NO: 8268

SEQ ID NO: 8281 - DNA, 4811 bp, Homo sapiens
gatggggttatttctgtccattgtgctggtgtggccactgcacatctcccctcaagtccacatcgatgtcatgttggcagccaggagttggccatgacgggaatattcacaccatggacactggcaaacgccccacagcagggcctgcctctgcgccccagagagctggctgttgagcatttaccagaacatcacttgtgcttgtggtggcggtggtggccaggggtcagatgctggctctgtttcaaggtagagctgatgggactggctggtggatggatgtggggcctgtggtccgcctggcagagcaagagccgctgttcctcacagtgtcttcagcctcctgaggaatgctgtctaagtgtagaggcagcgggaggggtgggcaaagctctaggaggggtggccatatgcccagaacaaagcctctctctctcacacacagcaggtgcccagaagattttcattgctgaaagagtttaagcccttcctgactctacaggtcactgggtagggctatatccagtttagtctaataagacactcattttagagaacagggaaaaaccaattaaaaaacagaaaatacaattgttagaggaaagcagaggcaggctttggccccgcttgtggccagcacaggggccctcgctggcagctgccgcctggagggtgtgcacactggctcctgctggccgcagccctgagctcttcccacttccccgtgcccaggcccttcctgcgttcccttccttctgtctcctatacccgggtcttcatggcctctgagagagctggatactcccacagagaaggtatacgaaataggaccaagtgacactacacttcagactggatctcatccctcctggcttaaaaccgcctcgcccccagcctgttctccggaccaacagggtccagatcctcagtagacaccagtggccctttgacaggtggcctcacggacctctccagcttccacgggggcacctccctttgcaccccaccatcccaaaagggccagtgtcctctctggccaggcctgggacccactgctccagcctcagcccggcatgcccctgcctcagtgcctcatcccctgctgtcaggtcctgacccaacaagggcctgggctgctcatggggatgataggtggtttgcttgtcctctctctgcgacccctttgcagtttgaaggccggaagtactgcgaacacgacttccaaatgctgtttgctccgtgctgtggatcctgcggtgagttcatcattggccgcgtcatcaaggccatgaacaacaactggcacccgggctgcttccgctgcgagctgtgtgatgtggagctggctgacctgggctttgtgaagaatgccggcaggcatctctgccggccttgccacaaccgtgagaaggccaagggcctgggcaagtacatctgccagcggtgccacctggtcatcgacgagcagcccctcatgttcaggagcgacgcctaccaccctgaccacttcaactgcacccactgtgggtaggtgcgcagcccggccctgcagttgtgggggcggggagccagggctggcccagggtaagggcggtggggcctccacctggggaagtgttgaggagggagaggggagcagggtgggcagacagaggggtcccgagagcaaggctgcagggcagaggtgggctgggggctgggaagcagccatggcaggaagcttctctctccagggctctgtttggggggcacttgagactcaggaggcgggtgggctggacccctagactgcagacgagggttgagatggagcagtggaagggacctgagggggcagggcaagagaccgggagtgggcttggtgctggtgttggagagaggagttgcataggcagcccctcagcccccgtcctcgcccacccccaccgtcccctccagtcctctccgtgcctatccagacaccccctctggtttggaggaggaggggggcccaagaacagacctgcttctcagaggcctgggtgcagaacacagcccactcttctgggctgtgcaggaagtctgtgctccagggcctgtctggggcacaggaagtcttcaaagtgcccagagatcagaaggcgctgccgcctcggctctgcagggacagaatgggcccctcggggagccgtgccctggggtggaggcgctgctggcatgaccctgcagaagggcaggggtggcacctgggggctgcacgctgtcttccaggaaggagctgacagccgaggcccgcgagctgaagggtgagctctactgcctgccctgccatgacaagatgggcgtccccatctgcggggcctgccgccggcccatcgagggccgagtggtcaacgcgctgggcaagcagtggcacgtggaggtgagccaggctggtggacacgtggcctcaggttggggggtgccccagctcagggtcatggtaagagccctaaagctcctccacactcccagcccagggcgggtggctggctcccaacgaggcccttcctcaggggtactgcccctccctgtgctcagccagggaccccagcctgcccacgggagccaggagacccgagtgcacacacacggttgggtagctgtgcccacctctcctcttccccctgctggcattctaagagactccaaggtcaggagaaaaccttgggggcagtctgtccagagtgcctgggggttgtggatgacagaacccgctgcatggacagccctgtgcagacacggagctgaagagttcctcaggtgtgagcactgggtcacctggagtgcccccaccgggtggtgggctctcatgttctcatgggtacactgggaacagtgagcccaccacctcccctgatgacctggccagcgctgtgtccggaagctgtgccttgggtggcggcttgggtgggaggccatgcggtcctgccctgatgcaggccccagcccccagccctcatcctcacatgcagatccctgggggaatgcaaggtgctgctcagtgatcccaggcttgcagggggtgcctgcaggaggccccacgtggacaggcagggccgcctctgcctatgagggcccaccatgccgcagcaccaggctggcacctgactcctggggctgaggctgccgagggggaggccagactgggaggggatggtgactcacaaggttaccatcagtgccttagaggaggggtagggtctgctgaccccagggcattcacagaggtgtcagtcccctctgcccagtgtgaatcctgaaaggcctgcacctgcccagactctgctttctgtccccttctgtcactgctgcctcctggggccactgtggtcccctggagtcactggctcctggggtcactgttgtccccgggtcaccactgtccctcggggtcaccgctctagccctgatgccacccggcccgccctttgtccttgcagcactttgtctgtgccaagtgtgagaagccattcctggggcaccggcactatgagaagaagggcctggcctactgcgagactcactacaaccagctcttcggggacgtctgctacaactgcagccatgtgattgaaggcgatggtgaggccctgtgttccctcccccaccccacctgctctcctggggcctgggtgctgcagctgtgagcccagccgggcctgcggcagcctagccaggcctgctgagtcccacgcttccctcacagtggtgtcggccctcaacaaggcctggtgtgtgagctgcttctcctgctccacctgcaacagcaagctcaccctgaagaacaagtttgtggagttcgacatgaagcccgtgtgtaagaggtgctacgagaagttcccgctggagctgaagaagcggctgaagaagctgtcggagctgacctcccgcaaggcccagcccaaggccacagacctcaactctgcctgaaggccctcttgcgcagctgcctctcggcccctccgccttctcccctcctgctgtccatgcttggccccctcgtccccatccacctgtgccctccgcatcttaccctccctttctctttcctcattgccttctcccttcctgttccctcatctctgccttccccatgtctctcctctccttggccgtggcttctgtctgtgaggaggcaggagctggggagtgggagcctatgaccccacgtctgacagccatgtccacctgtgcccacagcttccgcccacagacctccagggacaggagcaaattgcaccacagctccccgcctggcctggccctccccaggcggctcagtggctcatgctgtcctgtgagagcccctgccccagagcggccccactaagcgcatgtggctcctgggctacccacagccagggcagcctgctggagccacagggccagggccatgcagatggaggcctctgggagccacctccaatccctcaccactcactcaaccagtggcacagtgtccttgtgcccacactgagccagcaagtcctgctgtccacacccacaagctacctggagggacaggacccacctccatccttcggaaggccttcctggaatcccaccttggcctccgccctcggttccgccccgcccctctccccccgaccttggggcttgtgtcgagcccttgggtggggccaggaggaggtgatggcgtcagaggaggtgtggtcagaggtgacttgttcccacctccagggaggacgcttcgtcttcggccagcgcagacctggtgtttgtttgttgggctcacgcttgcacaatgaaggcttgttcacacaaccaca

SEQ ID NO: 8282 - protein, 139 aa, Homo sapiens
MPAGISAGLATTVRRPRAWASTSASGATWSSTSSPSCSGATPTTLTTSTAPTVGRCAARPCSCGGGEPGLAQGKGGGASTWGSVEEGEGSRVGRQRGPESKAAGQRWAGGWEAAMAGSFSLQGSVWGALETQEAGGLDP

SEQ ID NO: 8283 - DNA, 2470 bp, Homo sapiens
tcccacttcagcctccagagtagctgagactacaggcttgcaccaccacacctggctaatttttttgttttcttgtatttttattagagatggattcttgccatattgcccaggctggtctcgaactcctgggctcaagggatccgcccaccttggcctcccacagtgctctggatgacaggcttgagccattctgcacacgcacccagctaccctcttgcctgctctgtgtttgggtggttatgtgtttattggaggcagtcagtttgaaactaactcatggtgcagaggatggaaccatggaagactgagcagtctggattcaagtgtggaccccgctctgctgtgtgagcttgggcaagttactcaacctctttgaggcttaggtcccttttctggaagaggccataataatagtagctgcagtattgccctggggattaaatgagagtgtgaatacagagccgctcacctgtgctgggtggtgttctgtgtgcgagactctctggtccctgaagaaggggtaataggggcccaagtgggagttgactgggcccctgacaccccaaggggtgggcactacaagcactgagcagcctggaccctgggttagagcgattttcctgatcctgcagagcgtcttcactttttaatacgaggtgtgtctgtcgggcgcaggcccccgcgtgtgccccatctgcacccctgaccagctctgactcactcctcctgtctcctgcccccagcaatatgtcggacgccttggccaacgccgtgtgccagcgctgccaggcccgcttctcccccgccgagcgcattgtcaacagcaatggggagctgtaccatgagcactgcttcgtgtgtgcccagtgcttccggcccttccccgaggggctcttctatgagtttgaaggccggaagtactgcgaacacgacttccaaatgctgtttgctccgtgctgtggatcctgcggtgagttcatcattggccgcgtcatcaaggccatgaacaacaactggcacccgggctgcttccgctgcgagctgtgtgatgtggagctggctgacctgggctttgtgaagaatgccggcaggcatctctgccggccttgccacaaccgtgagaaggccaagggcctgggcaagtacatctgccagcggtgccacctggtcatcgacgagcagcccctcatgttcaggagcgacgcctaccaccctgaccacttcaactgcacccactgtggcactttgtctgtgccaagtgtgagaagccattcctggggcaccggcactatgagaagaagggcctggcctactgcgagactcactacaaccagctcttcggggacgtctgctacaactgcagccatgtgattgaaggcgatgtggtgtcggccctcaacaaggcctggtgtgtgagctgcttctcctgctccacctgcaacagcaagctcaccctgaagaacaagtttgtggagttcgacatgaagcccgtgtgtaagaggtgctacgagaagttcccgctggagctgaagaagcggctgaagaagctgtcggagctgacctcccgcaaggcccagcccaaggccacagacctcaactctgcctgaaggccctcttgcgcagctgcctctcggcccctccgccttctcccctcctgctgtccatgcttggccccctcgtccccatccacctgtgccctccgcatcttaccctccctttctctttcctcattgccttctcccttcctgttccctcatctctgccttccccatgtctctcctctccttggccgtggcttctgtctgtgaggaggcaggagctggggagtgggagcctatgaccccacgtctgacagccatgtccacctgtgcccacagcttccgcccacagacctccagggacaggagcaaattgcaccacagctccccgcctggcctggccctccccaggcggctcagtggctcatgctgtcctgtgagagcccctgccccagagcggccccactaagcgcatgtggctcctgggctacccacagccagggcagcctgctggagccacagggccagggccatgcagatggaggcctctgggagccacctccaatccctcaccactcactcaaccagtggcacagtgtccttgtgcccacactgagccagcaagtcctgctgtccacacccacaagctacctggagggacaggacccacctccatccttcggaaggccttcctggaatcccaccttggcctccgccctcggttccgccccgcccctctccccccgaccttggggcttgtgtcgagcccttgggtggggccaggaggaggtgatggcgtcagaggaggtgtggtcagaggtgacttgttcccacctccagggaggacgcttcgtcttcggccagcgcagacctggtgtttgtttgttgggctcacgcttgcacaatgaaggcttgttcacacaaccaca

SEQ ID NO: 8284 - protein, 207 aa, Homo sapiens
MSDALANAVCQRCQARFSPAERIVNSNGELYHEHCFVCAQCFRPFPEGLFYEFEGRKYCEHDFQMLFAPCCGSCGEFIIGRVIKAMNNNWHPGCFRCELCDVELADLGFVKNAGRHLCRPCHNREKAKGLGKYICQRCHLVIDEQPLMFRSDAYHPDHFNCTHCGTLSVPSVRSHSWGTGTMRRRAWPTARLTTTSSSGTSATTAAM

SEQ ID NO: 8285 - DNA, 2274 bp, Homo sapiens
gcccgcgacctcaaggcggctgccccgcgccatggcggcccggctgggtgcgctggccgcgtcggggctgtaccggcggcgccagcaccggcagagcccgccgccagccacgggcaatatgtcggacgccttggccaacgccgtgtgccagcgctgccaggcccgcttctcccccgccgagcgcattgtcaacagcaatggggagctgtaccatgagcactgcttcgtgtgtgcccagtgcttccggcccttccccgaggggctcttctatgagtttgaaggccggaagtactgcgaacacgacttccaaatgctgtttgctccgtgctgtggatcctgcggtaaggccggtgacagtacacatcctgggctgcctgggaagtgggcagcagtggcggggggcagggggccgagggggtacacagaactggcccagctctttcctaactccccaccttgcctctctgagcggcagccgtcaggccccctacaggcatcaccatcccacgagggagcccatgggccaggcagagagcaggcggagtgctaggtggacagggcttgggagggtccgaagaggggacaggcacgtgctccccagccagcagggacctgtcttcttccaggtgagttcatcattggccgcgtcatcaaggccatgaacaacaactggcacccgggctgcttccgctgcgagctgtgtgatgtggagctggctgacctgggctttgtgaagaatgccggcaggcatctctgccggccttgccacaaccgtgagaaggccaagggcctgggcaagtacatctgccagcggtgccacctggtcatcgacgagcagcccctcatgttcaggagcgacgcctaccaccctgaccacttcaactgcacccactgtgggaaggagctgacagccgaggcccgcgagctgaagggtgagctctactgcctgccctgccatgacaagatgggcgtccccatctgcggggcctgccgccggcccatcgagggccgagtggtcaacgcgctgggcaagcagtggcacgtggagcactttgtctgtgccaagtgtgagaagccattcctggggcaccggcactatgagaagaagggcctggcctactgcgagactcactacaaccagctcttcggggacgtctgctacaactgcagccatgtgattgaaggcgatgtggtgtcggccctcaacaaggcctggtgtgtgagctgcttctcctgctccacctgcaacagcaagctcaccctgaagaacaagtttgtggagttcgacatgaagcccgtgtgtaagaggtgctacgagaagttcccgctggagctgaagaagcggctgaagaagctgtcggagctgacctcccgcaaggcccagcccaaggccacagacctcaactctgcctgaaggccctcttgcgcagctgcctctcggcccctccgccttctcccctcctgctgtccatgcttggccccctcgtccccatccacctgtgccctccgcatcttaccctccctttctctttcctcattgccttctcccttcctgttccctcatctctgccttccccatgtctctcctctccttggccgtggcttctgtctgtgaggaggcaggagctggggagtgggagcctatgaccccacgtctgacagccatgtccacctgtgcccacagcttccgcccacagacctccagggacaggagcaaattgcaccacagctccccgcctggcctggccctccccaggcggctcagtggctcatgctgtcctgtgagagcccctgccccagagcggccccactaagcgcatgtggctcctgggctacccacagccagggcagcctgctggagccacagggccagggccatgcagatggaggcctctgggagccacctccaatccctcaccactcactcaaccagtggcacagtgtccttgtgcccacactgagccagcaagtcctgctgtccacacccacaagctacctggagggacaggacccacctccatccttcggaaggccttcctggaatcccaccttggcctccgccctcggttccgccccgcccctctccccccgaccttggggcttgtgtcgagcccttgggtggggccaggaggaggtgatggcgtcagaggaggtgtggtcagaggtgacttgttcccacctccagggaggacgcttcgtcttcggccagcgcagacctggtgtttgtttgttgggctcacgcttgcacaatgaaggcttgttcacacaaccaca

SEQ ID NO: 8286 - protein, 251 aa, Homo sapiens
MNNNWHPGCFRCELCDVELADLGFVKNAGRHLCRPCHNREKAKGLGKYICQRCHLVIDEQPLMFRSDAYHPDHFNCTHCGKELTAEARELKGELYCLPCHDKMGVPICGACRRPIEGRVVNALGKQWHVEHFVCAKCEKPFLGHRHYEKKGLAYCETHYNQLFGDVCYNCSHVIEGDVVSALNKAWCVSCFSCSTCNSKLTLKNKFVEFDMKPVCKRCYEKFPLELKKRLKKLSELTSRKAQPKATDLNSA

SEQ ID NO: 8287 - DNA, 2524 bp, Homo sapiens
atcggctctgccctggtctgggtgccccacggtgatgtttgtggcagagggtctcagagaagggagcaaagcagaatgtgggcctgtgtggctccggtcctcggtttcctaactgttggcagggatcctaaaggcgccaggtcctccctgtcctcctcagctgactctgccctcctcagtgtgtccacgggcacaggctttcctcctggcaggtggcagccggagacctcctgggtgtcctgccgccactgtggacctcacctcagtgctgtctggggccttcccagaccagtcccctcccagcgggacccaacccccgccagcctcagctttcaggagctgcccccgcggcgcgaacaatatcctttctatttggagttgactctgctgccctttggagatcccagcgcgtaacgtgagctcgcgaccagcgcgggggaggcgcccacacgcccgtcccgtcttggtgtctggccccaggcggccgcgcctcccctccgaggtggtcccatagcccctgcaccaggcggcccgcgcccgcgacctcaaggcggctgccccgcgccatggcggcccggctgggtgcgctggccgcgtcggggctgtaccggcggcgccagcaccggcagagcccgccgccagccacgggcaatatgtcggacgccttggccaacgccgtgtgccagcgctgccaggcccgcttctcccccgccgagcgcattgtcaacagcaatggggagctgtaccatgagcactgcttcgtgtgtgcccagtgcttccggcccttccccgaggggctcttctatgagtttgaaggccggaagtactgcgaacacgacttccaaatgctgtttgctccgtgctgtggatcctgcggtgagttcatcattggccgcgtcatcaaggccatgaacaacaactggcacccgggctgcttccgctgcgagctgtgtgatgtggagctggctgacctgggctttgtgaagaatgccggcaggcatctctgccggccttgccacaaccgtgagaaggccaagggcctgggcaagtacatctgccagcggtgccacctggtcatcgacgagcagcccctcatgttcaggagcgacgcctaccaccctgaccacttcaactgcacccactgtgggaaggagctgacagccgaggcccgcgagctgaagggtgagctctactgcctgccctgccatgacaagatgggcgtccccatctgcggggcctgccgccggcccatcgagggccgagtggtcaacgcgctgggcaagcagtggcacgtggagcactttgtctgtgccaagtgtgagaagccattcctggggcaccggcactatgagaagaagggcctggcctactgcgagactcactacaaccagctcttcggggacgtctgctacaactgcagccatgtgattgaaggcgatgtggtgtcggccctcaacaaggcctggtgtgtgagctgcttctcctgctccacctgcaacagcaagctcaccctgaagaacaagtttgtggagttcgacatgaagcccgtgtgtaagaggtgctacgagaagttcccgctggagctgaagaagcggctgaagaagctgtcggagctgacctcccgcaaggcccagcccaaggccacagacctcaactctgcctgaaggccctcttgcgcagctgcctctcggcccctccgccttctcccctcctgctgtccatgcttggccccctcgtccccatccacctgtgccctccgcatcttaccctccctttctctttcctcattgccttctcccttcctgttccctcatctctgccttccccatgtctctcctctccttggccgtggcttctgtctgtgaggaggcaggagctggggagtgggagcctatgaccccacgtctgacagccatgtccacctgtgcccacagcttccgcccacagacctccagggacaggagcaaattgcaccacagctccccgcctggcctggccctccccaggcggctcagtggctcatgctgtcctgtgagagcccctgccccagagcggccccactaagcgcatgtggctcctgggctacccacagccagggcagcctgctggagccacagggccagggccatgcagatggaggcctctgggagccacctccaatccctcaccactcactcaaccagtggcacagtgtccttgtgcccacactgagccagcaagtcctgctgtccacacccacaagctacctggagggacaggacccacctccatccttcggaaggccttcctggaatcccaccttggcctccgccctcggttccgccccgcccctctccccccgaccttggggcttgtgtcgagcccttgggtggggccaggaggaggtgatggcgtcagaggaggtgtggtcagaggtgacttgttcccacctccagggaggacgcttcgtcttcggccagcgcagacctggtgtttgtttgttgggctcacgcttgcacaatgaaggcttgttcacacaaccaca

SEQ ID NO: 8288 - protein, 365 aa, Homo sapiens; identical to SEQ ID NO: 606

SEQ ID NO: 8289 - DNA, 3101 bp, Homo sapiens
atcggctctgccctggtctgggtgccccacggtgatgtttgtggcagagggtctcagagaagggagcaaagcagaatgtgggcctgtgtggctccggtcctcggtttcctaactgttggcagggatcctaaaggcgccaggtcctccctgtcctcctcagctgactctgccctcctcagtgtgtccacgggcacaggctttcctcctggcaggtggcagccggagacctcctgggtgtcctgccgccactgtggacctcacctcagtgctgtctggggccttcccagaccagtcccctcccagcgggacccaacccccgccagcctcagctttcaggagctgcccccgcggcgcgaacaatatcctttctatttggagttgactctgctgccctttggagatcccagcgcgtaacgtgagctcgcgaccagcgcgggggaggcgcccacacgcccgtcccgtcttggtgtctggccccaggcggccgcgcctcccctccgaggtggtcccatagcccctgcaccaggcggcccgcgcccgcgacctcaaggcggctgccccgcgccatggcggcccggctgggtgcgctggccgcgtcggggctgtaccggcggcgccagcaccggcagagcccgccgccagccacgggcaatatgtcggacgccttggccaacgccgtgtgccagcgctgccaggcccgcttctcccccgccgagcgcattgtcaacagcaatggggagctgtaccatgagcactgcttcgtgtgtgcccagtgcttccggcccttccccgaggggctcttctatgagtttgaaggccggaagtactgcgaacacgacttccaaatgctgtttgctccgtgctgtggatcctgcggtgagttcatcattggccgcgtcatcaaggccatgaacaacaactggcacccgggctgcttccgctgcgagctgtgtgatgtggagctggctgacctgggctttgtgaagaatgccggcaggcatctctgccggccttgccacaaccgtgagaaggccaagggcctgggcaagtacatctgccagcggtgccacctggtcatcgacgagcagcccctcatgttcaggagcgacgcctaccaccctgaccacttcaactgcacccactgtgggaaggagctgacagccgaggcccgcgagctgaagggtgagctctactgcctgccctgccatgacaagatgggcgtccccatctgcggggcctgccgccggcccatcgagggccgagtggtcaacgcgctgggcaagcagtggcacgtggagcactttgtctgtgccaagtgtgagaagccattcctggggcaccggcactatgagaagaagggcctggcctactgcgagactcactacaaccaggtgagcccggtgcagaaccttcagggatgcgggtctggaggggtggccaggagagctgccgtgagcaagggaggctgtgggcaccccctcaggagctctgccaggtgctgagcccaggcctgcaccctcagccctggctcctggcctggggtctcgagacctgggcagctctcttcagtctcagtgtcttcctttgaagaatgttctggggctggtgtgaggtcccgggcacatggggctgacagtgccagcaaccccctccctcccttgctctggtacagaaggcagggggcgctggtgggatgcagtcaccacctgggcccacctccttgcaggacagcagtggccagagcagaggggccttctggggagcaacgccccagcctgttgtccttcccggaagggtggttctcatgggttgccgtgccctcaacccagccttgcagctgggccctgggaggcagggcctgggagatgcctgagaggggccgtgttggagggccaggctggctgcatgatggccctgggctggggtgtgactgcctgcagctactctgacagcctgctcggcccacagctcttcggggacgtctgctacaactgcagccatgtgattgaaggcgatgtggtgtcggccctcaacaaggcctggtgtgtgagctgcttctcctgctccacctgcaacagcaagctcaccctgaagaacaagtttgtggagttcgacatgaagcccgtgtgtaagaggtgctacgagaagttcccgctggagctgaagaagcggctgaagaagctgtcggagctgacctcccgcaaggcccagcccaaggccacagacctcaactctgcctgaaggccctcttgcgcagctgcctctcggcccctccgccttctcccctcctgctgtccatgcttggccccctcgtccccatccacctgtgccctccgcatcttaccctccctttctctttcctcattgccttctcccttcctgttccctcatctctgccttccccatgtctctcctctccttggccgtggcttctgtctgtgaggaggcaggagctggggagtgggagcctatgaccccacgtctgacagccatgtccacctgtgcccacagcttccgcccacagacctccagggacaggagcaaattgcaccacagctccccgcctggcctggccctccccaggcggctcagtggctcatgctgtcctgtgagagcccctgccccagagcggccccactaagcgcatgtggctcctgggctacccacagccagggcagcctgctggagccacagggccagggccatgcagatggaggcctctgggagccacctccaatccctcaccactcactcaaccagtggcacagtgtccttgtgcccacactgagccagcaagtcctgctgtccacacccacaagctacctggagggacaggacccacctccatccttcggaaggccttcctggaatcccaccttggcctccgccctcggttccgccccgcccctctccccccgaccttggggcttgtgtcgagcccttgggtggggccaggaggaggtgatggcgtcagaggaggtgtggtcagaggtgacttgttcccacctccagggaggacgcttcgtcttcggccagcgcagacctggtgtttgtttgttgggctcacgcttgcacaatgaaggcttgttcacacaaccaca

SEQ ID NO: 8290 - protein, 311 aa, Homo sapiens
MAARLGALAASGLYRRRQHRQSPPPATGNMSDALANAVCQRCQARFSPAERIVNSNGELYHEHCFVCAQCFRPFPEGLFYEFEGRKYCEHDFQMLFAPCCGSCGEFIIGRVIKAMNNNWHPGCFRCELCDVELADLGFVKNAGRHLCRPCHNREKAKGLGKYICQRCHLVIDEQPLMFRSDAYHPDHFNCTHCGKELTAEARELKGELYCLPCHDKMGVPICGACRRPIEGRVVNALGKQWHVEHFVCAKCEKPFLGHRHYEKKGLAYCETHYNQVSPVQNLQGCGSGGVARRAAVSKGGCGHPLRSSARC

SEQ ID NO: 8291 - DNA, 2507 bp, Homo sapiens
aagtgcatgactcaggactgggtgggagggggctgtccctgaggccctggtctcccccagccaagtcctggcagggggatgctgttcttcaggatcccatgacctggggctcttggggagccccagcccggagagtgacctgtggctttgctggggaaaggggcttggagggtacagggcagtgtccaggattgcagtctcaaatccgaggcccacaggggagctgcctctgtgatcgccattaaggctgtggcctggggtctcagggcagcccaggaaccaaaaatagcctgtaacttgtcactttgtaagtcctgccctccagacacacttccctttcttctccccaagcctctcttcccagttagctcccctgacttggagtcacctctaagccttggcccaggcccctctgcagtgagatggagggactcatcccccggagagtggcatctgcaggcccactggctgcctgtggtcaccccctagggttctagcggggctgcctcccattttcctcagagcatccctgccagctggctggttctcactctcctgttttctaggaaaagaaagtggggagagacaggaacagggtccggagcagccccagcagcagcattgaggtggagcaatatgtcggacgccttggccaacgccgtgtgccagcgctgccaggcccgcttctcccccgccgagcgcattgtcaacagcaatggggagctgtaccatgagcactgcttcgtgtgtgcccagtgcttccggcccttccccgaggggctcttctatgagtttgaaggccggaagtactgcgaacacgacttccaaatgctgtttgctccgtgctgtggatcctgcggtgagttcatcattggccgcgtcatcaaggccatgaacaacaactggcacccgggctgcttccgctgcgagctgtgtgatgtggagctggctgacctgggctttgtgaagaatgccggcaggcatctctgccggccttgccacaaccgtgagaaggccaagggcctgggcaagtacatctgccagcggtgccacctggtcatcgacgagcagcccctcatgttcaggagcgacgcctaccaccctgaccacttcaactgcacccactgtgggaaggagctgacagccgaggcccgcgagctgaagggtgagctctactgcctgccctgccatgacaagatgggcgtccccatctgcggggcctgccgccggcccatcgagggccgagtggtcaacgcgctgggcaagcagtggcacgtggagcactttgtctgtgccaagtgtgagaagccattcctggggcaccggcactatgagaagaagggcctggcctactgcgagactcactacaaccagctcttcggggacgtctgctacaactgcagccatgtgattgaaggcgatgtggtgtcggccctcaacaaggcctggtgtgtgagctgcttctcctgctccacctgcaacagcaagctcaccctgaagaacaagtttgtggagttcgacatgaagcccgtgtgtaagaggtgctacgagaagttcccgctggagctgaagaagcggctgaagaagctgtcggagctgacctcccgcaaggcccagcccaaggccacagacctcaactctgcctgaaggccctcttgcgcagctgcctctcggcccctccgccttctcccctcctgctgtccatgcttggccccctcgtccccatccacctgtgccctccgcatcttaccctccctttctctttcctcattgccttctcccttcctgttccctcatctctgccttccccatgtctctcctctccttggccgtggcttctgtctgtgaggaggcaggagctggggagtgggagcctatgaccccacgtctgacagccatgtccacctgtgcccacagcttccgcccacagacctccagggacaggagcaaattgcaccacagctccccgcctggcctggccctccccaggcggctcagtggctcatgctgtcctgtgagagcccctgccccagagcggccccactaagcgcatgtggctcctgggctacccacagccagggcagcctgctggagccacagggccagggccatgcagatggaggcctctgggagccacctccaatccctcaccactcactcaaccagtggcacagtgtccttgtgcccacactgagccagcaagtcctgctgtccacacccacaagctacctggagggacaggacccacctccatccttcggaaggccttcctggaatcccaccttggcctccgccctcggttccgccccgcccctctccccccgaccttggggcttgtgtcgagcccttgggtggggccaggaggaggtgatggcgtcagaggaggtgtggtcagaggtgacttgttcccacctccagggaggacgcttcgtcttcggccagcgcagacctggtgtttgtttgttgggctcacgcttgcacaatgaaggcttgttcacacaaccaca

SEQ ID NO: 8292 - protein, 336 aa, Homo sapiens
MSDALANAVCQRCQARFSPAERIVNSNGELYHEHCFVCAQCFRPFPEGLFYEFEGRKYCEHDFQMLFAPCCGSCGEFIIGRVIKAMNNNWHPGCFRCELCDVELADLGFVKNAGRHLCRPCHNREKAKGLGKYICQRCHLVIDEQPLMFRSDAYHPDHFNCTHCGKELTAEARELKGELYCLPCHDKMGVPICGACRRPIEGRVVNALGKQWHVEHFVCAKCEKPFLGHRHYEKKGLAYCETHYNQLFGDVCYNCSHVIEGDVVSALNKAWCVSCFSCSTCNSKLTLKNKFVEFDMKPVCKRCYEKFPLELKKRLKKLSELTSRKAQPKATDLNSA

SEQ ID NO: 8293 - DNA, 1533 bp, Homo sapiens
agagggagacccgcggcaaccccggcaacccagggctcggcgtcgctgccaccatgacgggaagcaatatgtcggacgccttggccaacgccgtgtgccagcgctgccaggcccgcttctcccccgccgagcgcattgtcaacagcaatggggagctgtaccatgagcactgcttcgtgtgtgcccagtgcttccggcccttccccgaggggctcttctatgagtttgaaggccggaagtactgcgaacacgacttccaaatgctgtttgctccgtgctgtggatcctgcggtgagttcatcattggccgcgtcatcaaggccattgtgagaagccattcctggggcaccggcactatgagaagaagggcctggcctactgcgagactcactacaaccagctcttcggggacgtctgctacaactgcagccatgtgattgaaggcgatgtggtgtcggccctcaacaaggcctggtgtgtgagctgcttctcctgctccacctgcaacagcaagctcaccctgaagaacaagtttgtggagttcgacatgaagcccgtgtgtaagaggtgctacgagaagttcccgctggagctgaagaagcggctgaagaagctgtcggagctgacctcccgcaaggcccagcccaaggccacagacctcaactctgcctgaaggccctcttgcgcagctgcctctcggcccctccgccttctcccctcctgctgtccatgcttggccccctcgtccccatccacctgtgccctccgcatcttaccctccctttctctttcctcattgccttctcccttcctgttccctcatctctgccttccccatgtctctcctctccttggccgtggcttctgtctgtgaggaggcaggagctggggagtgggagcctatgaccccacgtctgacagccatgtccacctgtgcccacagcttccgcccacagacctccagggacaggagcaaattgcaccacagctccccgcctggcctggccctccccaggcggctcagtggctcatgctgtcctgtgagagcccctgccccagagcggccccactaagcgcatgtggctcctgggctacccacagccagggcagcctgctggagccacagggccagggccatgcagatggaggcctctgggagccacctccaatccctcaccactcactcaaccagtggcacagtgtccttgtgcccacactgagccagcaagtcctgctgtccacacccacaagctacctggagggacaggacccacctccatccttcggaaggccttcctggaatcccaccttggcctccgccctcggttccgccccgcccctctccccccgaccttggggcttgtgtcgagcccttgggtggggccaggaggaggtgatggcgtcagaggaggtgtggtcagaggtgacttgttcccacctccagggaggacgcttcgtcttcggccagcgcagacctggtgtttgtttgttgggctcacgcttgcacaatgaaggcttgttcacacaaccaca

SEQ ID NO: 8294 - protein, 127 aa, Homo sapiens
MTGSNMSDALANAVCQRCQARFSPAERIVNSNGELYHEHCFVCAQCFRPFPEGLFYEFEGRKYCEHDFQMLFAPCCGSCGEFIIGRVIKAIVRSHSWGTGTMRRRAWPTARLTTTSSSGTSATTAAM

SEQ ID NO: 8295 - DNA, 1981 bp, Homo sapiens
cccgggctggcgggcgggcgctcggctggcggctgcagcagcagagggagacccgcggcaaccccggcaacccagggctcggcgtcgctgccaccatgacgggaagcaatatgtcggacgccttggccaacgccgtgtgccagcgctgccaggcccgcttctcccccgccgagcgcattgtcaacagcaatggggagctgtaccatgagcactgcttcgtgtgtgcccagtgcttccggcccttccccgaggggctcttctatgagtttgaaggccggaagtactgcgaacacgacttccaaatgctgtttgctccgtgctgtggatcctgcggtgagttcatcattggccgcgtcatcaaggccatgaacaacaactggcacccgggctgcttccgctgcgagctgtgtgatgtggagctggctgacctgggctttgtgaagaatgccggcaggcatctctgccggccttgccacaaccgtgagaaggccaagggcctgggcaagtacatctgccagcggtgccacctggtcatcgacgagcagcccctcatgttcaggagcgacgcctaccaccctgaccacttcaactgcacccactgtgggaaggagctgacagccgaggcccgcgagctgaagggtgagctctactgcctgccctgccatgacaagatgggcgtccccatctgcggggcctgccgccggcccatcgagggccgagtggtcaacgcgctgggcaagcagtggcacgtggagcactttgtctgtgccaagtgtgagaagccattcctggggcaccggcactatgagaagaagggcctggcctactgcgagactcactacaaccagctcttcggggacgtctgctacaactgcagccatgtgattgaaggcgatgtggtgtcggccctcaacaaggcctggtgtgtgagctgcttctcctgctccacctgcaacagcaagctcaccctgaagaacaagtttgtggagttcgacatgaagcccgtgtgtaagaggtgctacgagaagttcccgctggagctgaagaagcggctgaagaagctgtcggagctgacctcccgcaaggcccagcccaaggccacagacctcaactctgcctgaaggccctcttgcgcagctgcctctcggcccctccgccttctcccctcctgctgtccatgcttggccccctcgtccccatccacctgtgccctccgcatcttaccctccctttctctttcctcattgccttctcccttcctgttccctcatctctgccttccccatgtctctcctctccttggccgtggcttctgtctgtgaggaggcaggagctggggagtgggagcctatgaccccacgtctgacagccatgtccacctgtgcccacagcttccgcccacagacctccagggacaggagcaaattgcaccacagctccccgcctggcctggccctccccaggcggctcagtggctcatgctgtcctgtgagagcccctgccccagagcggccccactaagcgcatgtggctcctgggctacccacagccagggcagcctgctggagccacagggccagggccatgcagatggaggcctctgggagccacctccaatccctcaccactcactcaaccagtggcacagtgtccttgtgcccacactgagccagcaagtcctgctgtccacacccacaagctacctggagggacaggacccacctccatccttcggaaggccttcctggaatcccaccttggcctccgccctcggttccgccccgcccctctccccccgaccttggggcttgtgtcgagcccttgggtggggccaggaggaggtgatggcgtcagaggaggtgtggtcagaggtgacttgttcccacctccagggaggacgcttcgtcttcggccagcgcagacctggtgtttgtttgttgggctcacgcttgcacaatgaaggcttgttcacacaaccaca

SEQ ID NO: 8296 - protein, 341 aa, Homo sapiens
MTGSNMSDALANAVCQRCQARFSPAERIVNSNGELYHEHCFVCAQCFRPFPEGLFYEFEGRKYCEHDFQMLFAPCCGSCGEFIIGRVIKAMNNNWHPGCFRCELCDVELADLGFVKNAGRHLCRPCHNREKAKGLGKYICQRCHLVIDEQPLMFRSDAYHPDHFNCTHCGKELTAEARELKGELYCLPCHDKMGVPICGACRRPIEGRVVNALGKQWHVEHFVCAKCEKPFLGHRHYEKKGLAYCETHYNQLFGDVCYNCSHVIEGDVVSALNKAWCVSCFSCSTCNSKLTLKNKFVEFDMKPVCKRCYEKFPLELKKRLKKLSELTSRKAQPKATDLNSA

SEQ ID NO: 8297 - DNA, 2562 bp, Homo sapiens
aagaaatatctttcgccaagttagggcgatggcccgcaacgggggatgaaatcggaatttcccggggaaagcagctttgcgactgaagagggacgcctctcggctttagcctccctgggggcgggactgcgtggactcggcggtcccgggtgcctcgggagggagtcagtgcccagatccgcggtgggaactccgggctaggaaagcccgggagggaggtggtctcagcatcgcccccacctatactcccgcaacctcccaccgtcacctccccaacacccccaccaccctcagccttgacctccccatcccaccccgccccgcgggccccaccctgccacccccgcccacccctctcgcgggcggagcggctcttggccttttttgggcgtctccctgctccgcggcccgggctggcgggcgggcgctcggctggcggctgcagcagcagagggagacccgcggcaaccccggcaacccagggctcggcgtcgctgccaccatgacgggaagatgaggtcaccagaggccacagaggctgagccactcaggaggccagtcacaggtccaccagtgtccggccagtgtttgtccctgcagccctttctggaacctagctgggaaaagaaagtggggagagacaggaacagggtccggagcagccccagcagcagcattgaggtggagcaatatgtcggacgccttggccaacgccgtgtgccagcgctgccaggcccgcttctcccccgccgagcgcattgtcaacagcaatggggagctgtaccatgagcactgcttcgtgtgtgcccagtgcttccggcccttccccgaggggctcttctatgagtttgaaggccggaagtactgcgaacacgacttccaaatgctgtttgctccgtgctgtggatcctgcggtgagttcatcattggccgcgtcatcaaggccatgaacaacaactggcacccgggctgcttccgctgcgagctgtgtgatgtggagctggctgacctgggctttgtgaagaatgccggcaggcatctctgccggccttgccacaaccgtgagaaggccaagggcctgggcaagtacatctgccagcggtgccacctggtcatcgacgagcagcccctcatgttcaggagcgacgcctaccaccctgaccacttcaactgcacccactgtgggaaggagctgacagccgaggcccgcgagctgaagggtgagctctactgcctgccctgccatgacaagatgggcgtccccatctgcggggcctgccgccggcccatcgagggccgagtggtcaacgcgctgggcaagcagtggcacgtggagcactttgtctgtgccaagtgtgagaagccattcctggggcaccggcactatgagaagaagggcctggcctactgcgagactcactacaaccagctcttcggggacgtctgctacaactgcagccatgtgattgaaggcgatgtggtgtcggccctcaacaaggcctggtgtgtgagctgcttctcctgctccacctgcaacagcaagctcaccctgaagaacaagtttgtggagttcgacatgaagcccgtgtgtaagaggtgctacgagaagttcccgctggagctgaagaagcggctgaagaagctgtcggagctgacctcccgcaaggcccagcccaaggccacagacctcaactctgcctgaaggccctcttgcgcagctgcctctcggcccctccgccttctcccctcctgctgtccatgcttggccccctcgtccccatccacctgtgccctccgcatcttaccctccctttctctttcctcattgccttctcccttcctgttccctcatctctgccttccccatgtctctcctctccttggccgtggcttctgtctgtgaggaggcaggagctggggagtgggagcctatgaccccacgtctgacagccatgtccacctgtgcccacagcttccgcccacagacctccagggacaggagcaaattgcaccacagctccccgcctggcctggccctccccaggcggctcagtggctcatgctgtcctgtgagagcccctgccccagagcggccccactaagcgcatgtggctcctgggctacccacagccagggcagcctgctggagccacagggccagggccatgcagatggaggcctctgggagccacctccaatccctcaccactcactcaaccagtggcacagtgtccttgtgcccacactgagccagcaagtcctgctgtccacacccacaagctacctggagggacaggacccacctccatccttcggaaggccttcctggaatcccaccttggcctccgccctcggttccgccccgcccctctccccccgaccttggggcttgtgtcgagcccttgggtggggccaggaggaggtgatggcgtcagaggaggtgtggtcagaggtgacttgttcccacctccagggaggacgcttcgtcttcggccagcgcagacctggtgtttgtttgttgggctcacgcttgcacaatgaaggcttgttcacacaaccaca

SEQ ID NO: 8298 - protein, 336 aa, Homo sapiens; identical to SEQ ID NO: 8292

SEQ ID NO: 8299 - DNA, 2019 bp, Homo sapiens
ggccggacactcctggcggctgctcagtcttgcacgtggctgtgccaagcgggccaggcagctgctatttccctcagagaagttgctggcggcgctcagggaaggaagcacccgaggaggcggagcggcatctcagccacagagcaatatgtcggacgccttggccaacgccgtgtgccagcgctgccaggcccgcttctcccccgccgagcgcattgtcaacagcaatggggagctgtaccatgagcactgcttcgtgtgtgcccagtgcttccggcccttccccgaggggctcttctatgagtttgaaggccggaagtactgcgaacacgacttccaaatgctgtttgctccgtgctgtggatcctgcggtgagttcatcattggccgcgtcatcaaggccatgaacaacaactggcacccgggctgcttccgctgcgagctgtgtgatgtggagctggctgacctgggctttgtgaagaatgccggcaggcatctctgccggccttgccacaaccgtgagaaggccaagggcctgggcaagtacatctgccagcggtgccacctggtcatcgacgagcagcccctcatgttcaggagcgacgcctaccaccctgaccacttcaactgcacccactgtgggaaggagctgacagccgaggcccgcgagctgaagggtgagctctactgcctgccctgccatgacaagatgggcgtccccatctgcggggcctgccgccggcccatcgagggccgagtggtcaacgcgctgggcaagcagtggcacgtggagcactttgtctgtgccaagtgtgagaagccattcctggggcaccggcactatgagaagaagggcctggcctactgcgagactcactacaaccagctcttcggggacgtctgctacaactgcagccatgtgattgaaggcgatgtggtgtcggccctcaacaaggcctggtgtgtgagctgcttctcctgctccacctgcaacagcaagctcaccctgaagaacaagtttgtggagttcgacatgaagcccgtgtgtaagaggtgctacgagaagttcccgctggagctgaagaagcggctgaagaagctgtcggagctgacctcccgcaaggcccagcccaaggccacagacctcaactctgcctgaaggccctcttgcgcagctgcctctcggcccctccgccttctcccctcctgctgtccatgcttggccccctcgtccccatccacctgtgccctccgcatcttaccctccctttctctttcctcattgccttctcccttcctgttccctcatctctgccttccccatgtctctcctctccttggccgtggcttctgtctgtgaggaggcaggagctggggagtgggagcctatgaccccacgtctgacagccatgtccacctgtgcccacagcttccgcccacagacctccagggacaggagcaaattgcaccacagctccccgcctggcctggccctccccaggcggctcagtggctcatgctgtcctgtgagagcccctgccccagagcggccccactaagcgcatgtggctcctgggctacccacagccagggcagcctgctggagccacagggccagggccatgcagatggaggcctctgggagccacctccaatccctcaccactcactcaaccagtggcacagtgtccttgtgcccacactgagccagcaagtcctgctgtccacacccacaagctacctggagggacaggacccacctccatccttcggaaggccttcctggaatcccaccttggcctccgccctcggttccgccccgcccctctccccccgaccttggggcttgtgtcgagcccttgggtggggccaggaggaggtgatggcgtcagaggaggtgtggtcagaggtgacttgttcccacctccagggaggacgcttcgtcttcggccagcgcagacctggtgtttgtttgttgggctcacgcttgcacaatgaaggcttgttcacacaaccaca

SEQ ID NO: 8300 - protein, 336 aa, Homo sapiens; identical to SEQ ID NO: 8292

SEQ ID NO: 8301 - DNA, 881 bp, Homo sapiens
cgggcgggcgctcggctggcggctgcagcagcagagggagacccgcggcaaccccggcaacccagggctcggcgtcgctgccaccatgacgggaagcaatatgtcggacgccttggccaacgccgtgtgccagcgctgccaggcccgcttctcccccgccgagcgcattgtcaacagcaatggggagctgtaccatgagcactgcttcgtgtgtgcccagtgcttccggcccttccccgaggggctcttctatgagtttgaaggccggaagtactgcgaacacgacttccaaatgctgtttgctccgtgctgtggatcctgcggtgagttcatcattggccgcgtcatcaaggccatgaacaacaactggcacccgggctgcttccgctgcgagctgtgtgatgtggagctggctgacctgggctttgtgaagaatgccggcaggcatctctgccggccttgccacaaccgtgagaaggccaagggcctgggcaagtacatctgccagcggtgccacctggtcatcgacgagcagcccctcatgttcaggagcgacgcctaccaccctgaccacttcaactgcacccactgtgggaaggagctgacagccgaggcccgcgagctgaagggtgagctctactgcctgccctgccatgacaagatgggcgtccccatctgcggggcctgccgccggcccatcgagggccgagtggtcaacgcgctgggcaagcagtggcacgtggagcactttgtctgtgccaagtgtgagaagccattcctggggcaccggcactatgagaagaagggcctggcctactgcgagactcactacaaccaggtgagcccggtgcagaaccttcagggatgcgggtctggagggg

SEQ ID NO: 8302 - protein, 264 aa, Homo sapiens
MTGSNMSDALANAVCQRCQARFSPAERIVNSNGELYHEHCFVCAQCFRPFPEGLFYEFEGRKYCEHDFQMLFAPCCGSCGEFIIGRVIKAMNNNWHPGCFRCELCDVELADLGFVKNAGRHLCRPCHNREKAKGLGKYICQRCHLVIDEQPLMFRSDAYHPDHFNCTHCGKELTAEARELKGELYCLPCHDKMGVPICGACRRPIEGRVVNALGKQWHVEHFVCAKCEKPFLGHRHYEKKGLAYCETHYNQVSPVQNLQGCGSG

SEQ ID NO: 8303 - DNA, 2185 bp, Homo sapiens
gggctagggacacactagaatattcacgctccggtggcagcagcagcagcagccagaggagcagcccgacacaacaagggacccctcaggaatgaagcagcctttcagggccagaggggctgtggtctcccttcctctccttaaatagccagcgttccacccacagcggcaaggagccccctgccaccaccgacacccacgggcggagatcacctgctgccccgcagacccctgtcccttcctcccggaccagcagctagaggctctgactccagccaaagcatgaatggccttgaagtggctcccccaggtctgatcaccaacttctccctggccacggcagagcaatgtggccaggagacgccactggagaacatgctgttcgcctccttctaccttctggattttatcctggctttagttggcaataccctggctctgtggcttttcatccgagaccacaagtccgggaccccggccaacgtgttcctgatgcatctggccgtggccgacttgtcgtgcgtgctggtcctgcccacccgcctggtctaccacttctctgggaaccactggccatttggggaaatcgcatgccgtctcaccggcttcctcttctacctcaacatgtacgccagcatctacttcctcacctgcatcagcgccgaccgtttcctggccattgtgcacccggtcaagtccctcaagctccgcaggcccctctacgcacacctggcctgtgccttcctgtgggtggtggtggctgtggccatggccccgctgctggtgagcccacagaccgtgcagaccaaccacacggtggtctgcctgcagctgtaccgggagaaggcctcccaccatgccctggtgtccctggcagtggccttcaccttcccgttcatcaccacggtcacctgctacctgctgatcatccgcagcctgcggcagggcctgcgtgtggagaagcgcctcaagaccaaggcagtgcgcatgatcgccatagtgctggccatcttcctggtctgcttcgtgccctaccacgtcaaccgctccgtctacgtgctgcactaccgcagccatggggcctcctgcgccacccagcgcatcctggccctggcaaaccgcatcacctcctgcctcaccagcctcaacggggcactcgaccccatcatgtatttcttcgtggctgagaagttccgccacgccctgtgcaacttgctctgtggcaaaaggctcaagggcccgccccccagcttcgaagggaaaaccaacgagagctcgctgagtgccaagtcagagctgtgagcggggggcgccgtccaggccgagcgcagactgtttaggactcagcagacccagcaagaggcatctgccctttccccagccacctccccagcaagcaacctgaaatctcagcagatgcccaccatttctctagatcgcctagtctcaacccataaaaaggaagaactgacaaaggggatccatcggccacccctctgcaggggcttgtgatggctacaatggctcctagacactcaacgacttcatctgtggcagggagagaggaggccggaagaacaacccctgaacaatggaggcctttctttcccgctaggctcccagcctccttcccgctacagaatcgctcatcggcgaggctcagcagaaagaccctgaaggcaggctgcaaatgacccagaagagggacctgggagtcctggtggggacggggagggagtctcaatactcctttgcagtgcaaggtactctgagtcccctctgtagtgcctctgccagacacacactgcctgagttgaagagacacaggccacacatttcaggctggttgccagcggacgtcagcactcacggcctgcagggactcagcacagctctggattctggatctctcctgctgtaaccccacgcacaagcctgcaacccccagagctctttgacaggctcccaggcctcccagtcctggacaagcatgtgcagtcacgggagctcagctcaggccagggctgggctgtgcacctgcctcccactgacccagacccacttcctccagagaggcctctctccgcctgagctatttcccttgctagtgtgcagatatttccctaacatgtccttttttgtatttgtttgtacggaccataaatataactgtagctttaagact

SEQ ID NO: 8304 - protein, 339 aa, Homo sapiens
MNGLEVAPPGLITNFSLATAEQCGQETPLENMLFASFYLLDFILALVGNTLALWLFIRDHKSGTPANVFLMHLAVADLSCVLVLPTRLVYHFSGNHWPFGEIACRLTGFLFYLNMYASIYFLTCISADRFLAIVHPVKSLKLRRPLYAHLACAFLWVVVAVAMAPLLVSPQTVQTNHTVVCLQLYREKASHHALVSLAVAFTFPFITTVTCYLLIIRSLRQGLRVEKRLKTKAVRMIAIVLAIFLVCFVPYHVNRSVYVLHYRSHGASCATQRILALANRITSCLTSLNGALDPIMYFFVAEKFRHALCNLLCGKRLKGPPPSFEGKTNESSLSAKSEL

SEQ ID NO: 8305 - DNA, 2325 bp, Homo sapiens
gggctagggacacactagaatattcacgctccggtggcagcagcagcagcagccagaggagcagcccgacacaacaagggacccctcaggaatgaagcagcctttcagggccagaggggctgtggtctcccttcctctccttaaatagccagcgttccacccacagcggcaaggagccccctgccaccaccgacacccacgggcggagatcacctgctgccccgcagacccctgtcccttcctcccggaccagcagctagaggctctgactccagccaaagcatgaatggccttgaagtggctcccccaggtctgatcaccaacttctccctggccacggcagagcaatgtggccaggagacgccactggagaacatgctgttcgcctccttctaccttctggattttatcctggctttagttggcaataccctggctctgtggcttttcatccgagaccacaagtccgggaccccggccaacgtgttcctgatgcatctggccgtggccgacttgtcgtgcgtgctggtcctgcccacccgcctggtctaccacttctctgggaaccactggccatttggggaaatcgcatgccgtctcaccggcttcctcttctacctcaacatgtacgccagcatctacttcctcacctgcatcagcgccgaccgtttcctggccattgtgcacccggtcaagtccctcaagctccgcaggcccctctacgcacacctggcctgtgccttcctgtgggtggtggtggctgtggccatggccccgctgctggtgagcccacagaccgtgcagaccaaccacacggtggtctgcctgcagctgtaccgggagaaggcctcccaccatgccctggtgtccctggcagtggccttcaccttcccgttcatcaccacggtcacctgctacctgctgatcatccgcagcctgcggcagggcctgcgtgtggagaagcgcctcaagaccaaggcagtgcgcatgatcgccatagtgctggccatcttcctggtctgcttcgtgccctaccacgtcaaccgctccgtctacgtgctgcactaccgcagccatggggcctcctgcgccacccagcgcatcctggccctggcaaaccgcatcacctcctgcctcaccagcctcaacggggcactcgaccccatcatgtatttcttcgtggctgagaagttccgccacgccctgtgcaacttgctctgtggcaaaaggctcaagggcccgccccccagcttcgaagggaaaaccaacgagagctcgctgagtgccaagtcagagctgtgagcggggggcgccgtccaggccgagcgcagactgtttaggactcagcagacccagcaagaggcatctgccctttccccagccacctccccagcaagcaacctgaaatctcagcagatgcccaccatttctctagatcgcctagtctcaacccataaaaaggaagaactgacaaaggggatccatcggccacccctctgcaggggcttgtgatggctacaatggctcctagacactcaacgacttcatctgtggcagggagagaggaggccggaagaacaacccctgaacaatggaggcctttctttcccgctaggctcccagcctccttcccgctacagaatcgctcatcggcgaggctcagcagaaagaccctgaaggcaggctgcaaatgacccagaagagggacctgggagtcctggtggggacggggagggagtctcaatactcctttgcagtgcaaggtactctgagtcccctctgtagtgcctctgccagacacacactgcctgagttgaagagacacaggccacacatttcaggctggttgccagcggacgtcagcactcacggcctgcagggactcagcacagctctggattctggatctctcctgctgtaaccccacgcacaagcctgcaacccccagagctctttgacaggctcccaggcctcccagtcctggacaagcatgtgcagtcacgggagctcagctcaggccagggctgggctgtgcacctgcctcccactgacccagacccacttcctccagagaggcctctctccgcctgagctatttcccttgctagtgtgcagatatttccctaacatgtccttttttgtatttgtttgtacggaccataaatataactgtagctttaagactacacaggttgttatgtttggtcaacatgaagcgtttcccagaacttctctgacccaagaatggtgaagtggtggtacagtggcagaggcagcctcgtgggctctcttgctggggctctggcagctcacagcacatctgcc

SEQ ID NO: 8306 - protein, 339 aa, Homo sapiens; identical to SEQ ID NO: 8304

SEQ ID NO: 8307 - DNA, 1723 bp, Homo sapiens
gacacaacaagggacccctcaggaatgaagcagcctttcagggccagaggggctgtggtctcccttcctctccttaaatagccagcgttccacccacagcggcaaggagccccctgccaccaccgacacccacgggcggagatcacctgctgccccgcagacccctgtcccttcctcccggaccagcagctagaggctctgactccagccaaagcatgaatggccttgaagtggctcccccaggtctgatcaccaacttctccctggccacggcagagcaatgtggccaggagacgccactggagaacatgctgttcgcctccttctacttcccaggcagcccaggatgtgtactgtcaccggccttaccgcaggatccacagcacggagcaaacagcatttggaagtcgtgttcgcagtacttccggccttcaaactgcaaaggggtcgcagagagaggacaagcaaaccacctatcatccccatgagcagcccaggcccttgttgggtcaggacctgacagcaggggatgaggcactgaggcaggggcatgccgggctgaggctggagcagtgggtcccaggcctggccagagaggacactggcccttttgggatggtggggtgcaaagggaggtgcccccgtggaagctggagaggtccgtgaggccacctgtcaaagggccactggtgtctactgaggatctggaccctgttggtccggagaacaggctgggggcgaggcggttttaagccaggagggatgagatccagtctgaagtgtagtgtcacttggtcctatttcgtataccttctctgtgggagtatccagctctctcagaggccatgaagacccgggtataggagacagaaggaagggaacgcaggaagggcctgggcacggggaagtgggaagagctcagggctgcggccagcaggagccagtgtgcacaccctccaggcggcagctgccagcgagggcccctgtgctggccacaagcggggccaaagcctgcctctgctttcctctaacaattgtattttctgttttttaattggtttttccctgttctctaaaatgagtgtcttattagactaaactggatatagccctacccagtgacctgtagagtcaggaagggcttaaactctttcagcaatgaaaatcttctgggcacctgctgtgtgtgagagagagaggctttgttctgggcatatggccacccctcctagagctttgcccacccctcccgctgcctctacacttagacagcattcctcaggaggctgaagacactgtgaggaacagcggctcttgctctgccaggcggaccacaggccccacatccatccaccagccagtcccatcagctctaccttgaaacagagccagcatctgacccctggccaccaccgccaccacaagcacaagtgatgttctggtaaatgctcaacagccagctctctggggcgcagaggcaggccctgctgtggggcgtttgccagtgtccatggtgtgaatattcccgtcatggccaactcctggctgccaacatgacatcgatgtggacttgaggggagatgtgcagtggccacaccagcacaatggacagaaataaccccatcagcatagacgatagtaaagtggaacaaaataattagcaagtggtatgctttgagtatttgttacctttgtttttaataaaattgtatcccattgtacg

SEQ ID NO: 8308 - protein, 90 aa, Homo sapiens
MNGLEVAPPGLITNFSLATAEQCGQETPLENMLFASFYFPGSPGCVLSPALPQDPQHGANSIWKSCSQYFRPSNCKGVAERGQANHLSSP

SEQ ID NO: 8309 - DNA, 1508 bp, Homo sapiens
ccaccgacacccacgggcggagatcacctgctgccccgcagacccctgtcccttcctcccggaccagcagctagaggctctgactccagccatggccccgctgctggtgagcccacagaccgtgcagaccaaccacacggtggtctgcctgcagctgtaccgggagaaggcctcccaccatgccctggtgtccctggcagtggccttcaccttcccgttcatcaccacggtcacctgctacctgctgatcatccgcagcctgcggcagggcctgcgtgtggagaagcgcctcaagaccaaggcagtgcgcatgatcgccatagtgctggccatcttcctggtctgcttcgtgccctaccacgtcaaccgctccgtctacgtgctgcactaccgcagccatggggcctcctgcgccacccagcgcatcctggccctggcaaaccgcatcacctcctgcctcaccagcctcaacggggcactcgaccccatcatgtatttcttcgtggctgagaagttccgccacgccctgtgcaacttgctctgtggcaaaaggctcaagggcccgccccccagcttcgaagggaaaaccaacgagagctcgctgagtgccaagtcagagctgtgagcggggggcgccgtccaggccgagcgcagactgtttaggactcagcagacccagcaagaggcatctgccctttccccagccacctccccagcaagcaacctgaaatctcagcagatgcccaccatttctctagatcgcctagtctcaacccataaaaaggaagaactgacaaaggggatccatcggccacccctctgcaggggcttgtgatggctacaatggctcctagacactcaacgacttcatctgtggcagggagagaggaggccggaagaacaacccctgaacaatggaggcctttctttcccgctaggctcccagcctccttcccgctacagaatcgctcatcggcgaggctcagcagaaagaccctgaaggcaggctgcaaatgacccagaagagggacctgggagtcctggtggggacggggagggagtctcaatactcctttgcagtgcaaggtactctgagtcccctctgtagtgcctctgccagacacacactgcctgagttgaagagacacaggccacacatttcaggctggttgccagcggacgtcagcactcacggcctgcagggactcagcacagctctggattctggatctctcctgctgtaaccccacgcacaagcctgcaacccccagagctctttgacaggctcccaggcctcccagtcctggacaagcatgtgcagtcacgggagctcagctcaggccagggctgggctgtgcacctgcctcccactgacccagacccacttcctccagagaggcctctctccgcctgagctatttcccttgctagtgtgcagatatttccctaacatgtccttttttgtatttgtttgtacggaccataaatataactgtagctttaagact

SEQ ID NO: 8310 - protein, 177 aa, Homo sapiens
MAPLLVSPQTVQTNHTVVCLQLYREKASHHALVSLAVAFTFPFITTVTCYLLIIRSLRQGLRVEKRLKTKAVRMIAIVLAIFLVCFVPYHVNRSVYVLHYRSHGASCATQRILALANRITSCLTSLNGALDPIMYFFVAEKFRHALCNLLCGKRLKGPPPSFEGKTNESSLSAKSEL

SEQ ID NO: 8311 - DNA, 1648 bp, Homo sapiens
ccaccgacacccacgggcggagatcacctgctgccccgcagacccctgtcccttcctcccggaccagcagctagaggctctgactccagccatggccccgctgctggtgagcccacagaccgtgcagaccaaccacacggtggtctgcctgcagctgtaccgggagaaggcctcccaccatgccctggtgtccctggcagtggccttcaccttcccgttcatcaccacggtcacctgctacctgctgatcatccgcagcctgcggcagggcctgcgtgtggagaagcgcctcaagaccaaggcagtgcgcatgatcgccatagtgctggccatcttcctggtctgcttcgtgccctaccacgtcaaccgctccgtctacgtgctgcactaccgcagccatggggcctcctgcgccacccagcgcatcctggccctggcaaaccgcatcacctcctgcctcaccagcctcaacggggcactcgaccccatcatgtatttcttcgtggctgagaagttccgccacgccctgtgcaacttgctctgtggcaaaaggctcaagggcccgccccccagcttcgaagggaaaaccaacgagagctcgctgagtgccaagtcagagctgtgagcggggggcgccgtccaggccgagcgcagactgtttaggactcagcagacccagcaagaggcatctgccctttccccagccacctccccagcaagcaacctgaaatctcagcagatgcccaccatttctctagatcgcctagtctcaacccataaaaaggaagaactgacaaaggggatccatcggccacccctctgcaggggcttgtgatggctacaatggctcctagacactcaacgacttcatctgtggcagggagagaggaggccggaagaacaacccctgaacaatggaggcctttctttcccgctaggctcccagcctccttcccgctacagaatcgctcatcggcgaggctcagcagaaagaccctgaaggcaggctgcaaatgacccagaagagggacctgggagtcctggtggggacggggagggagtctcaatactcctttgcagtgcaaggtactctgagtcccctctgtagtgcctctgccagacacacactgcctgagttgaagagacacaggccacacatttcaggctggttgccagcggacgtcagcactcacggcctgcagggactcagcacagctctggattctggatctctcctgctgtaaccccacgcacaagcctgcaacccccagagctctttgacaggctcccaggcctcccagtcctggacaagcatgtgcagtcacgggagctcagctcaggccagggctgggctgtgcacctgcctcccactgacccagacccacttcctccagagaggcctctctccgcctgagctatttcccttgctagtgtgcagatatttccctaacatgtccttttttgtatttgtttgtacggaccataaatataactgtagctttaagactacacaggttgttatgtttggtcaacatgaagcgtttcccagaacttctctgacccaagaatggtgaagtggtggtacagtggcagaggcagcctcgtgggctctcttgctggggctctggcagctcacagcacatctgcc

SEQ ID NO: 8312 - protein, 177 aa, Homo sapiens; identical to SEQ ID NO: 8310

SEQ ID NO: 8313 - DNA, 2061 bp, Homo sapiens
ccgacacccacgggcggagatcacctgctgccccgcagacccctgtcccttcctcccggaccagcagctagaggatgtccaaacggagttggtgggctggatccagaaagcccccaagagagatgctgaaactctcaggctctgactccagccaaagcatgaatggccttgaagtggctcccccaggtctgatcaccaacttctccctggccacggcagagcaatgtggccaggagacgccactggagaacatgctgttcgcctccttctaccttctggattttatcctggctttagttggcaataccctggctctgtggcttttcatccgagaccacaagtccgggaccccggccaacgtgttcctgatgcatctggccgtggccgacttgtcgtgcgtgctggtcctgcccacccgcctggtctaccacttctctgggaaccactggccatttggggaaatcgcatgccgtctcaccggcttcctcttctacctcaacatgtacgccagcatctacttcctcacctgcatcagcgccgaccgtttcctggccattgtgcacccggtcaagtccctcaagctccgcaggcccctctacgcacacctggcctgtgccttcctgtgggtggtggtggctgtggccatggccccgctgctggtgagcccacagaccgtgcagaccaaccacacggtggtctgcctgcagctgtaccgggagaaggcctcccaccatgccctggtgtccctggcagtggccttcaccttcccgttcatcaccacggtcacctgctacctgctgatcatccgcagcctgcggcagggcctgcgtgtggagaagcgcctcaagaccaaggcagtgcgcatgatcgccatagtgctggccatcttcctggtctgcttcgtgccctaccacgtcaaccgctccgtctacgtgctgcactaccgcagccatggggcctcctgcgccacccagcgcatcctggccctggcaaaccgcatcacctcctgcctcaccagcctcaacggggcactcgaccccatcatgtatttcttcgtggctgagaagttccgccacgccctgtgcaacttgctctgtggcaaaaggctcaagggcccgccccccagcttcgaagggaaaaccaacgagagctcgctgagtgccaagtcagagctgtgagcggggggcgccgtccaggccgagcgcagactgtttaggactcagcagacccagcaagaggcatctgccctttccccagccacctccccagcaagcaacctgaaatctcagcagatgcccaccatttctctagatcgcctagtctcaacccataaaaaggaagaactgacaaaggggatccatcggccacccctctgcaggggcttgtgatggctacaatggctcctagacactcaacgacttcatctgtggcagggagagaggaggccggaagaacaacccctgaacaatggaggcctttctttcccgctaggctcccagcctccttcccgctacagaatcgctcatcggcgaggctcagcagaaagaccctgaaggcaggctgcaaatgacccagaagagggacctgggagtcctggtggggacggggagggagtctcaatactcctttgcagtgcaaggtactctgagtcccctctgtagtgcctctgccagacacacactgcctgagttgaagagacacaggccacacatttcaggctggttgccagcggacgtcagcactcacggcctgcagggactcagcacagctctggattctggatctctcctgctgtaaccccacgcacaagcctgcaacccccagagctctttgacaggctcccaggcctcccagtcctggacaagcatgtgcagtcacgggagctcagctcaggccagggctgggctgtgcacctgcctcccactgacccagacccacttcctccagagaggcctctctccgcctgagctatttcccttgctagtgtgcagatatttccctaacatgtccttttttgtatttgtttgtacggaccataaatataactgtagctttaagact

SEQ ID NO: 8314 - protein, 367 aa, Homo sapiens; identical to SEQ ID NO: 608

SEQ ID NO: 8315 - DNA, 2193 bp, Homo sapiens
ccgcagacccctgtcccttcctcccggaccagcagctagagctctccgccctcaccgtggttttagcagtcctagggaaagtgccagccgagaccagccagaccaagtcagagtactgtggaacctggattcctggggaatggggtccccatgaggaactccacattggactaagaacagaccctgttcctggaagcagcaggaaaccatctctggtgttagaacttcaggcatcttgaaacactctgaagccgggggcaatcttttcaggctctgactccagccaaagcatgaatggccttgaagtggctcccccaggtctgatcaccaacttctccctggccacggcagagcaatgtggccaggagacgccactggagaacatgctgttcgcctccttctaccttctggattttatcctggctttagttggcaataccctggctctgtggcttttcatccgagaccacaagtccgggaccccggccaacgtgttcctgatgcatctggccgtggccgacttgtcgtgcgtgctggtcctgcccacccgcctggtctaccacttctctgggaaccactggccatttggggaaatcgcatgccgtctcaccggcttcctcttctacctcaacatgtacgccagcatctacttcctcacctgcatcagcgccgaccgtttcctggccattgtgcacccggtcaagtccctcaagctccgcaggcccctctacgcacacctggcctgtgccttcctgtgggtggtggtggctgtggccatggccccgctgctggtgagcccacagaccgtgcagaccaaccacacggtggtctgcctgcagctgtaccgggagaaggcctcccaccatgccctggtgtccctggcagtggccttcaccttcccgttcatcaccacggtcacctgctacctgctgatcatccgcagcctgcggcagggcctgcgtgtggagaagcgcctcaagaccaaggcagtgcgcatgatcgccatagtgctggccatcttcctggtctgcttcgtgccctaccacgtcaaccgctccgtctacgtgctgcactaccgcagccatggggcctcctgcgccacccagcgcatcctggccctggcaaaccgcatcacctcctgcctcaccagcctcaacggggcactcgaccccatcatgtatttcttcgtggctgagaagttccgccacgccctgtgcaacttgctctgtggcaaaaggctcaagggcccgccccccagcttcgaagggaaaaccaacgagagctcgctgagtgccaagtcagagctgtgagcggggggcgccgtccaggccgagcgcagactgtttaggactcagcagacccagcaagaggcatctgccctttccccagccacctccccagcaagcaacctgaaatctcagcagatgcccaccatttctctagatcgcctagtctcaacccataaaaaggaagaactgacaaaggggatccatcggccacccctctgcaggggcttgtgatggctacaatggctcctagacactcaacgacttcatctgtggcagggagagaggaggccggaagaacaacccctgaacaatggaggcctttctttcccgctaggctcccagcctccttcccgctacagaatcgctcatcggcgaggctcagcagaaagaccctgaaggcaggctgcaaatgacccagaagagggacctgggagtcctggtggggacggggagggagtctcaatactcctttgcagtgcaaggtactctgagtcccctctgtagtgcctctgccagacacacactgcctgagttgaagagacacaggccacacatttcaggctggttgccagcggacgtcagcactcacggcctgcagggactcagcacagctctggattctggatctctcctgctgtaaccccacgcacaagcctgcaacccccagagctctttgacaggctcccaggcctcccagtcctggacaagcatgtgcagtcacgggagctcagctcaggccagggctgggctgtgcacctgcctcccactgacccagacccacttcctccagagaggcctctctccgcctgagctatttcccttgctagtgtgcagatatttccctaacatgtccttttttgtatttgtttgtacggaccataaatataactgtagctttaagact

SEQ ID NO: 8316 - protein, 339 aa, Homo sapiens; identical to SEQ ID NO: 8304

SEQ ID NO: 8317 - DNA, 2333 bp, Homo sapiens
ccgcagacccctgtcccttcctcccggaccagcagctagagctctccgccctcaccgtggttttagcagtcctagggaaagtgccagccgagaccagccagaccaagtcagagtactgtggaacctggattcctggggaatggggtccccatgaggaactccacattggactaagaacagaccctgttcctggaagcagcaggaaaccatctctggtgttagaacttcaggcatcttgaaacactctgaagccgggggcaatcttttcaggctctgactccagccaaagcatgaatggccttgaagtggctcccccaggtctgatcaccaacttctccctggccacggcagagcaatgtggccaggagacgccactggagaacatgctgttcgcctccttctaccttctggattttatcctggctttagttggcaataccctggctctgtggcttttcatccgagaccacaagtccgggaccccggccaacgtgttcctgatgcatctggccgtggccgacttgtcgtgcgtgctggtcctgcccacccgcctggtctaccacttctctgggaaccactggccatttggggaaatcgcatgccgtctcaccggcttcctcttctacctcaacatgtacgccagcatctacttcctcacctgcatcagcgccgaccgtttcctggccattgtgcacccggtcaagtccctcaagctccgcaggcccctctacgcacacctggcctgtgccttcctgtgggtggtggtggctgtggccatggccccgctgctggtgagcccacagaccgtgcagaccaaccacacggtggtctgcctgcagctgtaccgggagaaggcctcccaccatgccctggtgtccctggcagtggccttcaccttcccgttcatcaccacggtcacctgctacctgctgatcatccgcagcctgcggcagggcctgcgtgtggagaagcgcctcaagaccaaggcagtgcgcatgatcgccatagtgctggccatcttcctggtctgcttcgtgccctaccacgtcaaccgctccgtctacgtgctgcactaccgcagccatggggcctcctgcgccacccagcgcatcctggccctggcaaaccgcatcacctcctgcctcaccagcctcaacggggcactcgaccccatcatgtatttcttcgtggctgagaagttccgccacgccctgtgcaacttgctctgtggcaaaaggctcaagggcccgccccccagcttcgaagggaaaaccaacgagagctcgctgagtgccaagtcagagctgtgagcggggggcgccgtccaggccgagcgcagactgtttaggactcagcagacccagcaagaggcatctgccctttccccagccacctccccagcaagcaacctgaaatctcagcagatgcccaccatttctctagatcgcctagtctcaacccataaaaaggaagaactgacaaaggggatccatcggccacccctctgcaggggcttgtgatggctacaatggctcctagacactcaacgacttcatctgtggcagggagagaggaggccggaagaacaacccctgaacaatggaggcctttctttcccgctaggctcccagcctccttcccgctacagaatcgctcatcggcgaggctcagcagaaagaccctgaaggcaggctgcaaatgacccagaagagggacctgggagtcctggtggggacggggagggagtctcaatactcctttgcagtgcaaggtactctgagtcccctctgtagtgcctctgccagacacacactgcctgagttgaagagacacaggccacacatttcaggctggttgccagcggacgtcagcactcacggcctgcagggactcagcacagctctggattctggatctctcctgctgtaaccccacgcacaagcctgcaacccccagagctctttgacaggctcccaggcctcccagtcctggacaagcatgtgcagtcacgggagctcagctcaggccagggctgggctgtgcacctgcctcccactgacccagacccacttcctccagagaggcctctctccgcctgagctatttcccttgctagtgtgcagatatttccctaacatgtccttttttgtatttgtttgtacggaccataaatataactgtagctttaagactacacaggttgttatgtttggtcaacatgaagcgtttcccagaacttctctgacccaagaatggtgaagtggtggtacagtggcagaggcagcctcgtgggctctcttgctggggctctggcagctcacagcacatctgcc

SEQ ID NO: 8318 - protein, 339 aa, Homo sapiens; identical to SEQ ID NO: 8304

SEQ ID NO: 8319 - DNA, 2154 bp, Homo sapiens
agctctccgccctcaccgtggttttagcagtcctagggaaagtgccagccgagaccagccagaccaagtcagagtactgtggaacctggattcctggggaatggggtccccatgaggaactccacattggactaagaacagaccctgttcctggaagcagcaggaaaccatctctggtgttagaacttcaggcatcttgaaacactctgaagccgggggcaatcttttcaggctctgactccagccaaagcatgaatggccttgaagtggctcccccaggtctgatcaccaacttctccctggccacggcagagcaatgtggccaggagacgccactggagaacatgctgttcgcctccttctaccttctggattttatcctggctttagttggcaataccctggctctgtggcttttcatccgagaccacaagtccgggaccccggccaacgtgttcctgatgcatctggccgtggccgacttgtcgtgcgtgctggtcctgcccacccgcctggtctaccacttctctgggaaccactggccatttggggaaatcgcatgccgtctcaccggcttcctcttctacctcaacatgtacgccagcatctacttcctcacctgcatcagcgccgaccgtttcctggccattgtgcacccggtcaagtccctcaagctccgcaggcccctctacgcacacctggcctgtgccttcctgtgggtggtggtggctgtggccatggccccgctgctggtgagcccacagaccgtgcagaccaaccacacggtggtctgcctgcagctgtaccgggagaaggcctcccaccatgccctggtgtccctggcagtggccttcaccttcccgttcatcaccacggtcacctgctacctgctgatcatccgcagcctgcggcagggcctgcgtgtggagaagcgcctcaagaccaaggcagtgcgcatgatcgccatagtgctggccatcttcctggtctgcttcgtgccctaccacgtcaaccgctccgtctacgtgctgcactaccgcagccatggggcctcctgcgccacccagcgcatcctggccctggcaaaccgcatcacctcctgcctcaccagcctcaacggggcactcgaccccatcatgtatttcttcgtggctgagaagttccgccacgccctgtgcaacttgctctgtggcaaaaggctcaagggcccgccccccagcttcgaagggaaaaccaacgagagctcgctgagtgccaagtcagagctgtgagcggggggcgccgtccaggccgagcgcagactgtttaggactcagcagacccagcaagaggcatctgccctttccccagccacctccccagcaagcaacctgaaatctcagcagatgcccaccatttctctagatcgcctagtctcaacccataaaaaggaagaactgacaaaggggatccatcggccacccctctgcaggggcttgtgatggctacaatggctcctagacactcaacgacttcatctgtggcagggagagaggaggccggaagaacaacccctgaacaatggaggcctttctttcccgctaggctcccagcctccttcccgctacagaatcgctcatcggcgaggctcagcagaaagaccctgaaggcaggctgcaaatgacccagaagagggacctgggagtcctggtggggacggggagggagtctcaatactcctttgcagtgcaaggtactctgagtcccctctgtagtgcctctgccagacacacactgcctgagttgaagagacacaggccacacatttcaggctggttgccagcggacgtcagcactcacggcctgcagggactcagcacagctctggattctggatctctcctgctgtaaccccacgcacaagcctgcaacccccagagctctttgacaggctcccaggcctcccagtcctggacaagcatgtgcagtcacgggagctcagctcaggccagggctgggctgtgcacctgcctcccactgacccagacccacttcctccagagaggcctctctccgcctgagctatttcccttgctagtgtgcagatatttccctaacatgtccttttttgtatttgtttgtacggaccataaatataactgtagctttaagact

SEQ ID NO: 8320 - protein, 339 aa, Homo sapiens; identical to SEQ ID NO: 8304

SEQ ID NO: 8321 - DNA, 2294 bp, Homo sapiens
agctctccgccctcaccgtggttttagcagtcctagggaaagtgccagccgagaccagccagaccaagtcagagtactgtggaacctggattcctggggaatggggtccccatgaggaactccacattggactaagaacagaccctgttcctggaagcagcaggaaaccatctctggtgttagaacttcaggcatcttgaaacactctgaagccgggggcaatcttttcaggctctgactccagccaaagcatgaatggccttgaagtggctcccccaggtctgatcaccaacttctccctggccacggcagagcaatgtggccaggagacgccactggagaacatgctgttcgcctccttctaccttctggattttatcctggctttagttggcaataccctggctctgtggcttttcatccgagaccacaagtccgggaccccggccaacgtgttcctgatgcatctggccgtggccgacttgtcgtgcgtgctggtcctgcccacccgcctggtctaccacttctctgggaaccactggccatttggggaaatcgcatgccgtctcaccggcttcctcttctacctcaacatgtacgccagcatctacttcctcacctgcatcagcgccgaccgtttcctggccattgtgcacccggtcaagtccctcaagctccgcaggcccctctacgcacacctggcctgtgccttcctgtgggtggtggtggctgtggccatggccccgctgctggtgagcccacagaccgtgcagaccaaccacacggtggtctgcctgcagctgtaccgggagaaggcctcccaccatgccctggtgtccctggcagtggccttcaccttcccgttcatcaccacggtcacctgctacctgctgatcatccgcagcctgcggcagggcctgcgtgtggagaagcgcctcaagaccaaggcagtgcgcatgatcgccatagtgctggccatcttcctggtctgcttcgtgccctaccacgtcaaccgctccgtctacgtgctgcactaccgcagccatggggcctcctgcgccacccagcgcatcctggccctggcaaaccgcatcacctcctgcctcaccagcctcaacggggcactcgaccccatcatgtatttcttcgtggctgagaagttccgccacgccctgtgcaacttgctctgtggcaaaaggctcaagggcccgccccccagcttcgaagggaaaaccaacgagagctcgctgagtgccaagtcagagctgtgagcggggggcgccgtccaggccgagcgcagactgtttaggactcagcagacccagcaagaggcatctgccctttccccagccacctccccagcaagcaacctgaaatctcagcagatgcccaccatttctctagatcgcctagtctcaacccataaaaaggaagaactgacaaaggggatccatcggccacccctctgcaggggcttgtgatggctacaatggctcctagacactcaacgacttcatctgtggcagggagagaggaggccggaagaacaacccctgaacaatggaggcctttctttcccgctaggctcccagcctccttcccgctacagaatcgctcatcggcgaggctcagcagaaagaccctgaaggcaggctgcaaatgacccagaagagggacctgggagtcctggtggggacggggagggagtctcaatactcctttgcagtgcaaggtactctgagtcccctctgtagtgcctctgccagacacacactgcctgagttgaagagacacaggccacacatttcaggctggttgccagcggacgtcagcactcacggcctgcagggactcagcacagctctggattctggatctctcctgctgtaaccccacgcacaagcctgcaacccccagagctctttgacaggctcccaggcctcccagtcctggacaagcatgtgcagtcacgggagctcagctcaggccagggctgggctgtgcacctgcctcccactgacccagacccacttcctccagagaggcctctctccgcctgagctatttcccttgctagtgtgcagatatttccctaacatgtccttttttgtatttgtttgtacggaccataaatataactgtagctttaagactacacaggttgttatgtttggtcaacatgaagcgtttcccagaacttctctgacccaagaatggtgaagtggtggtacagtggcagaggcagcctcgtgggctctcttgctggggctctggcagctcacagcacatctgcc

SEQ ID NO: 8322 - protein, 339 aa, Homo sapiens; identical to SEQ ID NO: 8304

SEQ ID NO: 8323 - DNA, 2127 bp, Homo sapiens
atgtccaaacggagttggtgggctggatccagaaagcccccaagagagatgctgaaactctcaggctctgactccagccaaagcatgaatggccttgaagtggctcccccaggtctgatcaccaacttctccctggccacggcagagcaatgtggccaggagacgccactggagaacatgctgttcgcctccttctaccttctggattttatcctggctttagttggcaataccctggctctgtggcttttcatccgagaccacaagtccgggaccccggccaacgtgttcctgatgcatctggccgtggccgacttgtcgtgcgtgctggtcctgcccacccgcctggtctaccacttctctgggaaccactggccatttggggaaatcgcatgccgtctcaccggcttcctcttctacctcaacatgtacgccagcatctacttcctcacctgcatcagcgccgaccgtttcctggccattgtgcacccggtcaagtccctcaagctccgcaggcccctctacgcacacctggcctgtgccttcctgtgggtggtggtggctgtggccatggccccgctgctggtgagcccacagaccgtgcagaccaaccacacggtggtctgcctgcagctgtaccgggagaaggcctcccaccatgccctggtgtccctggcagtggccttcaccttcccgttcatcaccacggtcacctgctacctgctgatcatccgcagcctgcggcagggcctgcgtgtggagaagcgcctcaagaccaaggcagtgcgcatgatcgccatagtgctggccatcttcctggtctgcttcgtgccctaccacgtcaaccgctccgtctacgtgctgcactaccgcagccatggggcctcctgcgccacccagcgcatcctggccctggcaaaccgcatcacctcctgcctcaccagcctcaacggggcactcgaccccatcatgtatttcttcgtggctgagaagttccgccacgccctgtgcaacttgctctgtggcaaaaggctcaagggcccgccccccagcttcgaagggaaaaccaacgagagctcgctgagtgccaagtcagagctgtgagcggggggcgccgtccaggccgagcgcagactgtttaggactcagcagacccagcaagaggcatctgccctttccccagccacctccccagcaagcaacctgaaatctcagcagatgcccaccatttctctagatcgcctagtctcaacccataaaaaggaagaactgacaaaggggatccatcggccacccctctgcaggggcttgtgatggctacaatggctcctagacactcaacgacttcatctgtggcagggagagaggaggccggaagaacaacccctgaacaatggaggcctttctttcccgctaggctcccagcctccttcccgctacagaatcgctcatcggcgaggctcagcagaaagaccctgaaggcaggctgcaaatgacccagaagagggacctgggagtcctggtggggacggggagggagtctcaatactcctttgcagtgcaaggtactctgagtcccctctgtagtgcctctgccagacacacactgcctgagttgaagagacacaggccacacatttcaggctggttgccagcggacgtcagcactcacggcctgcagggactcagcacagctctggattctggatctctcctgctgtaaccccacgcacaagcctgcaacccccagagctctttgacaggctcccaggcctcccagtcctggacaagcatgtgcagtcacgggagctcagctcaggccagggctgggctgtgcacctgcctcccactgacccagacccacttcctccagagaggcctctctccgcctgagctatttcccttgctagtgtgcagatatttccctaacatgtccttttttgtatttgtttgtacggaccataaatataactgtagctttaagactacacaggttgttatgtttggtcaacatgaagcgtttcccagaacttctctgacccaagaatggtgaagtggtggtacagtggcagaggcagcctcgtgggctctcttgctggggctctggcagctcacagcacatctgcc

SEQ ID NO: 8324 - protein, 367 aa, Homo sapiens; identical to SEQ ID NO: 608

SEQ ID NO: 8325 - DNA, 275 bp, Homo sapiens
ctaccacttctctgggaaccactggccatttggggaaatcgcatgccgtctcaccggcttcctcttctacctcaacatgtacgccagcatctacttcctcacctgcatcagcgccgaccgtttcctggccattgtgcacccggtcaagtccctcaagctccgcaggcctctctccgcctgagctatttcccttgctagtgtgcagatatttccctaacatgtccttttttgtatttgtttgtacggaccataaatataactgtagctttaagact

SEQ ID NO: 8326 - protein, 51 aa, Homo sapiens [sequence omitted]

SEQ ID NO: 8327 - DNA, 1051 bp, Homo sapiens
cccgttcatcaccacggtcacctgctacctgctgatcatccgcagcctgcggcagggcctgcgtgtggagaagcgcctcaagaccaaggcagtgcgcatgatcgccatagtgctggccatcttcctggtctgcttcgtgccctaccacgtcaaccgctccgtctacgtgctgcactaccgcagccatggggcctcctgcgccacccagcgcatcctggccctggcaaaccgcatcacctcctgcctcaccagcctcaacggggcactcgaccccatcatgtatttcttcgtggctgagaagttccgccacgccctgtgcaacttgctctgtggcaaaaggctcaagggcccgccccccagcttcgaagggaaaaccaacgagagctcgctgagtgccaagtcagagctgtgagcggggggcgccgtccaggccgagcgcagactgtttaggactcagcagacccagcaagaggcatctgccctttccccagccacctccccagcaagcaacctgaaatctcagcagatgcccaccatttctctagatcgcctagtctcaacccataaaaaggaagaactgacaaaggggatccatcggccacccctctgcaggggcttgtgatggctacaatggctcctagacactcaacgacttcatctgtggcagggagagaggaggccggaagaacaacccctgaacaatggaggcctttctttcccgctaggctcccagcctccttcccgctacagaatcgctcatcggcgaggctcagcagaaagaccctgaaggcaggctgcaaatgacccagaagagggacctgggagtcctggtggggacggggagggagtctcaatactcctttgcagtgcaaggtactctgagtcccctctgtagtgcctctgccagacacacatgacccagacccacttcctccagagaggcctctctccgcctgagctatttcccttgctagtgtgcagatatttccctaacatgtccttttttgtatttgtttgtacggaccataaatataactgtagctttaagact

SEQ ID NO: 8328 - protein, 45 aa, Homo sapiens
MTQTHFLQRGLSPPELFPLLVCRYFPNMSFFVFVCTDHKYNCSFK

SEQ ID NO: 8329 - DNA, 1040 bp, Homo sapiens
ggaagaacaacccctgaacaatggaggcctttctttcccgctaggctcccagcctccttcccgctacagaatcgctcatcggcgaggctcagcagaaagaccctgaaggcaggctgcaaatgacccagaagagggacctgggagtcctggtggggacggggagggagtctcaatactcctttgcagtgcaaggtactctgagtcccctctgtagtgcctctgccagacacacactgcctgagttgaagagacacaggccacacatttcaggctggttgccagcggacgtcagcactcacggcctgcagggactcagcacagctctggattctggatctctcctgctgtaaccccacgcacaagcctgcaacccccagagctctttgacaggctcccaggcctcccagtcctggacaagcatgtgcagtcacgggagctcagctcaggccagggctgggctgtgcacctgcctcccactgacccagacccacttcctccagagaggcctctctccgcctgagctatttcccttgctagtgtgcagatatttccctaacatgtccttttttgtatttgtttgtacggaccataaatataactgtagctttaagactacacaggttgttatgtttggtcaacatgaagcgtttcccagaacttctctgacccaagaatggtgaagtggtggtacagtggcagaggcagcctcgtgggctctcttgctggggctctggcagctcacagcacatctgcccagattctgaggttctgcactgtggggctgggagggccaagtaggggccctcattcctcactctagctgccacccctgttggtccggagaacaggctgggggcgaggcggttttaagccaggagggatgagatccagtctgaagtgtagtgtcacttggtcctatttcgtataccttctctgtgggagtatccagctctctcagaggccatgaagacccgggtataggagacagaaggaagggaacgcaggaagggcctgggcacggggaagtgggaagagctcag

SEQ ID NO: 8330 - protein, 86 aa, Homo sapiens [sequence omitted]

SEQ ID NO: 8331 - DNA, 1477 bp, Homo sapiens
ttctgtctgcaagggcagccatgagggccgggcacggagccccagacgactccccatggagagacagggagaaaggtgactcagaggaggggagtgagcaggtgcagctgtgggggcgggcagaaccacaggaactcagggtcccgggtgccagaaggggggcgtttctgcacctcagcagctgtggtgagggctgctgaggggtcaagaggaggtgtgggtccctgggcagatgaggccagggtagcacacgcgaggggcagcgggtgtgctgggagaagccggggaggaaggcccagcagtgtttttaacccagctccccagcccagtccttcagaaaggacgagagatgggtagcacacaggagaggtggcaggtgtgccaggaagggctgtggcccagtcctctctggcccaacacggccacctcacctgccggcattcttcacaaagcccaggtcagccagctccacatcacacagctcgcagcggaagcagcccgggtgccagttgttgttcatggccttgatgacgcggccaatgatgaactcacctggaagaagacaggtccctgctggctggggagcacgtgcctgtcccctcttcggaccctcccaagccctgtccacctagcactccgcctgctctctgcctggcccatgggctccctcgtgggatggtgatgcctgtagggggcctgacggctgccgctcagagaggcaaggtggggagttaggaaagagctgggccagttctgtgtaccccctcggccccctgccccccgccactgctgcccacttcccaggcagcccaggatgtgtactgtcaccggccttaccgcaggatccacagcacggagcaaacagcatttggaagtcgtgttcgcagtacttccggccttcaaactgcaaaggggtcgcagagagaggacaagcaaaccacctatcatccccatgagcagcccaggcccttgttgggtcaggacctgacagcaggggatgaggcactgaggcaggggcatgccgggctgaggctggagcagtgggtcccaggcctggccagagaggacactggcccttttgggatggtggggtgcaaagggaggtgcccccgtggaagctggagaggtccgtgaggccacctgtcaaagggccactggtgtctactgaggatctggaccctgttggtccggagaacaggctgggggcgaggcggttttaagccaggagggatgagatccagtctgaagtgtagtgtcacttggtcctatttcgtataccttctctgtgggagtatccagctctctcagaggccatgaagacccgggtataggagacagaaggaagggaacgcaggaagggcctgggcacggggaagtgggaagagctcagggctgcggccagcaggagccagtgtgcacaccctccaggcggcagctgccagcgagggcccctgtgctggccacaagcggggccaaa

SEQ ID NO: 8332 - protein, 110 aa, Homo sapiens
MGSTQERWQVCQEGLWPSPLWPNTATSPAGILHKAQVSQLHITQLAAEAARVPVVVHGLDDAANDELTWKKTGPCWLGSTCLSPLRTLPSPVHLALRLLSAWPMGSLVGW

SEQ ID NO: 8333 - DNA, 664 bp, Homo sapiens
tctgtgatcgccattaaggctgtggcctggggtctcagggcagcccaggaaccaaaaatagcctgtaacttgtcactttgtaagtcctgccctccagacacacttccctttcttctccccaagcctctcttcccagttagctcccctgacttggagtcacctctaagccttggcccaggcccctctgcagtgagatggagggactcatcccccggagagtggcatctgcaggcccactggctgcctgtggtcaccccctagggttctagcggggctgcctcccattttcctcagagcatccctgccagctggctggttctcactctcctgttttctaggaaaagaaagtggggagagacaggaacagggtccggagcagccccagcagcagcattgaggtggagagatggattcttgccatattgcccaggctggtctcgaactcctgggctcaagggatccgcccaccttggcctcccacagtgctctggatgacaggcttgagccattctgcacacgcacccagctaccctcttgcctgctctgtgtttgggtggttatgtgtttattggaggcagtcagtttgaaactaactcatggtgcagaggatggaaccatggaagactgagcagtctggattcaagtgtggaccccgctctgctgt

SEQ ID NO: 8334 - protein, 73 aa, Homo sapiens [sequence omitted]

SEQ ID NO: 8335 - DNA, 2932 bp, Homo sapiens
aaggacctctggccaagcctcctgcccagggagaggtgaagtgccgtctcttctctgccccccctttcagagcattctccccccaggggcactgtgtgcagcactctggggagcaccatctacacagaccccagggaggggtgctcctgggggaggcattgcaggggccctgcctgcccctctgcagctggactcaggcccctcactccaagggaccggctcttgacccaaacccagatgcttccctggcctctgcacgcagcagtgtgcacacggggcagtggcgcacctcctccctggagctctttccctccgggcttctgtggcacctcacactctcctgctctccccctcactttctgccagtcccacctcttacccttggagggctcctgactggtacagacaccccagggtctccatggagccctagagttgaaattccatttgtaccaagccttctgcatctacgctggagaatggacctctcttccctgctccaggttcacagtgccccgcccaccatctcccctgggatgcctggggagggcccaatgcaacgtcacccctcgctaacctgcccagactgtcccactgccaccaatatctaggaaagcaaggccacctgcaagtcctcttgactcccacggctgtacattcacacctgccacacacacacctgccccacaaccaccacacctgtgctgaccacgcccacgccggccacacacacacatccagattcccagcaaatcctgttggttgcaaaatagatcctgtgtttgatgccttctcaatgtccctactgtcgcacggcccaaggcaccagtccctcctggacgctcaccatagcctctaatcagactgtccctgagaccactctgtccctcacacagtggccacacagcagctagggacacttcccccttttgctatgaaaaagttcaagcactcatcaaagttgaaaacccagatacccaccacctagattctcccattaatatcgtcgtagactcacgttaccacctctctgtccttccctttacccatctccccatcttgagttcattttttagaggcagagtcatgctatgttgcccaagctggtcttgaattcctggcctcaagtgatcctccctcctcagcctccccgtagctaaggactagctgggactacggggatccaccacatcggctcatcttgatttaaacaatgtatttcaaagtaagttgcagacatcagtacctttctacctaaacacttcagcattgtatgtcattaactggagttcagtatcgtttacggtatttttcttttgaggtaaaatgtacatataatgaaatgtgcaaatcctggccatatattccatgagttttaacaaaggcatatacacttgtgtgacccaaactcctactaaaacattgcctgttaccccagaaactccctcacattccttcctagtcaacccctgtcctgccacctcagggcagtccggggtgtaatagaccagcctgaggcagccaccgttctgattttttctaccacagacaaatgttgcctattctagaacttgatatagatggaaaaggtgctcttttttcattcagtcagtatttctgagattcacccctgctgatgctagagtgttgtgtctgtctttgcttagaactctccatctaagggtggaatcctacttctgctgtggccctgctgctctgccctgggccctctcctttatttcccgtgcccctccacctgccacctcccctttttccagacccactggtcttctttctgaccttgcgtaccccaagctcatgtcacctcagggctgttgcacttgctgttctgccggaatgcttttcctgcagatggctgagggctggctctttcccttattctggtttagcttgaatgtcacctgctcagaaactttccctcacccttcactctaaagcagccaccaccattgtccttttctttgcagcacttacccttgtctaaaatctagtttgcgtatttatttatttgtttattgcccatcctccacctcctgctaaactccatgagagcctggtccatggcttctttctccccctagtacttccagtgcccatgcggtataaatactcttgaaggaacaagtggataagtgtgtgaatgtgtgattgccagctctttcctgcaactctgccctcttggctgaactgtgggaggctggccctggctccttgaagcctctgcatctccagcagggctaagccatgcccacaacccctaccagctgttactgagcttgccctggcccagggatgaggcacactgggagctgcatagggtcctggtttggccacatacagatccgtgtgtgctcagctatcatatgcagggaggcttttgggctaaaaggcaggaatgtggtctcctctgtggagagcatgggcctctggtgtaatgctttcaacttttcatcctctttggttcccacaagaccctgatattcaattaaccgtccagcagtggatttctggtgcacggccccagcatgcctacacctctgtgtcagtaatggtggaaagcctttctccctgtatgagcaggtgagccaagaaattatccatacttaagcttaatcaaccatcaaattacagttaagccgaatcagctgagacacgctcgcaacaagaagtaataactcgagacagtcggatcacctgaggccaggagtttgcaaccagcctgaccaacatggtgaaacccatctctatcaaaaatacaaaattagctgggtgtggtggcatatgcttgtaatcccagctacttgggaggctgaggcaggagaatcgcttgaacctgggaggcggaggttgcagtgagcggagattgcaccattgcactccagcctgggcaataagagcgaaactccgtctc

SEQ ID NO: 8336 - protein, 62 aa, Homo sapiens
MWSPLWRAWASGVMLSTFHPLWFPQDPDIQLTVQQWISGARPQHAYTSVSVMVESLSPCMSR

SEQ ID NO: 8337 - DNA, 2928 bp, Homo sapiens
ttgaatttttaagtttttatttaagaaataaacattgtaaaacatcattataaaacccccaactattgcaagttctagagaaatttaaaactagaacagaaatttaggggactagaaagagcagccaatggcacaagtctttacaattaattaaaaaaataaatcattctgaagatactgcatttgctctctcacaagcagcctcctgaggtaggtaaccttgtttactgatggggaacaaggcagtgttctttaccaaatctcagggcgggtagcctgcaagcctacagtgtggatgttggccacttgtgtcacttcttgggacggggcttagggacctgacttacttaggaacataaattttggggttggaggaagcagcagtgctctactgcggcacgacagacaccctgttaaggcaacactgggatccagctcaggaaaagcattactttcaaattgtgcaagccaatgcacagaaaagtgtggctcttcaagtaactgatgtgcagtcaagcgcgaggaccactggcacacaatgtttaaattctaaatatattttacttcctagtgtattgctactgacaaaacgtagttttctggactcatcagaatgttaggctcataccttctggcaataaattaaggtagttaaaagtaactgctgaacctaaaatgaaggcagcagcaattagatataaaaaaatcttaagatcagcctgcaaattgtaaactagtttacaaagcaggctatacaatgaggaataattcgagcttgtagaaatccatggtttccaccagatacaggtattccggatctagaattatctttctatttgcaggatttccgaagagaccgttaagcatctacgcgccccttcctggatcccatgcttcttggggcaggaaatttcttttggtccgtcgctttcgtcgtgaaatacacaactaattttcctttcatgttataaggcaccatatttatgattttgttaactgaagaaaaaacccgagataaaccatcttaagtacttttaaaagtccagtggctgaattcggtgtttaatctgatacccttctggattcgctgacactggagagaataatttccaagtcttagtatagccaaaacaaaaaactaccgtcgctaagctacatctaccactggattttaaaatgacaaaacagcctgagaaaaatcacaagagcagctaactcgaagaaaaatcctttttctttactcagccgaacctaagaccacagttacttcgaaagcaacttctaataaccgtctcacatcctgtcaccagttcaatgacaaaatctcagttttcagagcgtgtgccaagtccagcacaaaaagctgacatcgaggagctcccaacgctgctgtcgcctccgctggcagcagccgctcccggattagactcgcaggctgttagggcagggccttcgccacgggcttccgcacagcggcgtgcagtcctcagctcggccggcgcggtctccgacggcgctggctccgcgtacttccccagcggcgagggcgcgaggtcctcacacgggcagcaccttggcgaggccggcgccgcggcccaggcgacccagtgcgaggcgcagcgcggtgccgccgccccagggcagcagcccaaccagcgcggccagcagcgcggccacctgcgcgcccgcgcccagcaccgtgagcagcgtgctgcgaaggcccagcgcggcgaacagcgtggcgcccagcgctgccatgtagagcagcgcgggccgggacggcgcttcttcgcagcgcagcaggcgtccgcacgccgcgccgccccgcagcagcgcgcttcccgccaacgccagcgccgagcccagtgaccagagcagcgcgaacttgcgcgcgcgcagcagcaacaccggtgcgtagagcgcggctaggccgaaacacagtgcagccagcagcaggcacccgccgcccgccgccagccgctgcccgcgcgtcacgctcgggaggcacgtcaggccggccgctgccgactccgcagggctccgcgcccacgtccagcgcaagcccgcgcggcccagccactcctccgccggccggtccccgggctcctccgccttctccgcggcgagcagcggctccgcggccgccgggccgccagctttcccctgcgccaggtactcctgcagctggcggtggaggtccgccatcttggacaaggcggtggcagaaaggaaaagctgcggctcacttccggccctccgctgaagcggttcggtcttcgggcggcaattggtcggcgacggcgaaaggggcagggcctgcggcgctcgcggaagtgccgcggtgcctgctctgcggacttttgtggtgtccccaagtaccgtggtcgcaggtgctgcctgtccgcttgcagtcgccctcccagcgcctgaccctcttccttgttcggagtaggcgcccttgcggtctggctaagtcctgccagcattaatagttggaaggcaggggtgggtgtggttctaaaggggcacaagaagtgacccttttgctgacggaaatgtcttatggcctcactgcgtctaccgtggcggtgatattgtgctagttttgcaacatggaggaatgggtaaagggtacacagaatctctcttgtttcttacaactgaacacaaacagtgatctcaaaataaaaatttaatttttaaaaaagttcagacctgtgtaactcaggtgggttttttggggaaagttgcgttctgattagttacctcacttgtagtaatagtgaccatcctgatcatttaccatggggttgataaaggaagggttgacacccagcaccctcaacctgcttctctattctgttctcagtttcggccacaggcctggcaacatccttgactccttcgcgccccttgtccaagactcgg

SEQ ID NO: 8338 - protein, 184 aa, Homo sapiens
MTKSQFSERVPSPAQKADIEELPTLLSPPLAAAAPGLDSQAVRAGPSPRASAQRRAVLSSAGAVSDGAGSAYFPSGEGARSSHGQHLGEAGAAAQATQCEAQRGAAAPGQQPNQRGQQRGHLRARAQHREQRAAKAQRGEQRGAQRCHVEQRGPGRRFFAAQQASARRAAPQQRASRQRQRRAQ

SEQ ID NO: 8339 - DNA, 2817 bp, Homo sapiens
tgaacttttttaaaaattaaatttttattttgagatcactgtttgtgttcagttgtaagaaacaagagagattctgtgtaccctttacccattcctccatgttgcaaaactagcacaatatcaccgccacggtagacgcagtgaggccataagacatttccgtcagcaaaagggtcacttcttgtgcccctttagaaccacacccacccctgccttccaactattaatgctggcaggacttagccagaccgcaagggcgcctactccgaacaaggaagagggtcaggcgctgggagggcgactgcaagcggacaggcagcacctgcgaccacggtacttggggacaccacaaaagtccgcagagcaggcaccgcggcacttccgcgagcgccgcaggccctgcccctttcgccgtcgccgaccaattgccgcccgaagaccgaaccgcttcagcggagggccggaagtgagccgcagcttttcctttctgccaccgccttgtccaagatggcggacctccaccgccagctgcaggagtacctggcgcaggggaaagctggcggcccggcggccgcggagccgctgctcgccgcggagaaggcggaggagcccggggaccggccggcggaggagtggctgggccgcgcgggcttgcgctggacgtgggcgcggagccctgcggagtcggcagcggccggcctgacgtgcctcccgagcgtgacgcgcgggcagcggctggcggcgggcggcgggtgcctgctgctggctgcactgtgtttcggcctagccgcgctctacgcaccggtgttgctgctgcgcgcgcgcaagttcgcgctgctctggtcactgggctcggcgctggcgttggcgggaagcgcgctgctgcggggcggcgcggcgtgcggacgcctgctgcgctgcgaagaagcgccgtcccggcccgcgctgctctacatggcagcgctgggcgccacgctgttcgccgcgctgggccttcgcagcacgctgctcacggtgctgggcgcgggcgcgcaggtggccgcgctgctggccgcgctggttgggctgctgccctggggcggcggcaccgcgctgcgcctcgcactgggtcgcctgggccgcggcgccggcctcgccaaggtgctgcccgtgtgaggacctcgcgccctcgccgctggggaagtacgcggagccagcgccgtcggagaccgcgccggccgagctgaggactgcacgccgctgtgcggaagcccgtggcgaaggccctgccctaacagcctgcgagtctaatccgggagcggctgctgccagcggaggcgacagcagcgttgggagctcctcgatgtcagctttttgtgctggacttggcacacgctctgaaaactgagattttgtcattgaactggtgacaggatgtgagacggttattagaagttgctttcgaagtaactgtggtcttaggttcggctgagtaaagaaaaaggatttttcttcgagttagctgctcttgtgatttttctcaggctgttttgtcattttaaaatccagtggtagatgtagcttagcgacggtagttttttgttttggctatactaagacttggaaattattctctccagtgtcagcgaatccagaagggtatcagattaaacaccgaattcagccactggacttttaaaagtacttaagatggtttatctcgggttttttcttcagttaacaaaatcataaatatggtgccttataacatgaaaggaaaattagttgtgtatttcacgacgaaagcgacggaccaaaagaaatttcctgccccaagaagcatgggatccaggaaggggcgcgtagatgcttaacggtctcttcggaaatcctgcaaatagaaagataattctagatccggaatacctgtatctggtggaaaccatggatttctacaagctcgaattattcctcattgtatagcctgctttgtaaactagtttacaatttgcaggctgatcttaagatttttttatatctaattgctgctgccttcattttaggttcagcagttacttttaactaccttaatttattgccagaaggtatgagcctaacattctgatgagtccagaaaactacgttttgtcagtagcaatacactaggaagtaaaatatatttagaatttaaacattgtgtgccagtggtcctcgcgcttgactgcacatcagttacttgaagagccacacctcagatcaatgcagtcagaacctgggaagtaggtcccagacatcaggacctttttaaagctccccaagtgattctacgttccccaagtttgaggaccacttttctgtgcattggcttgcacaatttgaaagtaatgcttttcctgagctggatcccagtgttgccttaacagggtgtctgtcgtgccgcagtagagcactgctgcttcctccaaccccaaaatttatgttcctaagtaagtcaggtccctaagccccgtcccaagaagtgacacaagtggccaacatccacactgtaggcttgcaggctacccgccctgagatttggtaaagaacactgccttgttccccatcagtaaacaaggttacctacctcaggaggctgcttgtgagagagcaaatgcagtatcttcagaatgatttatttttttaattaattgtaaagacttgtgccattggctgctctttctagtcccctaaatttctgttctagttttaaatttctctagaacttgcaatagttgggggttttataatgatgttttacaatgtttatttcttaaataaaaacttaaaaattcaacattt

SEQ ID NO: 8340 - protein, 215 aa, Homo sapiens; identical to SEQ ID NO: 610

SEQ ID NO: 8341 - DNA, 2854 bp, Homo sapiens
tgaacttttttaaaaattaaatttttattttgagatcactgtttgtgttcagttgtaagaaacaagagagattctgtgtaccctttacccattcctccatgttgcaaaactagcacaatatcaccgccacggtagacgcagtgaggccataagacatttccgtcagcaaaagggtcacttcttgtgcccctttagaaccacacccacccctgccttccaactattaatgctggcaggacttagccagaccgcaagggcgcctactccgaacaaggaagagggtcaggcgctgggagggcgactgcaagcggacaggcagcacctgcgaccacggtacttggggacaccacaaaagtccgcagagcaggcaccgcggcacttccgcgagcgccgcaggccctgcccctttcgccgtcgccgaccaattgccgcccgaagaccgaaccgcttcagcggagggccggaagtgagccgcagcttttcctttctgccaccgccttgtccaagatggcggacctccaccgccagctgcaggagtacctggcgcaggggaaagctggcggcccggcggccgcggagccgctgctcgccgcggagaaggcggaggagcccggggaccggccggcggaggagtggctgggccgcgcgggcttgcgctggacgtgggcgcggagccctgcggagtcggcagcggccggcctgacgtgcctcccgagcgtgacgcgcgggcagcggctggcggcgggcggcgggtgcctgctgctggctgcactgtgtttcggcctagccgcgctctacgcaccggtgttgctgctgcgcgcgcgcaagttcgcgctgctctggtcactgggctcggcgctggcgttggcgggaagcgcgctgctgcggggcggcgcggcgtgcggacgcctgctgcgctgcgaagaagcgccgtcccggcccgcgctgctctacatggcagcgctgggcgccacgctgttcgccgcgctgggccttcgcagcacgctgctcacggtgctgggcgcgggcgcgcaggtggccgcgctgctggccgcgctggttgggctgctgccctggggcggcggcaccgcgctgcgcctcgcactgggtcgcctgggccgcggcgccggcctcgccaaggtgctgcccgtgtgaggacctcgcgccctcgccgctggggaagtacgcggagccagcgccgtcggagaccgcgccggccgagctgaggactgcacgccgctgtgcggaagcccgtggcgaaggccctgccctaacagcctgcgagtctaatccgggagcggctgctgccagcggaggcgacagcagcgttgggagctcctcgatgtcagctttttgtgctggacttggcacacgctctgaaaactgagattttgtcattgaactggtgacaggatgtgagacggttattagaagttgctttcgaagtaactgtggtcttaggttcggctgagtaaagaaaaaggatttttcttcgagttagctgctcttgtgatttttctcaggctgttttgtcattttaaaatccagtggtagatgtagcttagcgacggtagttttttgttttggctatactaagacttggaaattattctctccagtgtcagcgaatccagaagggtatcagattaaacaccgaattcagccactggacttttaaaagtacttaagatggtttatctcgggttttttcttcagttaacaaaatcataaatatggtgccttataacatgaaaggaaaattagttgtgtatttcacgacgaaagcgacggaccaaaagaaatttcctgccccaagaagcatgggatccaggaaggggcgcgtagatgcttaacggtctcttcggaaatcctgcaaatagaaagataattctagatccggaatacctgtatctggtggaaaccatggatttctacaagctcgaattattcctcattgtatagcctgctttgtaaactagtttacaatttgcaggctgatcttaagatttttttatatctaattgctgctgccttcattttaggttcagcagttacttttaactaccttaatttattgccagaaggtatgagcctaacattctgatgagtccagaaaactacgttttgtcagtagcaatacactaggaagtaaaatatatttagaatttaaacattgtgtgccagtggtcctcgcgcttgactgcacatcagttacttgaagagccacacctcagatcaatgcagtcagaacctgggaagtaggtcccagacatcaggacctttttaaagctccccaagtgattctacgttccccaagtttgaggaccacttttctgtgcattggcttgcacaatttgaaagtaatgcttttcctgagctggatcccagtgttgccttaacagggtgtctgtcgtgccgcagtagagcactgctgcttcctccaaccccaaaatttatgttcctaagtaagtcaggtccctaagccccgtcccaagaagtgacacaagtggccaacatccacactgtaggcttgcaggctacccgccctgagatttggtaaagaacactgccttgttccccatcagtaaacaaggttacctacctcaggaggctgcttgtgagagagcaaatgcagtatcttcagaatgatttatttttttaattaattgtaaagacttgtgccattggctgctctttctagtcccctaaatttctgttctagttttaaatttctctagaacttgcaatagttgggggttttataatgatgttttacaatgtttatttcttaaataaaaacttaaaaattcaacatttctcagctggtggctcacacctgtaatcccagcatttt

SEQ ID NO: 8342 - protein, 215 aa, Homo sapiens; identical to SEQ ID NO: 610

SEQ ID NO: 8343 - DNA, 2711 bp, Homo sapiens
ttgaatttttaagtttttatttaagaaataaacattgtaaaacatcattataaaacccccaactattgcaagttctagagaaatttaaaactagaacagaaatttaggggactagaaagagcagccaatggcacaagtctttacaattaattaaaaaaataaatcattctgaagatactgcatttgctctctcacaagcagcctcctgaggtaggtaaccttgtttactgatggggaacaaggcagtgttctttaccaaatctcagggcgggtagcctgcaagcctacagtgtggatgttggccacttgtgtcacttcttgggacggggcttagggacctgacttacttaggaacataaattttggggttggaggaagcagcagtgctctactgcggcacgacagacaccctgttaaggcaacactgggatccagctcaggaaaagcattactttcaaattgtgcaagccaatgcacagaaaagtgtggctcttcaagtaactgatgtgcagtcaagcgcgaggaccactggcacacaatgtttaaattctaaatatattttacttcctagtgtattgctactgacaaaacgtagttttctggactcatcagaatgttaggctcataccttctggcaataaattaaggtagttaaaagtaactgctgaacctaaaatgaaggcagcagcaattagatataaaaaaatcttaagatcagcctgcaaattgtaaactagtttacaaagcaggctatacaatgaggaataattcgagcttgtagaaatccatggtttccaccagatacaggtattccggatctagaattatctttctatttgcaggatttccgaagagaccgttaagcatctacgcgccccttcctggatcccatgcttcttggggcaggaaatttcttttggtccgtcgctttcgtcgtgaaatacacaactaattttcctttcatgttataaggcaccatatttatgattttgttaactgaagaaaaaacccgagataaaccatcttaagtacttttaaaagtccagtggctgaattcggtgtttaatctgatacccttctggattcgctgacactggagagaataatttccaagtcttagtatagccaaaacaaaaaactaccgtcgctaagctacatctaccactggattttaaaatgacaaaacagcctgagaaaaatcacaagagcagctaactcgaagaaaaatcctttttctttactcagccgaacctaagaccacagttacttcgaaagcaacttctaataaccgtctcacatcctgtcaccagttcaatgacaaaatctcagttttcagagcgtgtgccaagtccagcacaaaaagctgacatcgaggagctcccaacgctgctgtcgcctccgctggcagcagccgctcccggattagactcgcaggctgttagggcagggccttcgccacgggcttccgcacagcggcgtgcagtcctcagctcggccggcgcggtctccgacggcgctggctccgcgtacttccccagcggcgagggcgcgaggtcctcacacgggcagcaccttggcgaggccggcgccgcggcccaggcgacccagtgcgaggcgcagcgcggtgccgccgccccagggcagcagcccaaccagcgcggccagcagcgcggccacctgcgcgcccgcgcccagcaccgtgagcagcgtgctgcgaaggcccagcgcggcgaacagcgtggcgcccagcgctgccatgtagagcagcgcgggccgggacggcgcttcttcgcagcgcagcaggcgtccgcacgccgcgccgccccgcagcagcgcgcttcccgccaacgccagcgccgagcccagtgaccagagcagcgcgaacttgcgcgcgcgcagcagcaacaccggtgcgtagagcgcggctaggccgaaacacagtgcagccagcagcaggcacccgccgcccgccgccagccgctgcccgcgcgtcacgctcgggaggcacgtcaggccggccgctgccgactccgcagggctccgcgcccacgtccagcgcaagcccgcgcggcccagccactcctccgccggccggtccccgggctcctccgccttctccgcggcgagcagcggctccgcggccgccgggccgccagctttcccctgcgccaggtactcctgcagctggcggtggaggtccgccatcttggacaaggcggtggcagaaaggaaaagctgcggctcacttccggccctccgctgaagcggttcggtcttcgggcggcaattggtcggcgacggcgaaaggggcagggcctgcggcgctcgcggaagtgccgcggtgcctgctctgcggacttttgtggtgtccccaagtaccgtggtcgcaggtgctgcctgtccgcttgcagtcgccctcccagcgcctgaccctcttccttgttcggagtaggcgcccttgcggtctggctaagtcctgccagcattaatagttggaaggcaggggtgggtgtggttctaaaggggcacaagaagtgacccttttgctgacggaaatgtcttatggcctcactgcgtctaccgtggcggtgatattgtgctagttttgcaacatggaggaatgggtaaagggtacacagaatctctcttgtttcttacaactgaacacaaacagtgatctcaaaataaaaatttaatttttaaaaaagttc

SEQ ID NO: 8344 - protein, 184 aa, Homo sapiens; identical to SEQ ID NO: 8338

SEQ ID NO: 8345 - DNA, 4387 bp, Homo sapiens
attcagcctcctccctcatctggcacccctctcctcggaccccagccttttccaggacaaggtccaatgtctcagattcctcaaggttttcaacagccccatccatctcagcagatgccaatgaacatggctcaaatggggcctccaggtccacagggacagtttaggcctcctggaccccagggacaaatgggaccacaaggtcctccactgcatcagggaggtggggggccacaaggattcatgggaccacaggggccccagggcccgccccaggggttgccacggcctcaggacatgcatgggccccaaggaatgcagaggcatcctggacctcatggccctttgggacctcaagggccacctggaccacaaggtagttctggtcctcaaggtcatatgggtcctcagggtccacctggcccacagggtcacataggcccccaaggcccgcctggccctcagggtcacttgggcccacaggggcctccgggtactcaaggtatgcagggaccacctggtcccagaggaatgcaagggcctcctcatcctcatgggatccaaggcggaccagggtctcaagggatccaaggtcctgtgtctcagggacctctgatgggattgaatccaagaggaatgcaggggcctccaggcccccgggagaaccagggtcctgctccccaagggatgattatgggccacccgcctcaagagatgagaggacctcaccctccaggtggactactgggacacggccctcaggaaatgagaggtcctcaggagatccgaggcatgcaggggcctccaccccaaggatcaatgctgggacctccccaggaattgcgagggcctccaggctcacaaagtcagcaggggccgccccagggctctttaggacctccaccccagggtggcatgcaaggaccccccggacctcagggacagcagaacccagcaagagggccacatccatctcaagggccaataccattccagcaacagaaaacgcctctgctaggtgatgggccccgggcccccttcaaccaggaaggacagagcacaggccccccacccctgataccaggcctagggcagcagggagcacaaggtcgcattccccctctgaaccccggacaaggacctggccccaacaaaggtgactcccgcggccctccaaaccatcacatgggcccgatgtcagagaggcggcatgagcagagcggcgggcctgagcatgggcccgagagggggcctttccggggtggccaggactgcaggggtccccctgataggcgtggccctcacccagacttccccgatgacttcagcagaccagatgacttccaccctgacaagcgctttggccaccggttacgtgaatttgaggggcgaggaggacctttaccgcaagaagagaagtggaggcgagggggccctgggcctccgtttccccctgatcacagggaattcagcgagggggatggccggggtgcagcccgaggccctccgggggcatgggaaggccgcaggcccggagatgaacgtttcccccgggatcccgaggacccacgttttcgagggcgcagagaagaaagtttcagaagaggagccccgccgaggcatgagggccgtgctccccccagaggaagggatggttttcctggtcctgaagactttggtccagaggagaattttgatgcttctgaggaagcggcccgaggacgagatctcagaggtcgaggtcggggtaccccacgaggaggaaggaagggtttacttcccactcctgacgagttccctcgctttgaaggagggcggaagccagattcctgggatggaaacagagagcctgggccaggtcatgaacattttcgtgatactccccgccctgatcatccccctcacgacggtcattccccagccagcagagaacgctcctcttctctccaaggcatggacatggcatccctacctccccgaaagcgcccctggcatgatggcccaggcacttctgagcacagagagatggaggccccaggaggcccttctgaagaccgaggaggcaaaggccgagggggcccaggacctgctcagagagtgcccaaatctgggcgttccagctccttagacggagagcaccacgatggataccacagagatgaaccttttgggggccctccaggcagtggcaccccttctcgagggggccggagtggcagtaactggggtagagggagtaacatgaactctggcccgccgaggcgaggagcttcacggggtggtggaaggggtcggtagaagctggaactgagtaccctgaggcctctctggacagtatgtaagaacttcttgtggactcaccaagagaaacaaaaggaagcctgcaccattgtagccctgaactcttttctgggcacctgaatcccaggaaccctcaatgaggtcttcaagatgaagagactgctgccagctaccagcctggctggccctgtcctgtccaccctcattgccccaactcccatgttgttttgtgaagataaaagctgggatctttttcttttttttaagtctcacaagacatggggcatctccacaaatttaagttcctgtccatttggaaatttgtttctatgtgtacagtttgtcagagaaaaacaaagtttttgtatgaatacagaatgtgatttacgcaagaattgacagaaaactagttgtgaagtgcttgccttaaggaaacctttggtttccatcgcatcccatctgccaaggaatgcacggttgttgctgatgttcatgagcatattaaccactaggttatctaaattaatctcagctgtgaactttgtgtttttcaacacattctgtcacaccatttttgtgacagaaaaatacttgaaaattattctaatgtagtttgtagtaggttcaaatttttattcagacatgctctgacagatggaaaattgtactctgaagagaaaatgcaatcttctggatgtccaacgagggagcttccccttggaagcatctcctaagaatcacagtttaggtttgaatcgccttgttatgatgaggagaggaacttgatgttagtcagaaataaagtcacatgccctttagataacttgaaatcacacatggagttgataaggaatggaccaaaataggtcctcaaacaattttgcaacacttaattaagttttcctctcttcctcttccatactatgtggaaataccagtgttacggcagggcgtacttctaactcacagtaagccagatagatcttgtccatggcaaattccttgtttaaaataaacataccatttagcccagtttggattggaagccaaaaattcagtttgttatataccccatgatactttctatactgacctttattttggttttacatggaagcttttattaaaaggactgtcctatggccaccttaacatttcattacattggcagcttcagttttggcatcagtcaaatttatttggcaaatttagtggtgctggaagtttctttttttcttttccttttttgacagagtcttgctctgtcacccagccaggagtgcagtggtgcaatcacggctcacttcagctttgaccctgcctcagcctccctagtagctaggactacaggcatatgccaccatgcccagctaattttttgtgtgtgtgttttttgtagagatggagtttcaccactttgtctatgctggtttcaaactcctgggctcaagcggtccacctgctgtggcctcccaaagtgctgggattgcagatctgagccacagtacctggccgctggtgctggaagtttcaatggttgcttagaaaaggcatactgatatagtttaacaggatatgaaaatttaactggttctctatgaatgtaaaaaacagcaaaagctaattgatttctgtggagtgagaaaatgtcagccatatacactgcttttcagtgttagaatctagagactattttttttttaactttgaaattacagcttatttaatcagcgctccaccataaacatgctattaggaggctcaagattgctttaggttatgggtatttcttcactcacccccaactggtatagcttaaagagagagaaactgtaatcaaatttcatgaagctaaaaccggatccagagaccaaacccatatcaagattagactttttttccctgagattctagtggaaaaattttcattattttgggctttaactttagaaacatagtatctcagtaagcagataaccagatcacatttaaaaattttcattttaccttgaagctctactggacttgacagatcacattttgagagtgaattcatttaaacaataaacctctacattatacttat

SEQ ID NO: 8346 - protein, 743 aa, Homo sapiens
MSQIPQGFQQPHPSQQMPMNMAQMGPPGPQGQFRPPGPQGQMGPQGPPLHQGGGGPQGFMGPQGPQGPPQGLPRPQDMHGPQGMQRHPGPHGPLGPQGPPGPQGSSGPQGHMGPQGPPGPQGHIGPQGPPGPQGHLGPQGPPGTQGMQGPPGPRGMQGPPHPHGIQGGPGSQGIQGPVSQGPLMGLNPRGMQGPPGPRENQGPAPQGMIMGHPPQEMRGPHPPGGLLGHGPQEMRGPQEIRGMQGPPPQGSMLGPPQELRGPPGSQSQQGPPQGSLGPPPQGGMQGPPGPQGQQNPARGPHPSQGPIPFQQQKTPLLGDGPRAPFNQEGQSTGPPPLIPGLGQQGAQGRIPPLNPGQGPGPNKGDSRGPPNHHMGPMSERRHEQSGGPEHGPERGPFRGGQDCRGPPDRRGPHPDFPDDFSRPDDFHPDKRFGHRLREFEGRGGPLPQEEKWRRGGPGPPFPPDHREFSEGDGRGAARGPPGAWEGRRPGDERFPRDPEDPRFRGRREESFRRGAPPRHEGRAPPRGRDGFPGPEDFGPEENFDASEEAARGRDLRGRGRGTPRGGRKGLLPTPDEFPRFEGGRKPDSWDGNREPGPGHEHFRDTPRPDHPPHDGHSPASRERSSSLQGMDMASLPPRKRPWHDGPGTSEHREMEAPGGPSEDRGGKGRGGPGPAQRVPKSGRSSSLDGEHHDGYHRDEPFGGPPGSGTPSRGGRSGSNWGRGSNMNSGPPRRGASRGGGRGR

SEQ ID NO: 8347 - DNA, 3285 bp, Homo sapiens
attcagcctcctccctcatctggcacccctctcctcggaccccagccttttccaggacaaggtccaatgtctcagattcctcaaggttttcaacagccccatccatctcagcagatgccaatgaacatggctcaaatggggcctccaggtccacagggacagtttaggcctcctggaccccagggacaaatgggaccacaaggtcctccactgcatcagggaggtggggggccacaaggattcatgggaccacaggggccccagggcccgccccaggggttgccacggcctcaggacatgcatgggccccaaggaatgcagaggcatcctggacctcatggccctttgggacctcaagggccacctggaccacaaggtagttctggtcctcaaggtcatatgggtcctcagggtccacctggcccacagggtcacataggcccccaaggcccgcctggccctcagggtcacttgggcccacaggggcctccgggtactcaaggtatgcagggaccacctggtcccagaggaatgcaagggcctcctcatcctcatgggatccaaggcggaccagggtctcaagggatccaaggtcctgtgtctcagggacctctgatgggattgaatccaagaggaatgcaggggcctccaggcccccgggagaaccagggtcctgctccccaagggatgattatgggccacccgcctcaagagatgagaggacctcaccctccaggtggactactgggacacggccctcaggaaatgagaggtcctcaggagatccgaggcatgcaggggcctccaccccaaggatcaatgctgggacctccccaggaattgcgagggcctccaggctcacaaagtcagcaggggccgccccagggctctttaggacctccaccccagggtggcatgcaaggaccccccggacctcagggacagcagaacccagcaagagggccacatccatctcaagggccaataccattccagcaacagaaaacgcctctgctaggtgatgggccccgggcccccttcaaccaggaaggacagagcacaggccccccacccctgataccaggcctagggcagcagggagcacaaggtcgcatccccctgataggcgtggccctcacccagacttccccgatgacttcagcagaccagatgacttccaccctgacaagcgctttggccaccggttacgtgaatttgaggggcgaggaggacctttaccgcaagaagagaagtggaggcgagggggccctgggcctccgtttccccctgatcacagggaattcagcgagggggatggccggggtgcagcccgaggccctccgggggcatgggaaggccgcaggcccggagatgaacgtttcccccgggatcccgaggacccacgttttcgagggcgcagagaagaaagtttcagaagaggagccccgccgaggcatgagggccgtgctccccccagaggaagggatggttttcctggtcctgaagactttggtccagaggagaattttgatgcttctgaggaagcggcccgaggacgagatctcagaggtcgaggtcggggtaccccacgaggaggaaggaagggtttacttcccactcctgacgagttccctcgctttgaaggagggcggaagccagattcctgggatggaaacagagagcctgggccaggtcatgaacattttcgtgatactccccgccctgatcatccccctcacgacggtcattccccagccagcagagaacgctcctcttctctccaaggcatggacatggcatccctacctccccgaaagcgcccctggcatgatggcccaggcacttctgagcacagagagatggaggccccaggaggcccttctgaagaccgaggaggcaaaggccgagggggcccaggacctgctcagagagtgcccaaatctgggcgttccagctccttagacggagagcaccacgatggataccacagagatgaaccttttgggggccctccaggcagtggcaccccttctcgagggggccggagtggcagtaactggggtagagggagtaacatgaactctggcccgccgaggcgaggagcttcacggggtggtggaaggggtcggtagaagctggaactgagtaccctgaggcctctctggacagtatgtaagaacttcttgtggactcaccaagagaaacaaaaggaagcctgcaccattgtagccctgaactcttttctgggcacctgaatcccaggaaccctcaatgaggtcttcaagatgaagagactgctgccagctaccagcctggctggccctgtcctgtccaccctcattgccccaactcccatgttgttttgtgaagataaaagctgggatctttttcttttttttaagtctcacaagacatggggcatctccacaaatttaagttcctgtccatttggaaatttgtttctatgtgtacagtttgtcagagaaaaacaaagtttttgtatgaatacagaatgtgatttacgcaagaattgacagaaaactagttgtgaagtgcttgccttaaggaaacctttggtttccatcgcatcccatctgccaaggaatgcacggttgttgctgatgttcatgagcatattaaccactaggttatctaaattaatctcagctgtgaactttgtgtttttcaacacattctgtcacaccatttttgtgacagaaaaatacttgaaaattattctaatgtagtttgtagtaggttcaaatttttattcagacatgctctgacagatggaaaattgtactctgaagagaaaatgcaatcttctggatgtccaacgagggagcttccccttggaagcatctcctaagaatcacagtttaggtttgaatcgccttgttatgatgaggagaggaacttgatgttagtcagaaataaagtcacatgccctttagataacttgaaatcacacatggagttgataaggaatggaccaaaataggtcctcaaacaattttgcaacacttaattaagttttcctctcttcctcttccatactatgtggaaataccagtgttacggcagggcgtacttctaactcacagtaagccagatagatcttgtccatggcaaattccttgtttaaaataaacataccatttagcccagtttggattggaagccaaaaattcagtttgttatataccccatgatactttctatactgacctttattttggttttacatggaagcttttattaaaaggactgtcctatggccacctt

SEQ ID NO: 8348 - protein, 631 aa, Homo sapiens
MSQIPQGFQQPHPSQQMPMNMAQMGPPGPQGQFRPPGPQGQMGPQGPPLHQGGGGPQGFMGPQGPQGPPQGLPRPQDMHGPQGMQRHPGPHGPLGPQGPPGPQGSSGPQGHMGPQGPPGPQGHIGPQGPPGPQGHLGPQGPPGTQGMQGPPGPRGMQGPPHPHGIQGGPGSQGIQGPVSQGPLMGLNPRGMQGPPGPRENQGPAPQGMIMGHPPQEMRGPHPPGGLLGHGPQEMRGPQEIRGMQGPPPQGSMLGPPQELRGPPGSQSQQGPPQGSLGPPPQGGMQGPPGPQGQQNPARGPHPSQGPIPFQQQKTPLLGDGPRAPFNQEGQSTGPPPLIPGLGQQGAQGRIPLIGVALTQTSPMTSADQMTSTLTSALATGYVNLRGEEDLYRKKRSGGEGALGLRFPLITGNSARGMAGVQPEALRGHGKAAGPEMNVSPGIPRTHVFEGAEKKVSEEEPRRGMRAVLPPEEGMVFLVLKTLVQRRILMLLRKRPEDEISEVEVGVPHEEEGRVYFPLLTSSLALKEGGSQIPGMETESLGQVMNIFVILPALIIPLTTVIPQPAENAPLLSKAWTWHPYLPESAPGMMAQALLSTERWRPQEALLKTEEAKAEGAQDLLRECPNLGVPAP

SEQ ID NO: 8349 - DNA, 655 bp, Homo sapiens
aggcatggacatggcatccctacctccccgaaagcgcccctggcatgatgtgcccaaatctgggcgttccagctccttagacggagagcaccacgatggataccacagagatgaaccttttgggggccctccaggcagtggcaccccttctcgagggggccggagtggcagtaactggggtagagggagtaacatgaactctggcccgccgaggcgaggagcttcacggggtggtggaaggggtcggtagaagctggaactgagtaccctgaggcctctctggacagtatgtaagaacttcttgtggactcaccaagagaaacaaaaggaagcctgcaccattgtagccctgaactcttttctgggcacctgaatcccaggaaccctcaatgaggtcttcaagatgaagagactgctgccagctaccagcctggctggccctgtcctgtccaccctcattgccccaactcccatgttgttttgtgaagataaaagctgggatctttttcttttttttaagtctcacaagacatggggcatctccacaaatttaagttcctgtccatttggaaatttgtttctatgtgtacagtttgtcagagaaaaacaaagtttttgtatgaatacagaatgtgatttacgcaagaattgacag

SEQ ID NO: 8350 - protein, 81 aa, Homo sapiens
MDMASLPPRKRPWHDVPKSGRSSSLDGEHHDGYHRDEPFGGPPGSGTPSRGGRSGSNWGRGSNMNSGPPRRGASRGGGRGR

SEQ ID NO: 8351 - DNA, 2537 bp, Homo sapiens
attcagcctcctccctcatctggcacccctctcctcggaccccagccttttccaggacaaggtccaatgtctcagattcctcaaggttttcaacagccccatccatctcagcagatgccaatgaacatggctcaaatggggcctccaggtccacagggacagtttaggcctcctggaccccagggacaaatgggaccacaaggtcctccactgcatcagggaggtggggggccacaaggattcatgggaccacaggggccccagggcccgccccaggggttgccacggcctcaggacatgcatgggccccaaggaatgcagaggcatcctggacctcatggccctttgggacctcaagggccacctggaccacaaggtagttctggtcctcaaggtcatatgggtcctcagggtccacctggcccacagggtcacataggcccccaaggcccgcctggccctcagggtcacttgggcccacaggggcctccgggtactcaaggtatgcagggaccacctggtcccagaggaatgcaagggcctcctcatcctcatgggatccaaggcggaccagggtctcaagggatccaaggtcctgtgtctcagggacctctgatgggattgaatccaagaggaatgcaggggcctccaggcccccgggagaaccagggtcctgctccccaagggatgattatgggccacccgcctcaagagatgagaggacctcaccctccaggtggactactgggacacggccctcaggaaatgagaggtcctcaggagatccgaggcatgcaggggcctccaccccaaggatcaatgctgggacctccccaggaattgcgagggcctccaggctcacaaagtcagcaggggccgccccagggctctttaggacctccaccccagggtggcatgcaaggaccccccggacctcagggacagcagaacccagcaagagggccacatccatctcaagggccaataccattccagcaacagaaaacgcctctgctaggtgatgggccccgggcccccttcaaccaggaaggacagagcacaggccccccacccctgataccaggcctagggcagcagggagcacaaggtcgcatccccctgataggcgtggccctcacccagacttccccgatgacttcagcagaccagatgacttccaccctgacaagcgctttggccaccggttacgtgaatttgaggggcgaggaggacctttaccgcaagaagagaagtggaggcgagggggccctgggcctccgtttccccctgatcacagggaattcagcgagggggatggccggggtgcagcccgaggccctccgggggcatgggaaggccgcaggcccggagatgaacgtttcccccgggatcccgaggacccacgttttcgagggcgcagagaagaaagtttcagaagaggagccccgccgaggcatgagggccgtgctccccccagaggaagggatggttttcctggtcctgaagactttggtccagaggagaattttgatgcttctgaggaagcggcccgaggacgagatctcagaggtcgaggtcggggtaccccacgaggaggaaggaagggtttacttcccactcctgacgagttccctcgctttgaaggagggcggaagccagattcctgggatggaaacagagagcctgggccaggtcatgaacattttcgtgatactccccgccctgatcatccccctcacgacggtcattccccagccagcagagaacgctcctcttctctccaaggcatggacatggcatccctacctccccgaaagcgcccctggcatgatggcccaggcacttctgagcacagagagatggaggccccaggaggcccttctgaagaccgaggaggcaaaggccgagggggcccaggacctgctcagagagtgcccaaatctgggcgttccagctccttagacggagagcaccacgatggataccacagagatgaaccttttgggggccctccaggcagtggcaccccttctcgagggggccggagtggcagtaactggggtagagggagtaacatgaactctggcccgccgaggcgaggagcttcacggggtggtggaaggggtcggtagaagctggaactgagtaccctgaggcctctctggacagtatgtaagaacttcttgtggactcaccaagagaaacaaaaggaagcctgcaccattgtagccctgaactcttttctgggcacctgaatcccaggaaccctcaatgaggtcttcaagatgaagagactgctgccagctaccagcctggctggccctgtcctgtccaccctcattgccccaactcccatgttgttttgtgaagataaaagctgggatctttttcttttttttaagtctcacaagacatggggcatctccacaaatttaagttcctgtccatttggaaatttgtttctatgtgtacagtttgtcagagaaaaacaaagtttttgtatgaatacagaatgtgatttacgcaagaattgacag

SEQ ID NO: 8352 - protein, 631 aa, Homo sapiens; identical to SEQ ID NO: 8348

SEQ ID NO: 8353 - DNA, 515 bp, Homo sapiens
ctagtatggtcatttgagcctgagcagagaatatgcccaagaggatgccaagccagactccagatcatcccttcgtgagccatctccatcccacccacttccttctctaccccaacatgccagaataacaaagaaccatcagaccctccactggcaaaaagtccttcatgaacaggatgccaggccacagctgtggcttctttcttatgacctcggaagacttgaagctcttcttttaggtttctgatatcaaaaagtttacagagatgatcacgtgatgctgtgagtagccaattgccattgaggtttaatttcacttccattactgtgtttttatgggcatgaagtgttgcaagactctgcccagtcttgggatcccagaacttgattggctgttgactatctttacttcctgaaacaactaaccctttggttggatgccagtctacacatttcacatcagcaccatgccctcggagaattctttcctcatggcaacgaagaaagtcccagat

SEQ ID NO: 8354 - protein, 31 aa, Homo sapiens
MPKRMPSQTPDHPFVSHLHPTHFLLYPNMPE

SEQ ID NO: 8355 - DNA, 502 bp, Homo sapiens
ctattccaagctggatttacagaactgaaaactgcaagcagtctctgatataggatatatgaacacttagaaaagctacaaaactatcatgtctgcacacattcacgtgctctcttcacaaaatacactactttttcacataaatcttacatacccaacatgccagaataacaaagaaccatcagaccctccactggcaaaaagtccttcatgaacaggatgccaggccacagctgtggcttctttcttatgacctcggaagacttgaagctcttcttttaggtttctgatatcaaaaagtttacagagatgatcacgtgatgctgtgagtagccaattgccattgaggtttaatttcacttccattactgtgtttttatgggcatgaagtgttgcaagactctgcccagtcttgggatcccagaacttgattggctgttgactatctttacttcctgaaacaactaaccctttggttggatgccagtctacacatttcaca

SEQ ID NO: 8356 - protein, 41 aa, Homo sapiens
MSAHIHVLSSQNTLLFHINLTYPTCQNNKEPSDPPLAKSPS

SEQ ID NO: 8357 - DNA, 429 bp, Homo sapiens
aatatatgtatagtacatttgccccaagattcctaccttactgctgacacattactcatccaagatggcaaaaagaaataacattttaccagagctatcacttgttcatccaacttccttatcactaaatggagttagggattaattcttgtgcttaaggttggtcagcaggataaaacctgttcttaccccccaaaaaactaaatgctgtcctgatgaaacagtctaggcaccggccgggcgcggtggctcacgcgcatagcccttttaaaggacttcaaaaagaccaattctaagttcatatctgttgaattttttacatctaaaaacactaaaaaatcatgacagctttgtttaaacaagtagtcatatttatagattgcttataaatataaaagcctatatatactactgtcataacagtggctg

SEQ ID NO: 8358 - protein, 41 aa, Homo sapiens
NSLGTGRARWLTRIALLKDFKKTNSKFISVEFFTSKNTKKS

SEQ ID NO: 8359 - DNA, 662 bp, Homo sapiens
gaggatgggtgctacgggtgttgggtgtcaaattattattcagagcttttcccttatgttcaagagtcagcagagatcgttgtcttggttgaatcgttaagtttctcacagtttttcagagctttagctgtagcatataatgttgatgttttgtagacaggaaagactcttgagatactttaatgtgtatttcagcccatatttcaagccagtatcttccatcacatttgcttcaacactcctgacttggcacattttgtttgggtttatccacagtactgtatgactgtagcttttgtaagaatagggaacctgtcacattgagggagtttactcactataaaggtcataatattgtataacttcagaacgagacagagactttgagatgatcatgtctgagttattttatggatgagctccatgatgccaagggtggaagtgacatgttcaaagcaaaataggttcagagccaggactagaatcttatcatttgactcccagcctaatgccacacttatgttgaatctttcctcactctgttgcccaggctggagtgcagtggtgtgatcttggctcactgcaacctccgcctctcgggttcaagtgagtctcctgcctcagcctcctgagtaactgggattacaggcatgtgtcaccat

SEQ ID NO: 8360 - protein, 51 aa, Homo sapiens
MSSMMPRVEVTCSKQNRFRARTRILSFDSQPNATLMLNLSSLCCPGWSAVV

SEQ ID NO: 8361 - DNA, 3133 bp, Homo sapiens
ggcccataggggaagatggcggctgctcctttggaggagcgggattgagaggatcggggtggggagaccaaacaagagagacatttctggctctgaaggcgaacgcttcgctggccatttaggagctctgctcaaagccagacgtatcctagaaggaaaacatcaccatggctacagaaattggttctcctcctcgttttttccatatgccaaggttccagcaccaggcacctcgacagctgttttataagcgacctgattttgcacaacagcaagcaatgcaacagcttacttttgatggaaaacgaatgagaaaagctgtgaaccgaaaaaccatagactacaatccatctgtaattaagtatttggagaacagaatatggcaaagagaccagagagatatgcgggcaattcagcctgatgcaggttattacaatgatctggtcccacctataggaatgttgaataatcctatgaatgcagtaacaacaaaatttgttcggacatcaacaaataaagtaaagtgtcctgtatttgttgttaggtggactccagaaggaagacgcttggtcactggagcttctagtggggagtttaccctgtggaatggactcactttcaattttgaaacaatattacaggctcacgacagcccagtgagggccatgacgtggtcacataatgacatgtggatgttgacagcagaccacggaggatatgtgaaatattggcagtcgaacatgaacaacgtcaagatgttccaggcacataaggaggcgattagagaggccaggtttatacacaatataccattttctgtagtccctattgtcatggttaaattattctctaagtgtattctgggtgcagagatgcatgggctctgtcagtttctgggaaactttctgcaccctataaacacaatatttttctttgttttcacacattcaccattttgctggcacctttctgaagtagtgttgtcccggtatcagcctttgcaatatgttagagatgtactgtctgccgcattttgcactggttttctcttttcatttatgattaataatgtgtatacgttattcctttttattatctactgtgtaagacaagaatatttcattccaaataaagaattcagtctttaattatgcaactgaataaaatctaaagcctacagaaaacaacttcagaattcacacaaagtggaaaaaggcttaagtgaagacctggttggcttggttatgccacgacttccaaaggaaagtataggactaaaaccctcacagataactggatgtggcaaacattaacggagtaatgaatgggttcttcaagctttgcagctgtaagcagatcattgtcaagaagactctaggacttttcttctgattcactgttgataacatcacttatgcaaatgtatacaataagtggagtttaaaatattttcagtgagttgtatatttttacacatcagtgaggtatgtatagtaaaactgggggaaaaagttccaaatacaagcctgaagaattgctgcagcctcagaataaagctaagcagcattctttaaggttgtgccacccatgtgtgggaggaggttgacatctttatggaaacatcatccactgtagtcatttgttcatactttcagaatcttaacagaaattgttggatgaacatgcttctgctttgtagattttgccttagtgtcatgcccatacattgagtttacacagctggtccttcataggattccaaagttcaagggagtttttagagttagttgagaaacttgatgatctttcactgctgggaaaaactgactccttcttgcagcagattctttggctttacacacaagtctgaatgtccttattttaaagttttcctcaaaggtgcaacattcatggaatagcttgccaggaagatgtgaaacttttctacagacctttgaaatggatgagaaacattgtatgtagggatgtttagcaatcagtcttttaatagacagcccacattgtttcagcttatttcatgaagtgtctgaggcagaagctgatgataattttgggagcagtattcgtgtgtgatttaaaagactgcaggaatactgcaaaaatagaatccatttattttcaccacttaaggcagcttcatgtgatttcctcgtatcatagaaaatagagaaggaacatggatagcattagcactaataatacacacttgaagttctcagaatactgatgattgaaaactcaaacaactgctctgttgaagtcttcttttgatgagatgcctatgttagctgacgacattcactttaagggcttcttcactggattcttccctctcctgtttataatgcagcacagtgtttttatttttccctgtctgagaagcacagattatctgttaaatgctgacttctttcccctgctgtgtgtcttcatgtaacagtttctcacccacggataataaatttgctacatgctctgatgacggcactgttagaatctgggactttcttcgttgccatgaggaaagaattctccgaggtacgtgtactaacagtactgattggaatatttaaatagggaagacatttgtggttaaatcatcacaaaaccacaatactggcttacacctccattcaattttttttacatatacacaccgtctcaggctcttcaaaaaaacccagcactttctctgactcacagtcattttgtaggtttttactaccagtgttatctttgaatttttcagctgtaaattaaatacaagagtgcctcccccttacttgcttatctgtatgcatcttttagggctgtattccttttccttccttgtagccagggtacttgttcccaacatattgacactgtggtttgatttagatagccgtcattctcctggcagtccttttacaatatgaattaaccgacaagatagaggtatcaaagctacacttcttagtgttactatttttgaaagcagttggtttttcagtacaccacatttgtactacatggccggcttgttactaagttcgggtggcattgctgcttgtttacttttgttgattttataattaataaacctctatgaaattacttcattccgtaactg

SEQ ID NO: 8362 - protein, 326 aa, Homo sapiens; identical to SEQ ID NO: 612

SEQ ID NO: 8363 - DNA, 1180 bp, Homo sapiens
ggcccataggggaagatggcggctgctcctttggaggagcgggattgagaggatcggggtggggagaccaaacaagagagacatttctggctctgaaggcgaacgcttcgctggccatttaggagctctgctcaaagccagacgtatcctagaaggaaaacatcaccatggctacagaaattggttctcctcctcgttttttccatatgccaaggttccagcaccaggcacctcgacagctgttttataagcgacctgattttgcacaacagcaagcaatgcaacagcttacttttgatggaaaacgaatgagaaaagctgtgaaccgaaaaaccatagactacaatccatctgtaattaagtatttggagaacagaatatggcaaagagaccagagagatatgcgggcaattcagcctgatgcaggttattacaatgatctggtcccacctataggaatgttgaataatcctatgaatgcagtaacaacaaaatttgttcggacatcaacaaataaagtaaagtgtcctgtatttgttgttaggtggactccagaaggaagacgcttggtcactggagcttctagtggggagtttaccctgtggaatggactcactttcaattttgaaacaatattacaggctcacgacagcccagtgagggccatgacgtggtcacataatgacatgtggatgttgacagcagaccacggaggatatgtgaaatattggcagtcgaacatgaacaacgtcaagatgttccaggcacataaggaggcgattagagaggccaggtttatacacaatataccattttctgtagtccctattgtcatggttaaattattctctaagtgtattctgggtgcagagatgcatgggctctgtcagtttctgggaaactttctgcaccctataaacacaatatttttctttgttttcacacattcaccattttgctggcacctttctgaagtagtgttgtcccggtatcagcctttgcaatatgttagagatgtactgtctgccgcattttgcactggttttctcttttcatttatgattaataatgtgtatacgttattcctttttattatctactgtgtaagacaagaatatttcattccaaataaagaattcagtctttaattatgcaactgaataaaatctaaagcctacag

SEQ ID NO: 8364 - protein, 326 aa, Homo sapiens; identical to SEQ ID NO: 612

SEQ ID NO: 8365 - DNA, 1177 bp, Homo sapiens
ctgggaggcagagggggtggcgagccaagattgcaccattgtactccagcctaggcaacaagagcgaaactgtctcaaaaaaaaaaaaaaaaaaaaagtgaaattgcttacccaaatctacagttaactttcgttttttaatgcttgatgaatttgcatgtcattcttgggcagtggccatgctgtcttctctgtattgttccaatttgggtatatgtgctgccaaagtgagtactgcagaattatttcttgagagaggcacttacatgtgctgattggcactaaagcagtggaatgggaagaagagacttggaaggcagcccagacgatccaggcgtgtgctagatggcaactgaggagcacggtgctaccatctttactggtgtttccacctatgtgccaggggttctgtgagctacctgagaatactgaagtatataatgctctggcacatagttaggcactaatcagtggtatttatcaaggtgattaaaagcagatttaaaaagcagctcacagttgggcgcggtggctcacacctgtaatcccagcactttgggaggccgaggcgggtggatcaccagaggtcagaagttcgagaccagcctggccaacgttgtgaaaccctgtctctactaaaaatacaaaaattggccactgcagtggcatgattaaggttcactgcagcctcaatctcccactctccagcgatcatcccacctcagcctcttggatagctgggaccacaggcacgagctaccatgcctggctaatttattttttgtagagacggggtttcgccatgttgcccaggctggtctggaatttctgacctctagcagtccacctgtttccgcctcccaaatgctgagattagaggcatgagtcactgcacccagcccgcagcctcttttataagggcattaatccccttcatgagggatattctctcatgacttaatcacctgccaaagaccccacctcttaatactacatcagtgatgggttcaatgtatcaattgggtgggagggggcacattcagaccatagcatctagtcattctggttttattaagatttattagacctgaggcatgaaaaatagcatactggatgggacttcagcatcgatgagttgccttagtaatactgttaataaaaagcactaaatatgcca

SEQ ID NO: 8366 - protein, 44 aa, Homo sapiens
MLDEFACHSWAVAMLSSLYCSNLGICAAKVSTAELFLERGTYMC

SEQ ID NO: 8367 - DNA, 3144 bp, Homo sapiens
aactagaccagaagatagtagactttatagagaaagaccagttttacctagatactaaaggaagaattaaaccgctgttagtttgaaatgctttttttttttttttttaaatggagatagggtcttaactcttgtccaggctggaggagtgcagtcgtacagtcatggctcactgaagtcttgaccccgctgcctcagcctcccaaataactggggccacaggtgtgcaccacaactctcagctaatttttaaaattttttatagaggtggggttttactatgctgtccagactggtcttaaactcctgggctcaagtgatccccctgccttggcctcccaaactggtgagattacaggcatgagccaccacaactggcctgaaattcttaaaggatgggagtgtcgatgacagcaccttggcatcgttgtgcctaacctgggagacggaagaagcacgccatgggaagtgtttacacttggggacaagtgctaagtattgtggagcccatagccccttgagatagatggctactttgcctttcttcttgaactgtcttgcagaatgtggatttggggtaagtggtcttgaaggattcatttagtcaccctcaaattaagatttttacttcatctttcttgggcctgcacctccaagataacaaagaagaagcaatggtcgtgccaaagaggtccacaaccaggtgtgcactgttcactgcagcccatttgctgtatgaactgtggttgttgtgtgcccaatgacaaggctactaagaaattcatcatttgaaacgtagaggccgcagcagtcagcgatgtttctgaaatgagcatccttgacgcctgtgtacttcccaggctggatgtgaagctacattaccatgtgagttgtgccattcacagcacagtggtgaggaattgagctcatgaagcaggcaaggaccgaacacctccaccccaacgtagacctgcaggtgctgccccatgacctccaccaaagcccatataaggagcggagttgttaaggactgaagaaaaacttctctggagaaaaataaaattgcaattctacttaaaaaaatttttttttttttttacttcataggccaggcttgaagttctgaacactttgaagtctccaattatgagagatccagtctaagcctctggcctgctaattagcaataagtgctttatttggaaggagggaaattgcttgaacctgggaggcagagggggtggcgagccaagattgcaccattgtactccagcctaggcaacaagagcgaaactgtctcaaaaaaaaaaaaaaaaaaaaagtgaaattgcttacccaaatctacagttaactttcgttttttaatgcttgatgaatttgcatgtcattcttgggcagtggccatgctgtcttctctgtattgttccaatttgggtatatgtgctgccaaagtgagtactgcagaattatttcttgagagaggcacttacatgtgctgattggcactaaagcagtggaatgggaagaagagacttggaaggcagcccagacgatccaggcgtgtgctagatggcaactgaggagcacggtgctaccatctttactggtgtttccacctatgtgccaggggttctgtgagctacctgagaatactgaagtatataatgctctggcacatagttaggcactaatcagtggtatttatcaaggtgattaaaagcagatttaaaaagcagctcacagttgggcgcggtggctcacacctgtaatcccagcactttgggaggccgaggcgggtggatcaccagaggtcagaagttcgagaccagcctggccaacgttgtgaaaccctgtctctactaaaaatacaaaaattggccacgtgtggtggcgggcacctgtaatcctagctacttgggaagctgagacaggagaattgcttgaacccgggaggtggaggttgcagtgagccaagatcatgccattgcactccagcctgggcaacaagagcgagactccatcttgaaaaaaaataaaataataaaaagcagctcatactagggaacttggtaaagcaacctcatgctgttgtaggttgaaagcctggtcagctattctgcaagacagtcaaaaattgtttacagggctggacagcatattgctattgaaaaatagctattaggagaccttgcacaatttgtgaaacattgttaggctcattgtactgtgtaaaatcaggaaagaatttgggaacatactgatacaacaaaaagataggttgtcaaaccctcacttcaccagaaagctaaattaaccagataagtctttctgaaagttttagtgtcttagtttgttcctgcgctgtaacagaataccttagactgggtaacctataaataataggaatttatttctcacagttttggaggctggcaaatgcaagatccaggtgctggtacgttcagtgtctggcaagggcggctttctggtccaagatggtgcctttttttctgcatcttccatagggaatgaacactccttatggtagaagggatggaaggaccaggctttttttttttttttttttggatacagcaggatcttgctctgtcgcccaggctggagtgcagtggcatgattaaggttcactgcagcctcaatctcccactctccagcgatcatcccacctcagcctcttggatagctgggaccacaggcacgagctaccatgcctggctaatttattttttgtagagacggggtttcgccatgttgcccaggctggtctggaatttctgacctctagcagtccacctgtttccgcctcccaaatgctgagattagaggcatgagtcactgcacccagcccgcagcctcttttataagggcattaatccccttcatgagggatattctctcatgacttaatcacctgccaaagaccccacctcttaatactacatcagtgatgggttcaatgtatcaattgggtgggagggggcacattcagaccatagcatctagtcattctggttttattaagatttattagacctgaggcatgaaaaatagcatactggatgggacttcagcatcgatgagttgccttagtaatactgttaataaaaagcactaaatatgcca

SEQ ID NO: 8368 - protein, 70 aa, Homo sapiens
MVEGMEGPGFFFFFFWIQQDLALSPRLECSGMIKVHCSLNLPLSSDHPTSASWIAGTTGTSYHAWLIYFL

SEQ ID NO: 8369 - DNA, 3339 bp, Homo sapiens
aactagaccagaagatagtagactttatagagaaagaccagttttacctagatactaaaggaagaattaaaccgctgttagtttgaaatgctttttttttttttttttaaatggagatagggtcttaactcttgtccaggctggaggagtgcagtcgtacagtcatggctcactgaagtcttgaccccgctgcctcagcctcccaaataactggggccacaggtgtgcaccacaactctcagctaatttttaaaattttttatagaggtggggttttactatgctgtccagactggtcttaaactcctgggctcaagtgatccccctgccttggcctcccaaactggtgagattacaggcatgagccaccacaactggcctgaaattcttaaaggatgggagtgtcgatgacagcaccttggcatcgttgtgcctaacctgggagacggaagaagcacgccatgggaagtgtttacacttggggacaagtgctaagtattgtggagcccatagccccttgagatagatggctactttgcctttcttcttgaactgtcttgcagaatgtggatttggggtaagtggtcttgaaggattcatttagtcaccctcaaattaagatttttacttcatctttcttgggcctgcacctccaagataacaaagaagaagcaatggtcgtgccaaagaggtccacaaccaggtgtgcactgttcactgcagcccatttgctgtatgaactgtggttgttgtgtgcccaatgacaaggctactaagaaattcatcatttgaaacgtagaggccgcagcagtcagcgatgtttctgaaatgagcatccttgacgcctgtgtacttcccaggctggatgtgaagctacattaccatgtgagttgtgccattcacagcacagtggtgaggaattgagctcatgaagcaggcaaggaccgaacacctccaccccaacgtagacctgcaggtgctgccccatgacctccaccaaagcccatataaggagcggagttgttaaggactgaagaaaaacttctctggagaaaaataaaattgcaattctacttaaaaaaatttttttttttttttacttcataggccaggcttgaagttctgaacactttgaagtctccaattatgagagatccagtctaagcctctggcctgctaattagcaataagtgctttatttggaaggagggagtcatccactcttgagccactgcagtgaagtcacttgatctcagtctgggggaaaacacttcaatagctaaacattctagctttgatttttctgaagggaatacacttgttttcaattttggggtttttctttggggcacttgcttgactctgtatgaacttgtgatccaaggaaaaaggagaaagaacagtgagaattgcttgaacctgggaggcagagggggtggcgagccaagattgcaccattgtactccagcctaggcaacaagagcgaaactgtctcaaaaaaaaaaaaaaaaaaaaagtgaaattgcttacccaaatctacagttaactttcgttttttaatgcttgatgaatttgcatgtcattcttgggcagtggccatgctgtcttctctgtattgttccaatttgggtatatgtgctgccaaagtgagtactgcagaattatttcttgagagaggcacttacatgtgctgattggcactaaagcagtggaatgggaagaagagacttggaaggcagcccagacgatccaggcgtgtgctagatggcaactgaggagcacggtgctaccatctttactggtgtttccacctatgtgccaggggttctgtgagctacctgagaatactgaagtatataatgctctggcacatagttaggcactaatcagtggtatttatcaaggtgattaaaagcagatttaaaaagcagctcacagttgggcgcggtggctcacacctgtaatcccagcactttgggaggccgaggcgggtggatcaccagaggtcagaagttcgagaccagcctggccaacgttgtgaaaccctgtctctactaaaaatacaaaaattggccacgtgtggtggcgggcacctgtaatcctagctacttgggaagctgagacaggagaattgcttgaacccgggaggtggaggttgcagtgagccaagatcatgccattgcactccagcctgggcaacaagagcgagactccatcttgaaaaaaaataaaataataaaaagcagctcatactagggaacttggtaaagcaacctcatgctgttgtaggttgaaagcctggtcagctattctgcaagacagtcaaaaattgtttacagggctggacagcatattgctattgaaaaatagctattaggagaccttgcacaatttgtgaaacattgttaggctcattgtactgtgtaaaatcaggaaagaatttgggaacatactgatacaacaaaaagataggttgtcaaaccctcacttcaccagaaagctaaattaaccagataagtctttctgaaagttttagtgtcttagtttgttcctgcgctgtaacagaataccttagactgggtaacctataaataataggaatttatttctcacagttttggaggctggcaaatgcaagatccaggtgctggtacgttcagtgtctggcaagggcggctttctggtccaagatggtgcctttttttctgcatcttccatagggaatgaacactccttatggtagaagggatggaaggaccaggctttttttttttttttttttggatacagcaggatcttgctctgtcgcccaggctggagtgcagtggcatgattaaggttcactgcagcctcaatctcccactctccagcgatcatcccacctcagcctcttggatagctgggaccacaggcacgagctaccatgcctggctaatttattttttgtagagacggggtttcgccatgttgcccaggctggtctggaatttctgacctctagcagtccacctgtttccgcctcccaaatgctgagattagaggcatgagtcactgcacccagcccgcagcctcttttataagggcattaatccccttcatgagggatattctctcatgacttaatcacctgccaaagaccccacctcttaatactacatcagtgatgggttcaatgtatcaattgggtgggagggggcacattcagaccatagcatctagtcattctggttttattaagatttattagacctgaggcatgaaaaatagcatactggatgggacttcagcatcgatgagttgccttagtaatactgttaataaaaagcactaaatatgcca

SEQ ID NO: 8370 - protein, 70 aa, Homo sapiens; identical to SEQ ID NO: 8368

SEQ ID NO: 8371 - DNA, 1109 bp, Homo sapiens
tggagggacggtttgaagatgaggagctgcagcagattcttgatgatatccagacaaagcgcagctttcagtattaatctccaaacatcactgctgctcggagaaaccacatccccaggcataacaccaccttcccactgtctggggctgacttgcacagaaattctgttgaagacagttgagaattcctttggagaaaacagcccagcttggcgtggggttaggttgctgtttcaaataactcacaggcccaggtgacatggaatcttggagcagccttgtgcagtggcagccagtggcttcctgaacgtgcctctgcgaagtgtgagatgaggggtcacataaccacactgttgactacctcattcctggtttttggcctccacatcatcttttttcttaatatttcatgttttaatttcagggtgtttatactttttgaaactagaccagaagatagtagactttatagagaaagaccagttttacctagatactaaaggaagaattaaaccgctgttagtttgaaatgctttttttttttttttttaaatggagatagggtcttaactcttgtccaggctggaggatgcagtggcatgattaaggttcactgcagcctcaatctcccactctccagcgatcatcccacctcagcctcttggatagctgggaccacaggcacgagctaccatgcctggctaatttattttttgtagagacggggtttcgccatgttgcccaggctggtctggaatttctgacctctagcagtccacctgtttccgcctcccaaatgctgagattagaggcatgagtcactgcacccagcccgcagcctcttttataagggcattaatccccttcatgagggatattctctcatgacttaatcacctgccaaagaccccacctcttaatactacatcagtgatgggttcaatgtatcaattgggtgggagggggcacattcagaccatagcatctagtcattctggttttattaagatttattagacctgaggcatgaaaaatagcatactggatgggacttcagcatcgatgagttgccttagtaatactgttaataaaaagcactaaatatgcca

SEQ ID NO: 8372 - protein, 79 aa, Homo sapiens
MRSCSRFLMISRQSAAFSINLQTSLLLGETTSPGITPPSHCLGLTCTEILLKTVENSFGENSPAWRGVRLLFQITHRPR

SEQ ID NO: 8373 - DNA, 5008 bp, Homo sapiens
aggcgtgagccactgcgccttggcaatttttgtatttttagtagagacggggtttcgccatggtgctcaggctggtctcgaactcctcacgtcaagtgattacccaccttggcctctcagagtgctggaattacaggtgtgagccactacacctggccgtctagctatttttaaatactagctacgtttgatcccttttttcctgttgattactctttgatttttgttgtttatttgtttttgattattttgattttttttttttccttttgattagcttgctactccagaaaaagcttcataagtttgagttggcctgtttggccaacctttgcccagagactgctgaggagtccaaggctctaatcccaagcttggagggacggtttgaagatgaggagctgcagcagattcttgatgatatccagacaaagcgcagctttcagtattaatctccaaacatcactgctgctcggagaaaccacatccccaggcataacaccaccttcccactgtctggggctgacttgcacagaaattctgttgaagacagttgagaattcctttggagaaaacagcccagcttggcgtggggttaggttgctgtttcaaataactcacaggcccaggtgacatggaatcttggagcagccttgtgcagtggcagccagtggcttcctgaacgtgcctctgcgaagtgtgagatgaggggtcacataaccacactgttgactacctcattcctggtttttggcctccacatcatcttttttcttaatatttcatgttttaatttcagggtgtttatactttttgaaactagaccagaagatagtagactttatagagaaagaccagttttacctagatactaaaggaagaattaaaccgctgttagtttgaaatgctttttttttttttttttaaatggagatagggtcttaactcttgtccaggctggaggagtgcagtcgtacagtcatggctcactgaagtcttgaccccgctgcctcagcctcccaaataactggggccacaggtgtgcaccacaactctcagctaatttttaaaattttttatagaggtggggttttactatgctgtccagactggtcttaaactcctgggctcaagtgatccccctgccttggcctcccaaactggtgagattacaggcatgagccaccacaactggcctgaaattcttaaaggatgggagtgtcgatgacagcaccttggcatcgttgtgcctaacctgggagacggaagaagcacgccatgggaagtgtttacacttggggacaagtgctaagtattgtggagcccatagccccttgagatagatggctactttgcctttcttcttgaactgtcttgcagaatgtggatttggggtaagtggtcttgaaggattcatttagtcaccctcaaattaagatttttacttcatctttcttgggcctgcacctccaagataacaaagaagaagcaatggtcgtgccaaagaggtccacaaccaggtgtgcactgttcactgcagcccatttgctgtatgaactgtggttgttgtgtgcccaatgacaaggctactaagaaattcatcatttgaaacgtagaggccgcagcagtcagcgatgtttctgaaatgagcatccttgacgcctgtgtacttcccaggctggatgtgaagctacattaccatgtgagttgtgccattcacagcacagtggtgaggaattgagctcatgaagcaggcaaggaccgaacacctccaccccaacgtagacctgcaggtgctgccccatgacctccaccaaagcccatataaggagcggagttgttaaggactgaagaaaaacttctctggagaaaaataaaattgcaattctacttaaaaaaatttttttttttttttacttcataggccaggcttgaagttctgaacactttgaagtctccaattatgagagatccagtctaagcctctggcctgctaattagcaataagtgctttatttggaaggagggagtcatccactcttgagccactgcagtgaagtcacttgatctcagtctgggggaaaacacttcaatagctaaacattctagctttgatttttctgaagggaatacacttgttttcaattttggggtttttctttggggcacttgcttgactctgtatgaacttgtgatccaaggaaaaaggagaaagaacagtgttggcttttaaaatcaggatggttttatgtttgctacgaaataaggcaagaataaaaaattcttatttttatttatttatttattttttgagatagagtctggctgtgttgcccaggatgcaatggcgcaatcttggctcactgcaacctctgccttctgggttcaagtgattctcctgcctcagcctcccaagtagctgggattacaggtacctgccaccacgcctggctaattttttgtgtttttagtagagacagggtttcaccacgttcgccaggctagtcttgaactgacctcaagtgatcctcccacctcggcttcccaaagtgctgggattacaggcgtgagccaccggccaatctttttatccttgagcaacttcgcttctttgagcctcattggtgttctcaattgtgaaatatggataatagtatctgccccatgggtattttgagaaggttgaatgaacaggaaattattacaaagagcctagaggtgtctgatatatagtatgttccagtaaatgttcactattcttagcatctcaggcagatgagctagtatagatagatgattaagtcagcttgcttcatagaaattagtgcaagaatttgttagcctaccaactgatagtatcagacttggaaaataaatgaaattgggccaggcgtggtggctcacccttgtaatcccagcgctttcagaggccgaggcaggcggatcacctgaggttgggagtttgagaccatcctgaccaacatggagaaaccccgtctctacttaaaatacaaaattagcggggcgtggtggcgcatgcctgtaatctcagctactctggaggctgaggcaggagaattgcttgaacctgggaggcagagggggtggcgagccaagattgcaccattgtactccagcctaggcaacaagagcgaaactgtctcaaaaaaaaaaaaaaaaaaaaagtgaaattgcttacccaaatctacagttaactttcgttttttaatgcttgatgaatttgcatgtcattcttgggcagtggccatgctgtcttctctgtattgttccaatttgggtatatgtgctgccaaagtgagtactgcagaattatttcttgagagaggcacttacatgtgctgattggcactaaagcagtggaatgggaagaagagacttggaaggcagcccagacgatccaggcgtgtgctagatggcaactgaggagcacggtgctaccatctttactggtgtttccacctatgtgccaggggttctgtgagctacctgagaatactgaagtatataatgctctggcacatagttaggcactaatcagtggtatttatcaaggtgattaaaagcagatttaaaaagcagctcacagttgggcgcggtggctcacacctgtaatcccagcactttgggaggccgaggcgggtggatcaccagaggtcagaagttcgagaccagcctggccaacgttgtgaaaccctgtctctactaaaaatacaaaaattggccacgtgtggtggcgggcacctgtaatcctagctacttgggaagctgagacaggagaattgcttgaacccgggaggtggaggttgcagtgagccaagatcatgccattgcactccagcctgggcaacaagagcgagactccatcttgaaaaaaaataaaataataaaaagcagctcatactagggaacttggtaaagcaacctcatgctgttgtaggttgaaagcctggtcagctattctgcaagacagtcaaaaattgtttacagggctggacagcatattgctattgaaaaatagctattaggagaccttgcacaatttgtgaaacattgttaggctcattgtactgtgtaaaatcaggaaagaatttgggaacatactgatacaacaaaaagataggttgtcaaaccctcacttcaccagaaagctaaattaaccagataagtctttctgaaagttttagtgtcttagtttgttcctgcgctgtaacagaataccttagactgggtaacctataaataataggaatttatttctcacagttttggaggctggcaaatgcaagatccaggtgctggtacgttcagtgtctggcaagggcggctttctggtccaagatggtgcctttttttctgcatcttccatagggaatgaacactccttatggtagaagggatggaaggaccaggctttttttttttttttttttggatacagcaggatcttgctctgtcgcccaggctggagtgcagtggcatgattaaggttcactgcagcctcaatctcccactctccagcgatcatcccacctcagcctcttggatagctgggaccacaggcacgagctaccatgcctggctaatttattttttgtagagacggggtttcgccatgttgcccaggctggtctggaatttctgacctctagcagtccacctgtttccgcctcccaaatgctgagattagaggcatgagtcactgcacccagcccgcagcctcttttataagggcattaatccccttcatgagggatattctctcatgacttaatcacctgccaaagaccccacctcttaatactacatcagtgatgggttcaatgtatcaattgggtgggagggggcacattcagaccatagcatctagtcattctggttttattaagatttattagacctgaggcatgaaaaatagcatactggatgggacttcagcatcgatgagttgccttagtaatactgttaataaaaagcactaaatatgcca

SEQ ID NO: 8374 - protein, 79 aa, Homo sapiens; identical to SEQ ID NO: 8372

SEQ ID NO: 8375 - DNA, 5137 bp, Homo sapiens
cgcgtggtcgccgcaggcctggcgttatgcgcgcttcgcccaaggccctgcctcagcggcggcttgggcaagccccagcgcggcgtggggctggggagggaacatggccttgggagggaccatggccttgggagggaccgcctgggcaactgggttattttatgtgataaactgcgaagttccggggacctgtgtcaaagataaacaaagccggacactcaggtgagtttgaaacagctgagacacttctaaattcagaagttcatatgcttctggaacatcgaaagcagcagaatgagagtgcagaggacgaacaggagctctcagaagtcttcatgaaaacattaaactacacagcccgtttcagtcgtttcaaaaacagagagaccattgccagtgttcgtagcttgctactccagaaaaagcttcataagtttgagttggcctgtttggccaacctttgcccagagactgctgaggagtccaaggctctaatcccaagcttggagggacggtttgaagatgaggagctgcagcagattcttgatgatatccagacaaagcgcagctttcagtattaatctccaaacatcactgctgctcggagaaaccacatccccaggcataacaccaccttcccactgtctggggctgacttgcacagaaattctgttgaagacagttgagaattcctttggagaaaacagcccagcttggcgtggggttaggttgctgtttcaaataactcacaggcccaggtgacatggaatcttggagcagccttgtgcagtggcagccagtggcttcctgaacgtgcctctgcgaagtgtgagatgaggggtcacataaccacactgttgactacctcattcctggtttttggcctccacatcatcttttttcttaatatttcatgttttaatttcagggtgtttatactttttgaaactagaccagaagatagtagactttatagagaaagaccagttttacctagatactaaaggaagaattaaaccgctgttagtttgaaatgctttttttttttttttttaaatggagatagggtcttaactcttgtccaggctggaggagtgcagtcgtacagtcatggctcactgaagtcttgaccccgctgcctcagcctcccaaataactggggccacaggtgtgcaccacaactctcagctaatttttaaaattttttatagaggtggggttttactatgctgtccagactggtcttaaactcctgggctcaagtgatccccctgccttggcctcccaaactggtgagattacaggcatgagccaccacaactggcctgaaattcttaaaggatgggagtgtcgatgacagcaccttggcatcgttgtgcctaacctgggagacggaagaagcacgccatgggaagtgtttacacttggggacaagtgctaagtattgtggagcccatagccccttgagatagatggctactttgcctttcttcttgaactgtcttgcagaatgtggatttggggtaagtggtcttgaaggattcatttagtcaccctcaaattaagatttttacttcatctttcttgggcctgcacctccaagataacaaagaagaagcaatggtcgtgccaaagaggtccacaaccaggtgtgcactgttcactgcagcccatttgctgtatgaactgtggttgttgtgtgcccaatgacaaggctactaagaaattcatcatttgaaacgtagaggccgcagcagtcagcgatgtttctgaaatgagcatccttgacgcctgtgtacttcccaggctggatgtgaagctacattaccatgtgagttgtgccattcacagcacagtggtgaggaattgagctcatgaagcaggcaaggaccgaacacctccaccccaacgtagacctgcaggtgctgccccatgacctccaccaaagcccatataaggagcggagttgttaaggactgaagaaaaacttctctggagaaaaataaaattgcaattctacttaaaaaaatttttttttttttttacttcataggccaggcttgaagttctgaacactttgaagtctccaattatgagagatccagtctaagcctctggcctgctaattagcaataagtgctttatttggaaggagggagtcatccactcttgagccactgcagtgaagtcacttgatctcagtctgggggaaaacacttcaatagctaaacattctagctttgatttttctgaagggaatacacttgttttcaattttggggtttttctttggggcacttgcttgactctgtatgaacttgtgatccaaggaaaaaggagaaagaacagtgttggcttttaaaatcaggatggttttatgtttgctacgaaataaggcaagaataaaaaattcttatttttatttatttatttattttttgagatagagtctggctgtgttgcccaggatgcaatggcgcaatcttggctcactgcaacctctgccttctgggttcaagtgattctcctgcctcagcctcccaagtagctgggattacaggtacctgccaccacgcctggctaattttttgtgtttttagtagagacagggtttcaccacgttcgccaggctagtcttgaactgacctcaagtgatcctcccacctcggcttcccaaagtgctgggattacaggcgtgagccaccggccaatctttttatccttgagcaacttcgcttctttgagcctcattggtgttctcaattgtgaaatatggataatagtatctgccccatgggtattttgagaaggttgaatgaacaggaaattattacaaagagcctagaggtgtctgatatatagtatgttccagtaaatgttcactattcttagcatctcaggcagatgagctagtatagatagatgattaagtcagcttgcttcatagaaattagtgcaagaatttgttagcctaccaactgatagtatcagacttggaaaataaatgaaattgggccaggcgtggtggctcacccttgtaatcccagcgctttcagaggccgaggcaggcggatcacctgaggttgggagtttgagaccatcctgaccaacatggagaaaccccgtctctacttaaaatacaaaattagcggggcgtggtggcgcatgcctgtaatctcagctactctggaggctgaggcaggagaattgcttgaacctgggaggcagagggggtggcgagccaagattgcaccattgtactccagcctaggcaacaagagcgaaactgtctcaaaaaaaaaaaaaaaaaaaaagtgaaattgcttacccaaatctacagttaactttcgttttttaatgcttgatgaatttgcatgtcattcttgggcagtggccatgctgtcttctctgtattgttccaatttgggtatatgtgctgccaaagtgagtactgcagaattatttcttgagagaggcacttacatgtgctgattggcactaaagcagtggaatgggaagaagagacttggaaggcagcccagacgatccaggcgtgtgctagatggcaactgaggagcacggtgctaccatctttactggtgtttccacctatgtgccaggggttctgtgagctacctgagaatactgaagtatataatgctctggcacatagttaggcactaatcagtggtatttatcaaggtgattaaaagcagatttaaaaagcagctcacagttgggcgcggtggctcacacctgtaatcccagcactttgggaggccgaggcgggtggatcaccagaggtcagaagttcgagaccagcctggccaacgttgtgaaaccctgtctctactaaaaatacaaaaattggccacgtgtggtggcgggcacctgtaatcctagctacttgggaagctgagacaggagaattgcttgaacccgggaggtggaggttgcagtgagccaagatcatgccattgcactccagcctgggcaacaagagcgagactccatcttgaaaaaaaataaaataataaaaagcagctcatactagggaacttggtaaagcaacctcatgctgttgtaggttgaaagcctggtcagctattctgcaagacagtcaaaaattgtttacagggctggacagcatattgctattgaaaaatagctattaggagaccttgcacaatttgtgaaacattgttaggctcattgtactgtgtaaaatcaggaaagaatttgggaacatactgatacaacaaaaagataggttgtcaaaccctcacttcaccagaaagctaaattaaccagataagtctttctgaaagttttagtgtcttagtttgttcctgcgctgtaacagaataccttagactgggtaacctataaataataggaatttatttctcacagttttggaggctggcaaatgcaagatccaggtgctggtacgttcagtgtctggcaagggcggctttctggtccaagatggtgcctttttttctgcatcttccatagggaatgaacactccttatggtagaagggatggaaggaccaggctttttttttttttttttttggatacagcaggatcttgctctgtcgcccaggctggagtgcagtggcatgattaaggttcactgcagcctcaatctcccactctccagcgatcatcccacctcagcctcttggatagctgggaccacaggcacgagctaccatgcctggctaatttattttttgtagagacggggtttcgccatgttgcccaggctggtctggaatttctgacctctagcagtccacctgtttccgcctcccaaatgctgagattagaggcatgagtcactgcacccagcccgcagcctcttttataagggcattaatccccttcatgagggatattctctcatgacttaatcacctgccaaagaccccacctcttaatactacatcagtgatgggttcaatgtatcaattgggtgggagggggcacattcagaccatagcatctagtcattctggttttattaagatttattagacctgaggcatgaaaaatagcatactggatgggacttcagcatcgatgagttgccttagtaatactgttaataaaaagcactaaatatgcca

SEQ ID NO: 8376 - protein, 104 aa, Homo sapiens
MLLEHRKQQNESAEDEQELSEVFMKTLNYTARFSRFKNRETIASVRSLLLQKKLHKFELACLANLCPETAEESKALIPSLEGRFEDEELQQILDDIQTKRSFQY

SEQ ID NO: 8377 - DNA, 4727 bp, Homo sapiens
cgcgcggcgcggcgcggcgatggcggcgggtggcagcgatccgcgggctggcgacgtagaggaggacgcctcacagctcatctttcctaaagcttggagggacggtttgaagatgaggagctgcagcagattcttgatgatatccagacaaagcgcagctttcagtattaatctccaaacatcactgctgctcggagaaaccacatccccaggcataacaccaccttcccactgtctggggctgacttgcacagaaattctgttgaagacagttgagaattcctttggagaaaacagcccagcttggcgtggggttaggttgctgtttcaaataactcacaggcccaggtgacatggaatcttggagcagccttgtgcagtggcagccagtggcttcctgaacgtgcctctgcgaagtgtgagatgaggggtcacataaccacactgttgactacctcattcctggtttttggcctccacatcatcttttttcttaatatttcatgttttaatttcagggtgtttatactttttgaaactagaccagaagatagtagactttatagagaaagaccagttttacctagatactaaaggaagaattaaaccgctgttagtttgaaatgctttttttttttttttttaaatggagatagggtcttaactcttgtccaggctggaggagtgcagtcgtacagtcatggctcactgaagtcttgaccccgctgcctcagcctcccaaataactggggccacaggtgtgcaccacaactctcagctaatttttaaaattttttatagaggtggggttttactatgctgtccagactggtcttaaactcctgggctcaagtgatccccctgccttggcctcccaaactggtgagattacaggcatgagccaccacaactggcctgaaattcttaaaggatgggagtgtcgatgacagcaccttggcatcgttgtgcctaacctgggagacggaagaagcacgccatgggaagtgtttacacttggggacaagtgctaagtattgtggagcccatagccccttgagatagatggctactttgcctttcttcttgaactgtcttgcagaatgtggatttggggtaagtggtcttgaaggattcatttagtcaccctcaaattaagatttttacttcatctttcttgggcctgcacctccaagataacaaagaagaagcaatggtcgtgccaaagaggtccacaaccaggtgtgcactgttcactgcagcccatttgctgtatgaactgtggttgttgtgtgcccaatgacaaggctactaagaaattcatcatttgaaacgtagaggccgcagcagtcagcgatgtttctgaaatgagcatccttgacgcctgtgtacttcccaggctggatgtgaagctacattaccatgtgagttgtgccattcacagcacagtggtgaggaattgagctcatgaagcaggcaaggaccgaacacctccaccccaacgtagacctgcaggtgctgccccatgacctccaccaaagcccatataaggagcggagttgttaaggactgaagaaaaacttctctggagaaaaataaaattgcaattctacttaaaaaaatttttttttttttttacttcataggccaggcttgaagttctgaacactttgaagtctccaattatgagagatccagtctaagcctctggcctgctaattagcaataagtgctttatttggaaggagggagtcatccactcttgagccactgcagtgaagtcacttgatctcagtctgggggaaaacacttcaatagctaaacattctagctttgatttttctgaagggaatacacttgttttcaattttggggtttttctttggggcacttgcttgactctgtatgaacttgtgatccaaggaaaaaggagaaagaacagtgttggcttttaaaatcaggatggttttatgtttgctacgaaataaggcaagaataaaaaattcttatttttatttatttatttattttttgagatagagtctggctgtgttgcccaggatgcaatggcgcaatcttggctcactgcaacctctgccttctgggttcaagtgattctcctgcctcagcctcccaagtagctgggattacaggtacctgccaccacgcctggctaattttttgtgtttttagtagagacagggtttcaccacgttcgccaggctagtcttgaactgacctcaagtgatcctcccacctcggcttcccaaagtgctgggattacaggcgtgagccaccggccaatctttttatccttgagcaacttcgcttctttgagcctcattggtgttctcaattgtgaaatatggataatagtatctgccccatgggtattttgagaaggttgaatgaacaggaaattattacaaagagcctagaggtgtctgatatatagtatgttccagtaaatgttcactattcttagcatctcaggcagatgagctagtatagatagatgattaagtcagcttgcttcatagaaattagtgcaagaatttgttagcctaccaactgatagtatcagacttggaaaataaatgaaattgggccaggcgtggtggctcacccttgtaatcccagcgctttcagaggccgaggcaggcggatcacctgaggttgggagtttgagaccatcctgaccaacatggagaaaccccgtctctacttaaaatacaaaattagcggggcgtggtggcgcatgcctgtaatctcagctactctggaggctgaggcaggagaattgcttgaacctgggaggcagagggggtggcgagccaagattgcaccattgtactccagcctaggcaacaagagcgaaactgtctcaaaaaaaaaaaaaaaaaaaaagtgaaattgcttacccaaatctacagttaactttcgttttttaatgcttgatgaatttgcatgtcattcttgggcagtggccatgctgtcttctctgtattgttccaatttgggtatatgtgctgccaaagtgagtactgcagaattatttcttgagagaggcacttacatgtgctgattggcactaaagcagtggaatgggaagaagagacttggaaggcagcccagacgatccaggcgtgtgctagatggcaactgaggagcacggtgctaccatctttactggtgtttccacctatgtgccaggggttctgtgagctacctgagaatactgaagtatataatgctctggcacatagttaggcactaatcagtggtatttatcaaggtgattaaaagcagatttaaaaagcagctcacagttgggcgcggtggctcacacctgtaatcccagcactttgggaggccgaggcgggtggatcaccagaggtcagaagttcgagaccagcctggccaacgttgtgaaaccctgtctctactaaaaatacaaaaattggccacgtgtggtggcgggcacctgtaatcctagctacttgggaagctgagacaggagaattgcttgaacccgggaggtggaggttgcagtgagccaagatcatgccattgcactccagcctgggcaacaagagcgagactccatcttgaaaaaaaataaaataataaaaagcagctcatactagggaacttggtaaagcaacctcatgctgttgtaggttgaaagcctggtcagctattctgcaagacagtcaaaaattgtttacagggctggacagcatattgctattgaaaaatagctattaggagaccttgcacaatttgtgaaacattgttaggctcattgtactgtgtaaaatcaggaaagaatttgggaacatactgatacaacaaaaagataggttgtcaaaccctcacttcaccagaaagctaaattaaccagataagtctttctgaaagttttagtgtcttagtttgttcctgcgctgtaacagaataccttagactgggtaacctataaataataggaatttatttctcacagttttggaggctggcaaatgcaagatccaggtgctggtacgttcagtgtctggcaagggcggctttctggtccaagatggtgcctttttttctgcatcttccatagggaatgaacactccttatggtagaagggatggaaggaccaggctttttttttttttttttttggatacagcaggatcttgctctgtcgcccaggctggagtgcagtggcatgattaaggttcactgcagcctcaatctcccactctccagcgatcatcccacctcagcctcttggatagctgggaccacaggcacgagctaccatgcctggctaatttattttttgtagagacggggtttcgccatgttgcccaggctggtctggaatttctgacctctagcagtccacctgtttccgcctcccaaatgctgagattagaggcatgagtcactgcacccagcccgcagcctcttttataagggcattaatccccttcatgagggatattctctcatgacttaatcacctgccaaagaccccacctcttaatactacatcagtgatgggttcaatgtatcaattgggtgggagggggcacattcagaccatagcatctagtcattctggttttattaagatttattagacctgaggcatgaaaaatagcatactggatgggacttcagcatcgatgagttgccttagtaatactgttaataaaaagcactaaatatgcca

SEQ ID NO: 8378 - protein, 110 aa, Homo sapiens
MAAGGSDPRAGDVEEDASQLIFPKAWRDGLKMRSCSRFLMISRQSAAFSINLQTSLLLGETTSPGITPPSHCLGLTCTEILLKTVENSFGENSPAWRGVRLLFQITHRPR

SEQ ID NO: 8379 - DNA, 4825 bp, Homo sapiens
ggcgcgcggcgcggcgcggcgatggcggcgggtggcagcgatccgcgggctggcgacgtagaggaggacgcctcacagctcatctttcctaaagcttgctactccagaaaaagcttcataagtttgagttggcctgtttggccaacctttgcccagagactgctgaggagtccaaggctctaatcccaagcttggagggacggtttgaagatgaggagctgcagcagattcttgatgatatccagacaaagcgcagctttcagtattaatctccaaacatcactgctgctcggagaaaccacatccccaggcataacaccaccttcccactgtctggggctgacttgcacagaaattctgttgaagacagttgagaattcctttggagaaaacagcccagcttggcgtggggttaggttgctgtttcaaataactcacaggcccaggtgacatggaatcttggagcagccttgtgcagtggcagccagtggcttcctgaacgtgcctctgcgaagtgtgagatgaggggtcacataaccacactgttgactacctcattcctggtttttggcctccacatcatcttttttcttaatatttcatgttttaatttcagggtgtttatactttttgaaactagaccagaagatagtagactttatagagaaagaccagttttacctagatactaaaggaagaattaaaccgctgttagtttgaaatgctttttttttttttttttaaatggagatagggtcttaactcttgtccaggctggaggagtgcagtcgtacagtcatggctcactgaagtcttgaccccgctgcctcagcctcccaaataactggggccacaggtgtgcaccacaactctcagctaatttttaaaattttttatagaggtggggttttactatgctgtccagactggtcttaaactcctgggctcaagtgatccccctgccttggcctcccaaactggtgagattacaggcatgagccaccacaactggcctgaaattcttaaaggatgggagtgtcgatgacagcaccttggcatcgttgtgcctaacctgggagacggaagaagcacgccatgggaagtgtttacacttggggacaagtgctaagtattgtggagcccatagccccttgagatagatggctactttgcctttcttcttgaactgtcttgcagaatgtggatttggggtaagtggtcttgaaggattcatttagtcaccctcaaattaagatttttacttcatctttcttgggcctgcacctccaagataacaaagaagaagcaatggtcgtgccaaagaggtccacaaccaggtgtgcactgttcactgcagcccatttgctgtatgaactgtggttgttgtgtgcccaatgacaaggctactaagaaattcatcatttgaaacgtagaggccgcagcagtcagcgatgtttctgaaatgagcatccttgacgcctgtgtacttcccaggctggatgtgaagctacattaccatgtgagttgtgccattcacagcacagtggtgaggaattgagctcatgaagcaggcaaggaccgaacacctccaccccaacgtagacctgcaggtgctgccccatgacctccaccaaagcccatataaggagcggagttgttaaggactgaagaaaaacttctctggagaaaaataaaattgcaattctacttaaaaaaatttttttttttttttacttcataggccaggcttgaagttctgaacactttgaagtctccaattatgagagatccagtctaagcctctggcctgctaattagcaataagtgctttatttggaaggagggagtcatccactcttgagccactgcagtgaagtcacttgatctcagtctgggggaaaacacttcaatagctaaacattctagctttgatttttctgaagggaatacacttgttttcaattttggggtttttctttggggcacttgcttgactctgtatgaacttgtgatccaaggaaaaaggagaaagaacagtgttggcttttaaaatcaggatggttttatgtttgctacgaaataaggcaagaataaaaaattcttatttttatttatttatttattttttgagatagagtctggctgtgttgcccaggatgcaatggcgcaatcttggctcactgcaacctctgccttctgggttcaagtgattctcctgcctcagcctcccaagtagctgggattacaggtacctgccaccacgcctggctaattttttgtgtttttagtagagacagggtttcaccacgttcgccaggctagtcttgaactgacctcaagtgatcctcccacctcggcttcccaaagtgctgggattacaggcgtgagccaccggccaatctttttatccttgagcaacttcgcttctttgagcctcattggtgttctcaattgtgaaatatggataatagtatctgccccatgggtattttgagaaggttgaatgaacaggaaattattacaaagagcctagaggtgtctgatatatagtatgttccagtaaatgttcactattcttagcatctcaggcagatgagctagtatagatagatgattaagtcagcttgcttcatagaaattagtgcaagaatttgttagcctaccaactgatagtatcagacttggaaaataaatgaaattgggccaggcgtggtggctcacccttgtaatcccagcgctttcagaggccgaggcaggcggatcacctgaggttgggagtttgagaccatcctgaccaacatggagaaaccccgtctctacttaaaatacaaaattagcggggcgtggtggcgcatgcctgtaatctcagctactctggaggctgaggcaggagaattgcttgaacctgggaggcagagggggtggcgagccaagattgcaccattgtactccagcctaggcaacaagagcgaaactgtctcaaaaaaaaaaaaaaaaaaaaagtgaaattgcttacccaaatctacagttaactttcgttttttaatgcttgatgaatttgcatgtcattcttgggcagtggccatgctgtcttctctgtattgttccaatttgggtatatgtgctgccaaagtgagtactgcagaattatttcttgagagaggcacttacatgtgctgattggcactaaagcagtggaatgggaagaagagacttggaaggcagcccagacgatccaggcgtgtgctagatggcaactgaggagcacggtgctaccatctttactggtgtttccacctatgtgccaggggttctgtgagctacctgagaatactgaagtatataatgctctggcacatagttaggcactaatcagtggtatttatcaaggtgattaaaagcagatttaaaaagcagctcacagttgggcgcggtggctcacacctgtaatcccagcactttgggaggccgaggcgggtggatcaccagaggtcagaagttcgagaccagcctggccaacgttgtgaaaccctgtctctactaaaaatacaaaaattggccacgtgtggtggcgggcacctgtaatcctagctacttgggaagctgagacaggagaattgcttgaacccgggaggtggaggttgcagtgagccaagatcatgccattgcactccagcctgggcaacaagagcgagactccatcttgaaaaaaaataaaataataaaaagcagctcatactagggaacttggtaaagcaacctcatgctgttgtaggttgaaagcctggtcagctattctgcaagacagtcaaaaattgtttacagggctggacagcatattgctattgaaaaatagctattaggagaccttgcacaatttgtgaaacattgttaggctcattgtactgtgtaaaatcaggaaagaatttgggaacatactgatacaacaaaaagataggttgtcaaaccctcacttcaccagaaagctaaattaaccagataagtctttctgaaagttttagtgtcttagtttgttcctgcgctgtaacagaataccttagactgggtaacctataaataataggaatttatttctcacagttttggaggctggcaaatgcaagatccaggtgctggtacgttcagtgtctggcaagggcggctttctggtccaagatggtgcctttttttctgcatcttccatagggaatgaacactccttatggtagaagggatggaaggaccaggctttttttttttttttttttggatacagcaggatcttgctctgtcgcccaggctggagtgcagtggcatgattaaggttcactgcagcctcaatctcccactctccagcgatcatcccacctcagcctcttggatagctgggaccacaggcacgagctaccatgcctggctaatttattttttgtagagacggggtttcgccatgttgcccaggctggtctggaatttctgacctctagcagtccacctgtttccgcctcccaaatgctgagattagaggcatgagtcactgcacccagcccgcagcctcttttataagggcattaatccccttcatgagggatattctctcatgacttaatcacctgccaaagaccccacctcttaatactacatcagtgatgggttcaatgtatcaattgggtgggagggggcacattcagaccatagcatctagtcattctggttttattaagatttattagacctgaggcatgaaaaatagcatactggatgggacttcagcatcgatgagttgccttagtaatactgttaataaaaagcactaaatatgcca

SEQ ID NO: 8380 - protein, 53 aa, Homo sapiens
MAAGGSDPRAGDVEEDASQLIFPKACYSRKSFISLSWPVWPTFAQRLLRSPRL

SEQ ID NO: 8381 - DNA, 4916 bp, Homo sapiens
ggtggtggcgcgcggcgcggcgcggcgatggcggcgggtggcagcgatccgcgggctggcgacgtagaggaggacgcctcacagctcatctttcctaaagagtttgaaacagctgagacacttctaaattcagaagttcatatgcttctggaacatcgaaagcagcagaatgagagtgcagaggacgaacaggagctctcagaagtcttcatgaaaacattaaactacacagcccgtttcagtcgtttcaaaaacagagagaccattgccagtgttcgtagcttggagggacggtttgaagatgaggagctgcagcagattcttgatgatatccagacaaagcgcagctttcagtattaatctccaaacatcactgctgctcggagaaaccacatccccaggcataacaccaccttcccactgtctggggctgacttgcacagaaattctgttgaagacagttgagaattcctttggagaaaacagcccagcttggcgtggggttaggttgctgtttcaaataactcacaggcccaggtgacatggaatcttggagcagccttgtgcagtggcagccagtggcttcctgaacgtgcctctgcgaagtgtgagatgaggggtcacataaccacactgttgactacctcattcctggtttttggcctccacatcatcttttttcttaatatttcatgttttaatttcagggtgtttatactttttgaaactagaccagaagatagtagactttatagagaaagaccagttttacctagatactaaaggaagaattaaaccgctgttagtttgaaatgctttttttttttttttttaaatggagatagggtcttaactcttgtccaggctggaggagtgcagtcgtacagtcatggctcactgaagtcttgaccccgctgcctcagcctcccaaataactggggccacaggtgtgcaccacaactctcagctaatttttaaaattttttatagaggtggggttttactatgctgtccagactggtcttaaactcctgggctcaagtgatccccctgccttggcctcccaaactggtgagattacaggcatgagccaccacaactggcctgaaattcttaaaggatgggagtgtcgatgacagcaccttggcatcgttgtgcctaacctgggagacggaagaagcacgccatgggaagtgtttacacttggggacaagtgctaagtattgtggagcccatagccccttgagatagatggctactttgcctttcttcttgaactgtcttgcagaatgtggatttggggtaagtggtcttgaaggattcatttagtcaccctcaaattaagatttttacttcatctttcttgggcctgcacctccaagataacaaagaagaagcaatggtcgtgccaaagaggtccacaaccaggtgtgcactgttcactgcagcccatttgctgtatgaactgtggttgttgtgtgcccaatgacaaggctactaagaaattcatcatttgaaacgtagaggccgcagcagtcagcgatgtttctgaaatgagcatccttgacgcctgtgtacttcccaggctggatgtgaagctacattaccatgtgagttgtgccattcacagcacagtggtgaggaattgagctcatgaagcaggcaaggaccgaacacctccaccccaacgtagacctgcaggtgctgccccatgacctccaccaaagcccatataaggagcggagttgttaaggactgaagaaaaacttctctggagaaaaataaaattgcaattctacttaaaaaaatttttttttttttttacttcataggccaggcttgaagttctgaacactttgaagtctccaattatgagagatccagtctaagcctctggcctgctaattagcaataagtgctttatttggaaggagggagtcatccactcttgagccactgcagtgaagtcacttgatctcagtctgggggaaaacacttcaatagctaaacattctagctttgatttttctgaagggaatacacttgttttcaattttggggtttttctttggggcacttgcttgactctgtatgaacttgtgatccaaggaaaaaggagaaagaacagtgttggcttttaaaatcaggatggttttatgtttgctacgaaataaggcaagaataaaaaattcttatttttatttatttatttattttttgagatagagtctggctgtgttgcccaggatgcaatggcgcaatcttggctcactgcaacctctgccttctgggttcaagtgattctcctgcctcagcctcccaagtagctgggattacaggtacctgccaccacgcctggctaattttttgtgtttttagtagagacagggtttcaccacgttcgccaggctagtcttgaactgacctcaagtgatcctcccacctcggcttcccaaagtgctgggattacaggcgtgagccaccggccaatctttttatccttgagcaacttcgcttctttgagcctcattggtgttctcaattgtgaaatatggataatagtatctgccccatgggtattttgagaaggttgaatgaacaggaaattattacaaagagcctagaggtgtctgatatatagtatgttccagtaaatgttcactattcttagcatctcaggcagatgagctagtatagatagatgattaagtcagcttgcttcatagaaattagtgcaagaatttgttagcctaccaactgatagtatcagacttggaaaataaatgaaattgggccaggcgtggtggctcacccttgtaatcccagcgctttcagaggccgaggcaggcggatcacctgaggttgggagtttgagaccatcctgaccaacatggagaaaccccgtctctacttaaaatacaaaattagcggggcgtggtggcgcatgcctgtaatctcagctactctggaggctgaggcaggagaattgcttgaacctgggaggcagagggggtggcgagccaagattgcaccattgtactccagcctaggcaacaagagcgaaactgtctcaaaaaaaaaaaaaaaaaaaaagtgaaattgcttacccaaatctacagttaactttcgttttttaatgcttgatgaatttgcatgtcattcttgggcagtggccatgctgtcttctctgtattgttccaatttgggtatatgtgctgccaaagtgagtactgcagaattatttcttgagagaggcacttacatgtgctgattggcactaaagcagtggaatgggaagaagagacttggaaggcagcccagacgatccaggcgtgtgctagatggcaactgaggagcacggtgctaccatctttactggtgtttccacctatgtgccaggggttctgtgagctacctgagaatactgaagtatataatgctctggcacatagttaggcactaatcagtggtatttatcaaggtgattaaaagcagatttaaaaagcagctcacagttgggcgcggtggctcacacctgtaatcccagcactttgggaggccgaggcgggtggatcaccagaggtcagaagttcgagaccagcctggccaacgttgtgaaaccctgtctctactaaaaatacaaaaattggccacgtgtggtggcgggcacctgtaatcctagctacttgggaagctgagacaggagaattgcttgaacccgggaggtggaggttgcagtgagccaagatcatgccattgcactccagcctgggcaacaagagcgagactccatcttgaaaaaaaataaaataataaaaagcagctcatactagggaacttggtaaagcaacctcatgctgttgtaggttgaaagcctggtcagctattctgcaagacagtcaaaaattgtttacagggctggacagcatattgctattgaaaaatagctattaggagaccttgcacaatttgtgaaacattgttaggctcattgtactgtgtaaaatcaggaaagaatttgggaacatactgatacaacaaaaagataggttgtcaaaccctcacttcaccagaaagctaaattaaccagataagtctttctgaaagttttagtgtcttagtttgttcctgcgctgtaacagaataccttagactgggtaacctataaataataggaatttatttctcacagttttggaggctggcaaatgcaagatccaggtgctggtacgttcagtgtctggcaagggcggctttctggtccaagatggtgcctttttttctgcatcttccatagggaatgaacactccttatggtagaagggatggaaggaccaggctttttttttttttttttttggatacagcaggatcttgctctgtcgcccaggctggagtgcagtggcatgattaaggttcactgcagcctcaatctcccactctccagcgatcatcccacctcagcctcttggatagctgggaccacaggcacgagctaccatgcctggctaatttattttttgtagagacggggtttcgccatgttgcccaggctggtctggaatttctgacctctagcagtccacctgtttccgcctcccaaatgctgagattagaggcatgagtcactgcacccagcccgcagcctcttttataagggcattaatccccttcatgagggatattctctcatgacttaatcacctgccaaagaccccacctcttaatactacatcagtgatgggttcaatgtatcaattgggtgggagggggcacattcagaccatagcatctagtcattctggttttattaagatttattagacctgaggcatgaaaaatagcatactggatgggacttcagcatcgatgagttgccttagtaatactgttaataaaaagcactaaatatgcca

SEQ ID NO: 8382 - protein, 110 aa, Homo sapiens
MAAGGSDPRAGDVEEDASQLIFPKEFETAETLLNSEVHMLLEHRKQQNESAEDEQELSEVFMKTLNYTARFSRFKNRETIASVRSLEGRFEDEELQQILDDIQTKRSFQY

SEQ ID NO: 8383 - DNA, 5033 bp, Homo sapiens
gcttctgcttccggcggcgctggtggtggcgcgcggcgcggcgcggcgatggcggcgggtggcagcgatccgcgggctggcgacgtagaggaggacgcctcacagctcatctttcctaaagagtttgaaacagctgagacacttctaaattcagaagttcatatgcttctggaacatcgaaagcagcagaatgagagtgcagaggacgaacaggagctctcagaagtcttcatgaaaacattaaactacacagcccgtttcagtcgtttcaaaaacagagagaccattgccagtgttcgtagcttgctactccagaaaaagcttcataagtttgagttggcctgtttggccaacctttgcccagagactgctgaggagtccaaggctctaatcccaagcttggagggacggtttgaagatgaggagctgcagcagattcttgatgatatccagacaaagcgcagctttcagtattaatctccaaacatcactgctgctcggagaaaccacatccccaggcataacaccaccttcccactgtctggggctgacttgcacagaaattctgttgaagacagttgagaattcctttggagaaaacagcccagcttggcgtggggttaggttgctgtttcaaataactcacaggcccaggtgacatggaatcttggagcagccttgtgcagtggcagccagtggcttcctgaacgtgcctctgcgaagtgtgagatgaggggtcacataaccacactgttgactacctcattcctggtttttggcctccacatcatcttttttcttaatatttcatgttttaatttcagggtgtttatactttttgaaactagaccagaagatagtagactttatagagaaagaccagttttacctagatactaaaggaagaattaaaccgctgttagtttgaaatgctttttttttttttttttaaatggagatagggtcttaactcttgtccaggctggaggagtgcagtcgtacagtcatggctcactgaagtcttgaccccgctgcctcagcctcccaaataactggggccacaggtgtgcaccacaactctcagctaatttttaaaattttttatagaggtggggttttactatgctgtccagactggtcttaaactcctgggctcaagtgatccccctgccttggcctcccaaactggtgagattacaggcatgagccaccacaactggcctgaaattcttaaaggatgggagtgtcgatgacagcaccttggcatcgttgtgcctaacctgggagacggaagaagcacgccatgggaagtgtttacacttggggacaagtgctaagtattgtggagcccatagccccttgagatagatggctactttgcctttcttcttgaactgtcttgcagaatgtggatttggggtaagtggtcttgaaggattcatttagtcaccctcaaattaagatttttacttcatctttcttgggcctgcacctccaagataacaaagaagaagcaatggtcgtgccaaagaggtccacaaccaggtgtgcactgttcactgcagcccatttgctgtatgaactgtggttgttgtgtgcccaatgacaaggctactaagaaattcatcatttgaaacgtagaggccgcagcagtcagcgatgtttctgaaatgagcatccttgacgcctgtgtacttcccaggctggatgtgaagctacattaccatgtgagttgtgccattcacagcacagtggtgaggaattgagctcatgaagcaggcaaggaccgaacacctccaccccaacgtagacctgcaggtgctgccccatgacctccaccaaagcccatataaggagcggagttgttaaggactgaagaaaaacttctctggagaaaaataaaattgcaattctacttaaaaaaatttttttttttttttacttcataggccaggcttgaagttctgaacactttgaagtctccaattatgagagatccagtctaagcctctggcctgctaattagcaataagtgctttatttggaaggagggagtcatccactcttgagccactgcagtgaagtcacttgatctcagtctgggggaaaacacttcaatagctaaacattctagctttgatttttctgaagggaatacacttgttttcaattttggggtttttctttggggcacttgcttgactctgtatgaacttgtgatccaaggaaaaaggagaaagaacagtgttggcttttaaaatcaggatggttttatgtttgctacgaaataaggcaagaataaaaaattcttatttttatttatttatttattttttgagatagagtctggctgtgttgcccaggatgcaatggcgcaatcttggctcactgcaacctctgccttctgggttcaagtgattctcctgcctcagcctcccaagtagctgggattacaggtacctgccaccacgcctggctaattttttgtgtttttagtagagacagggtttcaccacgttcgccaggctagtcttgaactgacctcaagtgatcctcccacctcggcttcccaaagtgctgggattacaggcgtgagccaccggccaatctttttatccttgagcaacttcgcttctttgagcctcattggtgttctcaattgtgaaatatggataatagtatctgccccatgggtattttgagaaggttgaatgaacaggaaattattacaaagagcctagaggtgtctgatatatagtatgttccagtaaatgttcactattcttagcatctcaggcagatgagctagtatagatagatgattaagtcagcttgcttcatagaaattagtgcaagaatttgttagcctaccaactgatagtatcagacttggaaaataaatgaaattgggccaggcgtggtggctcacccttgtaatcccagcgctttcagaggccgaggcaggcggatcacctgaggttgggagtttgagaccatcctgaccaacatggagaaaccccgtctctacttaaaatacaaaattagcggggcgtggtggcgcatgcctgtaatctcagctactctggaggctgaggcaggagaattgcttgaacctgggaggcagagggggtggcgagccaagattgcaccattgtactccagcctaggcaacaagagcgaaactgtctcaaaaaaaaaaaaaaaaaaaaagtgaaattgcttacccaaatctacagttaactttcgttttttaatgcttgatgaatttgcatgtcattcttgggcagtggccatgctgtcttctctgtattgttccaatttgggtatatgtgctgccaaagtgagtactgcagaattatttcttgagagaggcacttacatgtgctgattggcactaaagcagtggaatgggaagaagagacttggaaggcagcccagacgatccaggcgtgtgctagatggcaactgaggagcacggtgctaccatctttactggtgtttccacctatgtgccaggggttctgtgagctacctgagaatactgaagtatataatgctctggcacatagttaggcactaatcagtggtatttatcaaggtgattaaaagcagatttaaaaagcagctcacagttgggcgcggtggctcacacctgtaatcccagcactttgggaggccgaggcgggtggatcaccagaggtcagaagttcgagaccagcctggccaacgttgtgaaaccctgtctctactaaaaatacaaaaattggccacgtgtggtggcgggcacctgtaatcctagctacttgggaagctgagacaggagaattgcttgaacccgggaggtggaggttgcagtgagccaagatcatgccattgcactccagcctgggcaacaagagcgagactccatcttgaaaaaaaataaaataataaaaagcagctcatactagggaacttggtaaagcaacctcatgctgttgtaggttgaaagcctggtcagctattctgcaagacagtcaaaaattgtttacagggctggacagcatattgctattgaaaaatagctattaggagaccttgcacaatttgtgaaacattgttaggctcattgtactgtgtaaaatcaggaaagaatttgggaacatactgatacaacaaaaagataggttgtcaaaccctcacttcaccagaaagctaaattaaccagataagtctttctgaaagttttagtgtcttagtttgttcctgcgctgtaacagaataccttagactgggtaacctataaataataggaatttatttctcacagttttggaggctggcaaatgcaagatccaggtgctggtacgttcagtgtctggcaagggcggctttctggtccaagatggtgcctttttttctgcatcttccatagggaatgaacactccttatggtagaagggatggaaggaccaggctttttttttttttttttttggatacagcaggatcttgctctgtcgcccaggctggagtgcagtggcatgattaaggttcactgcagcctcaatctcccactctccagcgatcatcccacctcagcctcttggatagctgggaccacaggcacgagctaccatgcctggctaatttattttttgtagagacggggtttcgccatgttgcccaggctggtctggaatttctgacctctagcagtccacctgtttccgcctcccaaatgctgagattagaggcatgagtcactgcacccagcccgcagcctcttttataagggcattaatccccttcatgagggatattctctcatgacttaatcacctgccaaagaccccacctcttaatactacatcagtgatgggttcaatgtatcaattgggtgggagggggcacattcagaccatagcatctagtcattctggttttattaagatttattagacctgaggcatgaaaaatagcatactggatgggacttcagcatcgatgagttgccttagtaatactgttaataaaaagcactaaatatgcca

SEQ ID NO: 8384 - protein, 142 aa, Homo sapiens; identical to SEQ ID NO: 618

SEQ ID NO: 8385 - DNA, 1333 bp, Homo sapiens
ggtgttctcaattgtgaaatatggataatagtatctgccccatgggtattttgagaaggttgaatgaacaggaaattattacaaagagcctagaggtgtctgatatatagtatgttccagtaaatgttcactattcttagcatctcaggcagatgagctagtatagatagatgattaagtcagcttgcttcatagaaattagtgcaagaatttgttagcctaccaactgatagtatcagacttggaaaataaatgaaattgggccaggcgtggtggctcacccttgtaatcccagcgctttcagaggccgaggcaggcggatcacctgaggttgggagtttgagaccatcctgaccaacatggagaaaccccgtctctacttaaaatacaaaattagcggggcgtggtggcgcatgcctgtaatctcagctactctggaggctgaggcaggagaattgcttgaacctgggaggcagagggggtggcgagccaagattgcaccattgtactccagcctaggcaacaagagcgaaactgtctcaaaaaaaaaaaaaaaaaaaaagtgaaattgcttacccaaatctacagttaactttcgttttttaatgcttgatgaatttgcatgtcattcttgggcagtggccatgctgtcttctctgtattgttccaatttgggtatatgtgctgccaaagtgagtactgcagaattatttcttgagagaggcacttacatgtgctgattggcactaaagcagtggaatgggaagaagagacttggaaggcagcccagacgatccaggcgtgtgctagatggcaactgaggagcacggtgctaccatctttactggtgtttccacctatgtgccaggggttctgtgagctacctgagaatactgaagtatataatgctctggcacatagttaggcactaatcagtggtatttatcaaggtgattaaaagcagatttaaaaagcagctcacagttgggcgcggtggctcacacctgtttccgcctcccaaatgctgagattagaggcatgagtcactgcacccagcccgcagcctcttttataagggcattaatccccttcatgagggatattctctcatgacttaatcacctgccaaagaccccacctcttaatactacatcagtgatgggttcaatgtatcaattgggtgggagggggcacattcagaccatagcatctagtcattctggttttattaagatttattagacctgaggcatgaaaaatagcatactggatgggacttcagcatcgatgagttgccttagtaatactgttaataaaaagcactaaatatgcc

SEQ ID NO: 8386 - protein, 68 aa, Homo sapiens
MEKPRLYLKYKISGAWWRMPVISATLEAEAGELLEPGRQRGWRAKIAPLYSSLGNKSETVSKKKKKKK

SEQ ID NO: 8387 - DNA, 2091 bp, Homo sapiens
gtttgctacgaaataaggcaagaataaaaaattcttatttttatttatttatttattttttgagatagagtctggctgtgttgcccaggatgcaatggcgcaatcttggctcactgcaacctctgccttctgggttcaagtgattctcctgcctcagcctcccaagtagctgggattacaggtacctgccaccacgcctggctaattttttgtgtttttagtagagacagggtttcaccacgttcgccaggctagtcttgaactgacctcaagtgatcctcccacctcggcttcccaaagtgctgggattacaggcgtgagccaccggccaatctttttatccttgagcaacttcgcttctttgagcctcattggtgttctcaattgtgaaatatggataatagtatctgccccatgggtattttgagaaggttgaatgaacaggaaattattacaaagagcctagaggtgtctgatatatagtatgttccagtaaatgttcactattcttagcatctcaggcagatgagctagtatagatagatgattaagtcagcttgcttcatagaaattagtgcaagaatttgttagcctaccaactgatagtatcagacttggaaaataaatgaaattgggccaggcgtggtggctcacccttgtaatcccagcgctttcagaggccgaggcaggcggatcacctgaggttgggagtttgagaccatcctgaccaacatggagaaaccccgtctctacttaaaatacaaaattagcggggcgtggtggcgcatgcctgtaatctcagctactctggaggctgaggcaggagaattgcttgaacctgggaggcagagggggtggcgagccaagattgcaccattgtactccagcctaggcaacaagagcgaaactgtctcaaaaaaaaaaaaaaaaaaaaagtgaaattgcttacccaaatctacagttaactttcgttttttaatgcttgatgaatttgcatgtcattcttgggcagtggccatgctgtcttctctgtattgttccaatttgggtatatgtgctgccaaagtgagtactgcagaattatttcttgagagaggcacttacatgtgctgattggcactaaagcagtggaatgggaagaagagacttggaaggcagcccagacgatccaggcgtgtgctagatggcaactgaggagcacggtgctaccatctttactggtgtttccacctatgtgccaggggttctgtgagctacctgagaatactgaagtatataatgctctggcacatagttaggcactaatcagtggtatttatcaaggtgattaaaagcagatttaaaaagcagctcacagttgggcgcggtggctcacacctgtaatcccagcactttgggaggccgaggcgggtggatcaccagaggtcagaagttcgagaccagcctggccaacgttgtgaaaccctgtctctactaaaaatacaaaaattggccacgtgtggtggcgggcacctgtaatcctagctacttgggaagctgagacaggagaattgcttgaacccgggaggtggaggttgcatggcatgattaaggttcactgcagcctcaatctcccactctccagcgatcatcccacctcagcctcttggatagctgggaccacaggcacgagctaccatgcctggctaatttattttttgtagagacggggtttcgccatgttgcccaggctggtctggaatttctgacctctagcagtccacctgtttccgcctcccaaatgctgagattagaggcatgagtcactgcacccagcccgcagcctcttttataagggcattaatccccttcatgagggatattctctcatgacttaatcacctgccaaagaccccacctcttaatactacatcagtgatgggttcaatgtatcaattgggtgggagggggcacattcagaccatagcatctagtcattctggttttattaagatttattagacctgaggcatgaaaaatagcatactggatgggacttcagcatcgatgagttgccttagtaatactgttaataaaaagcactaaatatgc

SEQ ID NO: 8388 - protein, 68 aa, Homo sapiens; identical to SEQ ID NO: 8386

SEQ ID NO: 8389 - DNA, 1565 bp, Homo sapiens
aactagaccagaagatagtagactttatagagaaagaccagttttacctagatactaaaggaagaattaaaccgctgttagtttgaaatgctttttttttttttttttaaatggagatagggtcttaactcttgtccaggctggaggagtgcagtcgtacagtcatggctcactgaagtcttgaccccgctgcctcagcctcccaaataactggggccacaggtgtgcaccacaactctcagctaatttttaaaattttttatagaggtggggttttactatgctgtccagactggtcttaaactcctgggctcaagtgatccccctgccttggcctcccaaactggtgagattacaggcatgagccaccacaactggcctgaaattcttaaaggatgggagtgtcgatgacagcaccttggcatcgttgtgcctaacctgggagacggaagaagcacgccatgggaagtgtttacacttggggacaagtgctaagtattgtggagcccatagccccttgagatagatggctactttgcctttcttcttgaactgtcttgcagaatgtggatttggggtaagtggtcttgaaggattcatttagtcaccctcaaattaagatttttacttcatctttcttgggcctgcacctccaagataacaaagaagaagcaatggtcgtgccaaagaggtccacaaccaggtgtgcactgttcactgcagcccatttgctgtatgaactgtggttgttgtgtgcccaatgacaaggctactaagaaattcatcatttgaaacgtagaggccgcagcagtcagcgatgtttctgaaatgagcatccttgacgcctgtgtacttcccaggctggatgtgaagctacattaccatgtgagttgtgccattcacagcacagtggtgaggaattgagctcatgaagcaggcaaggaccgaacacctccaccccaacgtagacctgcaggtgctgccccatgacctccaccaaagcccatataaggagcggagttgttaaggactgaagaaaaacttctctggagaaaaataaaattgcaattctacttaaaaaaatttttttttttttttacttcataggccaggcttgaagttctgaacactttgaagtctccaattatgagagatccagtctaagcctctggcctgctaattagcaataagtgctttatttggaaggagggagtcatccactcttgagccactgcagtgaagtcacttgatctcagtctgggggaaaacacttcaatagctaaacattctagctttgatttttctgaagggaatacacttgttttcaattttggggtttttctttggggcacttgcttgactctgtatgaacttgtgatccaaggaaaaaggagaaagaacagtgttggcttttaaaatcaggatggttttatgtttgctacgaaataaggcaagaataaaaaattcttatttttatttatttatttattttttgagatagagtctggctccaagattgcaccattgtactccagcctaggcaacaagagcgaaactgtctcaaa

SEQ ID NO: 8390 - protein, 32 aa, Homo sapiens
MKQARTEHLHPNVDLQVLPHDLHQSPYKERSC

SEQ ID NO: 8391 - DNA, 2292 bp, Homo sapiens
aggcgtgagccactgcgccttggcaatttttgtatttttagtagagacggggtttcgccatggtgctcaggctggtctcgaactcctcacgtcaagtgattacccaccttggcctctcagagtgctggaattacaggtgtgagccactacacctggccgtctagctatttttaaatactagctacgtttgatcccttttttcctgttgattactctttgatttttgttgtttatttgtttttgattattttgattttttttttttccttttgattagcttgctactccagaaaaagcttcataagtttgagttggcctgtttggccaacctttgcccagagactgctgaggagtccaaggctctaatcccaagcttggagggacggtttgaagatgaggagctgcagcagattcttgatgatatccagacaaagcgcagctttcagtattaatctccaaacatcactgctgctcggagaaaccacatccccaggcataacaccaccttcccactgtctggggctgacttgcacagaaattctgttgaagacagttgagaattcctttggagaaaacagcccagcttggcgtggggttaggttgctgtttcaaataactcacaggcccaggtgacatggaatcttggagcagccttgtgcagtggcagccagtggcttcctgaacgtgcctctgcgaagtgtgagatgaggggtcacataaccacactgttgactacctcattcctggtttttggcctccacatcatcttttttcttaatatttcatgttttaatttcagggtgtttatactttttgaaactagaccagaagatagtagactttatagagaaagaccagttttacctagatactaaaggaagaattaaaccgctgttagtttgaaatgctttttttttttttttttaaatggagatagggtcttaactcttgtccaggctggaggagtgcagtcgtacagtcatggctcactgaagtcttgaccccgctgcctcagcctcccaaataactggggccacaggtgtgcaccacaactctcagctaatttttaaaattttttatagaggtggggttttactatgctgtccagactggtcttaaactcctgggctcaagtgatccccctgccttggcctcccaaactggtgagattacaggcatgagccaccacaactggcctgaaattcttaaaggatgggagtgtcgatgacagcaccttggcatcgttgtgcctaacctgggagacggaagaagcacgccatgggaagtgtttacacttggggacaagtgctaagtattgtggagcccatagccccttgagatagatggctactttgcctttcttcttgaactgtcttgcagaatgtggatttggggtaagtggtcttgaaggattcatttagtcaccctcaaattaagatttttacttcatctttcttgggcctgcacctccaagataacaaagaagaagcaatggtcgtgccaaagaggtccacaaccaggtgtgcactgttcactgcagcccatttgctgtatgaactgtggttgttgtgtgcccaatgacaaggctactaagaaattcatcatttgaaacgtagaggccgcagcagtcagcgatgtttctgaaatgagcatccttgacgcctgtgtacttcccaggctggatgtgaagctacattaccatgtgagttgtgccattcacagcacagtggtgaggaattgagctcatgaagcaggcaaggaccgaacacctccaccccaacgtagacctgcaggtgctgccccatgacctccaccaaagcccatataaggagcggagttgttaaggactgaagaaaaacttctctggagaaaaataaaattgcaattctacttaaaaaaatttttttttttttttacttcataggccaggcttgaagttctgaacactttgaagtctccaattatgagagatccagtctaagcctctggcctgctaattagcaataagtgctttatttggaaggagggagtcatccactcttgagccactgcagtgaagtcacttgatctcagtctgggggaaaacacttcaatagctaaacattctagctttgatttttctgaagggaatacacttgttttcaattttggggtttttctttggggcacttgcttgactctgtatgaacttgtgatccaaggaaaaaggagaaagaacagtgttggcttttaaaatcaggatggttttatgtttgctacgaaataaggcaagaataaaaaattcttattttt

SEQ ID NO: 8392 - protein, 79 aa, Homo sapiens; identical to SEQ ID NO: 8372

SEQ ID NO: 8393 - DNA, 2421 bp, Homo sapiens
cgcgtggtcgccgcaggcctggcgttatgcgcgcttcgcccaaggccctgcctcagcggcggcttgggcaagccccagcgcggcgtggggctggggagggaacatggccttgggagggaccatggccttgggagggaccgcctgggcaactgggttattttatgtgataaactgcgaagttccggggacctgtgtcaaagataaacaaagccggacactcaggtgagtttgaaacagctgagacacttctaaattcagaagttcatatgcttctggaacatcgaaagcagcagaatgagagtgcagaggacgaacaggagctctcagaagtcttcatgaaaacattaaactacacagcccgtttcagtcgtttcaaaaacagagagaccattgccagtgttcgtagcttgctactccagaaaaagcttcataagtttgagttggcctgtttggccaacctttgcccagagactgctgaggagtccaaggctctaatcccaagcttggagggacggtttgaagatgaggagctgcagcagattcttgatgatatccagacaaagcgcagctttcagtattaatctccaaacatcactgctgctcggagaaaccacatccccaggcataacaccaccttcccactgtctggggctgacttgcacagaaattctgttgaagacagttgagaattcctttggagaaaacagcccagcttggcgtggggttaggttgctgtttcaaataactcacaggcccaggtgacatggaatcttggagcagccttgtgcagtggcagccagtggcttcctgaacgtgcctctgcgaagtgtgagatgaggggtcacataaccacactgttgactacctcattcctggtttttggcctccacatcatcttttttcttaatatttcatgttttaatttcagggtgtttatactttttgaaactagaccagaagatagtagactttatagagaaagaccagttttacctagatactaaaggaagaattaaaccgctgttagtttgaaatgctttttttttttttttttaaatggagatagggtcttaactcttgtccaggctggaggagtgcagtcgtacagtcatggctcactgaagtcttgaccccgctgcctcagcctcccaaataactggggccacaggtgtgcaccacaactctcagctaatttttaaaattttttatagaggtggggttttactatgctgtccagactggtcttaaactcctgggctcaagtgatccccctgccttggcctcccaaactggtgagattacaggcatgagccaccacaactggcctgaaattcttaaaggatgggagtgtcgatgacagcaccttggcatcgttgtgcctaacctgggagacggaagaagcacgccatgggaagtgtttacacttggggacaagtgctaagtattgtggagcccatagccccttgagatagatggctactttgcctttcttcttgaactgtcttgcagaatgtggatttggggtaagtggtcttgaaggattcatttagtcaccctcaaattaagatttttacttcatctttcttgggcctgcacctccaagataacaaagaagaagcaatggtcgtgccaaagaggtccacaaccaggtgtgcactgttcactgcagcccatttgctgtatgaactgtggttgttgtgtgcccaatgacaaggctactaagaaattcatcatttgaaacgtagaggccgcagcagtcagcgatgtttctgaaatgagcatccttgacgcctgtgtacttcccaggctggatgtgaagctacattaccatgtgagttgtgccattcacagcacagtggtgaggaattgagctcatgaagcaggcaaggaccgaacacctccaccccaacgtagacctgcaggtgctgccccatgacctccaccaaagcccatataaggagcggagttgttaaggactgaagaaaaacttctctggagaaaaataaaattgcaattctacttaaaaaaatttttttttttttttacttcataggccaggcttgaagttctgaacactttgaagtctccaattatgagagatccagtctaagcctctggcctgctaattagcaataagtgctttatttggaaggagggagtcatccactcttgagccactgcagtgaagtcacttgatctcagtctgggggaaaacacttcaatagctaaacattctagctttgatttttctgaagggaatacacttgttttcaattttggggtttttctttggggcacttgcttgactctgtatgaacttgtgatccaaggaaaaaggagaaagaacagtgttggcttttaaaatcaggatggttttatgtttgctacgaaataaggcaagaataaaaaattcttattttt

SEQ ID NO: 8394 - protein, 104 aa, Homo sapiens; identical to SEQ ID NO: 8376

SEQ ID NO: 8395 - DNA, 2011 bp, Homo sapiens
cgcgcggcgcggcgcggcgatggcggcgggtggcagcgatccgcgggctggcgacgtagaggaggacgcctcacagctcatctttcctaaagcttggagggacggtttgaagatgaggagctgcagcagattcttgatgatatccagacaaagcgcagctttcagtattaatctccaaacatcactgctgctcggagaaaccacatccccaggcataacaccaccttcccactgtctggggctgacttgcacagaaattctgttgaagacagttgagaattcctttggagaaaacagcccagcttggcgtggggttaggttgctgtttcaaataactcacaggcccaggtgacatggaatcttggagcagccttgtgcagtggcagccagtggcttcctgaacgtgcctctgcgaagtgtgagatgaggggtcacataaccacactgttgactacctcattcctggtttttggcctccacatcatcttttttcttaatatttcatgttttaatttcagggtgtttatactttttgaaactagaccagaagatagtagactttatagagaaagaccagttttacctagatactaaaggaagaattaaaccgctgttagtttgaaatgctttttttttttttttttaaatggagatagggtcttaactcttgtccaggctggaggagtgcagtcgtacagtcatggctcactgaagtcttgaccccgctgcctcagcctcccaaataactggggccacaggtgtgcaccacaactctcagctaatttttaaaattttttatagaggtggggttttactatgctgtccagactggtcttaaactcctgggctcaagtgatccccctgccttggcctcccaaactggtgagattacaggcatgagccaccacaactggcctgaaattcttaaaggatgggagtgtcgatgacagcaccttggcatcgttgtgcctaacctgggagacggaagaagcacgccatgggaagtgtttacacttggggacaagtgctaagtattgtggagcccatagccccttgagatagatggctactttgcctttcttcttgaactgtcttgcagaatgtggatttggggtaagtggtcttgaaggattcatttagtcaccctcaaattaagatttttacttcatctttcttgggcctgcacctccaagataacaaagaagaagcaatggtcgtgccaaagaggtccacaaccaggtgtgcactgttcactgcagcccatttgctgtatgaactgtggttgttgtgtgcccaatgacaaggctactaagaaattcatcatttgaaacgtagaggccgcagcagtcagcgatgtttctgaaatgagcatccttgacgcctgtgtacttcccaggctggatgtgaagctacattaccatgtgagttgtgccattcacagcacagtggtgaggaattgagctcatgaagcaggcaaggaccgaacacctccaccccaacgtagacctgcaggtgctgccccatgacctccaccaaagcccatataaggagcggagttgttaaggactgaagaaaaacttctctggagaaaaataaaattgcaattctacttaaaaaaatttttttttttttttacttcataggccaggcttgaagttctgaacactttgaagtctccaattatgagagatccagtctaagcctctggcctgctaattagcaataagtgctttatttggaaggagggagtcatccactcttgagccactgcagtgaagtcacttgatctcagtctgggggaaaacacttcaatagctaaacattctagctttgatttttctgaagggaatacacttgttttcaattttggggtttttctttggggcacttgcttgactctgtatgaacttgtgatccaaggaaaaaggagaaagaacagtgttggcttttaaaatcaggatggttttatgtttgctacgaaataaggcaagaataaaaaattcttattttt

SEQ ID NO: 8396 - protein, 110 aa, Homo sapiens; identical to SEQ ID NO: 8378

SEQ ID NO: 8397 - DNA, 2109 bp, Homo sapiens
ggcgcgcggcgcggcgcggcgatggcggcgggtggcagcgatccgcgggctggcgacgtagaggaggacgcctcacagctcatctttcctaaagcttgctactccagaaaaagcttcataagtttgagttggcctgtttggccaacctttgcccagagactgctgaggagtccaaggctctaatcccaagcttggagggacggtttgaagatgaggagctgcagcagattcttgatgatatccagacaaagcgcagctttcagtattaatctccaaacatcactgctgctcggagaaaccacatccccaggcataacaccaccttcccactgtctggggctgacttgcacagaaattctgttgaagacagttgagaattcctttggagaaaacagcccagcttggcgtggggttaggttgctgtttcaaataactcacaggcccaggtgacatggaatcttggagcagccttgtgcagtggcagccagtggcttcctgaacgtgcctctgcgaagtgtgagatgaggggtcacataaccacactgttgactacctcattcctggtttttggcctccacatcatcttttttcttaatatttcatgttttaatttcagggtgtttatactttttgaaactagaccagaagatagtagactttatagagaaagaccagttttacctagatactaaaggaagaattaaaccgctgttagtttgaaatgctttttttttttttttttaaatggagatagggtcttaactcttgtccaggctggaggagtgcagtcgtacagtcatggctcactgaagtcttgaccccgctgcctcagcctcccaaataactggggccacaggtgtgcaccacaactctcagctaatttttaaaattttttatagaggtggggttttactatgctgtccagactggtcttaaactcctgggctcaagtgatccccctgccttggcctcccaaactggtgagattacaggcatgagccaccacaactggcctgaaattcttaaaggatgggagtgtcgatgacagcaccttggcatcgttgtgcctaacctgggagacggaagaagcacgccatgggaagtgtttacacttggggacaagtgctaagtattgtggagcccatagccccttgagatagatggctactttgcctttcttcttgaactgtcttgcagaatgtggatttggggtaagtggtcttgaaggattcatttagtcaccctcaaattaagatttttacttcatctttcttgggcctgcacctccaagataacaaagaagaagcaatggtcgtgccaaagaggtccacaaccaggtgtgcactgttcactgcagcccatttgctgtatgaactgtggttgttgtgtgcccaatgacaaggctactaagaaattcatcatttgaaacgtagaggccgcagcagtcagcgatgtttctgaaatgagcatccttgacgcctgtgtacttcccaggctggatgtgaagctacattaccatgtgagttgtgccattcacagcacagtggtgaggaattgagctcatgaagcaggcaaggaccgaacacctccaccccaacgtagacctgcaggtgctgccccatgacctccaccaaagcccatataaggagcggagttgttaaggactgaagaaaaacttctctggagaaaaataaaattgcaattctacttaaaaaaatttttttttttttttacttcataggccaggcttgaagttctgaacactttgaagtctccaattatgagagatccagtctaagcctctggcctgctaattagcaataagtgctttatttggaaggagggagtcatccactcttgagccactgcagtgaagtcacttgatctcagtctgggggaaaacacttcaatagctaaacattctagctttgatttttctgaagggaatacacttgttttcaattttggggtttttctttggggcacttgcttgactctgtatgaacttgtgatccaaggaaaaaggagaaagaacagtgttggcttttaaaatcaggatggttttatgtttgctacgaaataaggcaagaataaaaaattcttattttt

SEQ ID NO: 8398 - protein, 53 aa, Homo sapiens; identical to SEQ ID NO: 8380

SEQ ID NO: 8399 - DNA, 2200 bp, Homo sapiens
ggtggtggcgcgcggcgcggcgcggcgatggcggcgggtggcagcgatccgcgggctggcgacgtagaggaggacgcctcacagctcatctttcctaaagagtttgaaacagctgagacacttctaaattcagaagttcatatgcttctggaacatcgaaagcagcagaatgagagtgcagaggacgaacaggagctctcagaagtcttcatgaaaacattaaactacacagcccgtttcagtcgtttcaaaaacagagagaccattgccagtgttcgtagcttggagggacggtttgaagatgaggagctgcagcagattcttgatgatatccagacaaagcgcagctttcagtattaatctccaaacatcactgctgctcggagaaaccacatccccaggcataacaccaccttcccactgtctggggctgacttgcacagaaattctgttgaagacagttgagaattcctttggagaaaacagcccagcttggcgtggggttaggttgctgtttcaaataactcacaggcccaggtgacatggaatcttggagcagccttgtgcagtggcagccagtggcttcctgaacgtgcctctgcgaagtgtgagatgaggggtcacataaccacactgttgactacctcattcctggtttttggcctccacatcatcttttttcttaatatttcatgttttaatttcagggtgtttatactttttgaaactagaccagaagatagtagactttatagagaaagaccagttttacctagatactaaaggaagaattaaaccgctgttagtttgaaatgctttttttttttttttttaaatggagatagggtcttaactcttgtccaggctggaggagtgcagtcgtacagtcatggctcactgaagtcttgaccccgctgcctcagcctcccaaataactggggccacaggtgtgcaccacaactctcagctaatttttaaaattttttatagaggtggggttttactatgctgtccagactggtcttaaactcctgggctcaagtgatccccctgccttggcctcccaaactggtgagattacaggcatgagccaccacaactggcctgaaattcttaaaggatgggagtgtcgatgacagcaccttggcatcgttgtgcctaacctgggagacggaagaagcacgccatgggaagtgtttacacttggggacaagtgctaagtattgtggagcccatagccccttgagatagatggctactttgcctttcttcttgaactgtcttgcagaatgtggatttggggtaagtggtcttgaaggattcatttagtcaccctcaaattaagatttttacttcatctttcttgggcctgcacctccaagataacaaagaagaagcaatggtcgtgccaaagaggtccacaaccaggtgtgcactgttcactgcagcccatttgctgtatgaactgtggttgttgtgtgcccaatgacaaggctactaagaaattcatcatttgaaacgtagaggccgcagcagtcagcgatgtttctgaaatgagcatccttgacgcctgtgtacttcccaggctggatgtgaagctacattaccatgtgagttgtgccattcacagcacagtggtgaggaattgagctcatgaagcaggcaaggaccgaacacctccaccccaacgtagacctgcaggtgctgccccatgacctccaccaaagcccatataaggagcggagttgttaaggactgaagaaaaacttctctggagaaaaataaaattgcaattctacttaaaaaaatttttttttttttttacttcataggccaggcttgaagttctgaacactttgaagtctccaattatgagagatccagtctaagcctctggcctgctaattagcaataagtgctttatttggaaggagggagtcatccactcttgagccactgcagtgaagtcacttgatctcagtctgggggaaaacacttcaatagctaaacattctagctttgatttttctgaagggaatacacttgttttcaattttggggtttttctttggggcacttgcttgactctgtatgaacttgtgatccaaggaaaaaggagaaagaacagtgttggcttttaaaatcaggatggttttatgtttgctacgaaataaggcaagaataaaaaattcttattttt

SEQ ID NO: 8400 - protein, 110 aa, Homo sapiens; identical to SEQ ID NO: 8382

SEQ ID NO: 8401 - DNA, 2317 bp, Homo sapiens
gcttctgcttccggcggcgctggtggtggcgcgcggcgcggcgcggcgatggcggcgggtggcagcgatccgcgggctggcgacgtagaggaggacgcctcacagctcatctttcctaaagagtttgaaacagctgagacacttctaaattcagaagttcatatgcttctggaacatcgaaagcagcagaatgagagtgcagaggacgaacaggagctctcagaagtcttcatgaaaacattaaactacacagcccgtttcagtcgtttcaaaaacagagagaccattgccagtgttcgtagcttgctactccagaaaaagcttcataagtttgagttggcctgtttggccaacctttgcccagagactgctgaggagtccaaggctctaatcccaagcttggagggacggtttgaagatgaggagctgcagcagattcttgatgatatccagacaaagcgcagctttcagtattaatctccaaacatcactgctgctcggagaaaccacatccccaggcataacaccaccttcccactgtctggggctgacttgcacagaaattctgttgaagacagttgagaattcctttggagaaaacagcccagcttggcgtggggttaggttgctgtttcaaataactcacaggcccaggtgacatggaatcttggagcagccttgtgcagtggcagccagtggcttcctgaacgtgcctctgcgaagtgtgagatgaggggtcacataaccacactgttgactacctcattcctggtttttggcctccacatcatcttttttcttaatatttcatgttttaatttcagggtgtttatactttttgaaactagaccagaagatagtagactttatagagaaagaccagttttacctagatactaaaggaagaattaaaccgctgttagtttgaaatgctttttttttttttttttaaatggagatagggtcttaactcttgtccaggctggaggagtgcagtcgtacagtcatggctcactgaagtcttgaccccgctgcctcagcctcccaaataactggggccacaggtgtgcaccacaactctcagctaatttttaaaattttttatagaggtggggttttactatgctgtccagactggtcttaaactcctgggctcaagtgatccccctgccttggcctcccaaactggtgagattacaggcatgagccaccacaactggcctgaaattcttaaaggatgggagtgtcgatgacagcaccttggcatcgttgtgcctaacctgggagacggaagaagcacgccatgggaagtgtttacacttggggacaagtgctaagtattgtggagcccatagccccttgagatagatggctactttgcctttcttcttgaactgtcttgcagaatgtggatttggggtaagtggtcttgaaggattcatttagtcaccctcaaattaagatttttacttcatctttcttgggcctgcacctccaagataacaaagaagaagcaatggtcgtgccaaagaggtccacaaccaggtgtgcactgttcactgcagcccatttgctgtatgaactgtggttgttgtgtgcccaatgacaaggctactaagaaattcatcatttgaaacgtagaggccgcagcagtcagcgatgtttctgaaatgagcatccttgacgcctgtgtacttcccaggctggatgtgaagctacattaccatgtgagttgtgccattcacagcacagtggtgaggaattgagctcatgaagcaggcaaggaccgaacacctccaccccaacgtagacctgcaggtgctgccccatgacctccaccaaagcccatataaggagcggagttgttaaggactgaagaaaaacttctctggagaaaaataaaattgcaattctacttaaaaaaatttttttttttttttacttcataggccaggcttgaagttctgaacactttgaagtctccaattatgagagatccagtctaagcctctggcctgctaattagcaataagtgctttatttggaaggagggagtcatccactcttgagccactgcagtgaagtcacttgatctcagtctgggggaaaacacttcaatagctaaacattctagctttgatttttctgaagggaatacacttgttttcaattttggggtttttctttggggcacttgcttgactctgtatgaacttgtgatccaaggaaaaaggagaaagaacagtgttggcttttaaaatcaggatggttttatgtttgctacgaaataaggcaagaataaaaaattcttattttt

SEQ ID NO: 8402 - protein, 142 aa, Homo sapiens; identical to SEQ ID NO: 618

SEQ ID NO: 8403 - DNA, 1893 bp, Homo sapiens
aggcgtgagccactgcgccttggcaatttttgtatttttagtagagacggggtttcgccatggtgctcaggctggtctcgaactcctcacgtcaagtgattacccaccttggcctctcagagtgctggaattacaggtgtgagccactacacctggccgtctagctatttttaaatactagctacgtttgatcccttttttcctgttgattactctttgatttttgttgtttatttgtttttgattattttgattttttttttttccttttgattagcttgctactccagaaaaagcttcataagtttgagttggcctgtttggccaacctttgcccagagactgctgaggagtccaaggctctaatcccaagcttggagggacggtttgaagatgaggagctgcagcagattcttgatgatatccagacaaagcgcagctttcagtattaatctccaaacatcactgctgctcggagaaaccacatccccaggcataacaccaccttcccactgtctggggctgacttgcacagaaattctgttgaagacagttgagaattcctttggagaaaacagcccagcttggcgtggggttaggttgctgtttcaaataactcacaggcccaggtgacatggaatcttggagcagccttgtgcagtggcagccagtggcttcctgaacgtgcctctgcgaagtgtgagatgaggggtcacataaccacactgttgactacctcattcctggtttttggcctccacatcatcttttttcttaatatttcatgttttaatttcagggtgtttatactttttgaaactagaccagaagatagtagactttatagagaaagaccagttttacctagatactaaaggaagaattaaaccgctgttagtttgaaatgctttttttttttttttttaaatggagatagggtcttaactcttgtccaggctggaggagtgcagtcgtacagtcatggctcactgaagtcttgaccccgctgcctcagcctcccaaataactggggccacaggtgtgcaccacaactctcagctaatttttaaaattttttatagaggtggggttttactatgctgtccagactggtcttaaactcctgggctcaagtgatccccctgccttggcctcccaaactggtgagattacaggcatgagccaccacaactggcctgaaattcttaaaggatgggagtgtcgatgacagcaccttggcatcgttgtgcctaacctgggagacggaagaagcacgccatgggaagtgtttacacttggggacaagtgctaagtattgtggagcccatagccccttgagatagatggctactttgcctttcttcttgaactgtcttgcagaatgtggatttggggtaagtggtcttgaaggattcatttagtcaccctcaaattaagatttttacttcatctttcttgggcctgcacctccaagataacaaagaagaagcaatggtcgtgccaaagaggtccacaaccaggtgtgcactgttcactgcagcccatttgctgtatgaactgtggttgttgtgtgcccaatgacaaggctactaagaaattcatcatttgaaacgtagaggccgcagcagtcagcgatgtttctgaaatgagcatccttgacgcctgtgtacttcccaggctggatgtgaagctacattaccatgtgagttgtgccattcacagcacagtggtgaggaattgagctcatgaagcaggcaaggaccgaacacctccaccccaacgtagacctgcaggtgctgccccatgacctccaccaaagcccatataaggagcggagttgttaaggactgaagaaaaacttctctggagaaaaataaaattgcaattctactt

SEQ ID NO: 8404 - protein, 79 aa, Homo sapiens; identical to SEQ ID NO: 8372

SEQ ID NO: 8405 - DNA, 2022 bp, Homo sapiens
cgcgtggtcgccgcaggcctggcgttatgcgcgcttcgcccaaggccctgcctcagcggcggcttgggcaagccccagcgcggcgtggggctggggagggaacatggccttgggagggaccatggccttgggagggaccgcctgggcaactgggttattttatgtgataaactgcgaagttccggggacctgtgtcaaagataaacaaagccggacactcaggtgagtttgaaacagctgagacacttctaaattcagaagttcatatgcttctggaacatcgaaagcagcagaatgagagtgcagaggacgaacaggagctctcagaagtcttcatgaaaacattaaactacacagcccgtttcagtcgtttcaaaaacagagagaccattgccagtgttcgtagcttgctactccagaaaaagcttcataagtttgagttggcctgtttggccaacctttgcccagagactgctgaggagtccaaggctctaatcccaagcttggagggacggtttgaagatgaggagctgcagcagattcttgatgatatccagacaaagcgcagctttcagtattaatctccaaacatcactgctgctcggagaaaccacatccccaggcataacaccaccttcccactgtctggggctgacttgcacagaaattctgttgaagacagttgagaattcctttggagaaaacagcccagcttggcgtggggttaggttgctgtttcaaataactcacaggcccaggtgacatggaatcttggagcagccttgtgcagtggcagccagtggcttcctgaacgtgcctctgcgaagtgtgagatgaggggtcacataaccacactgttgactacctcattcctggtttttggcctccacatcatcttttttcttaatatttcatgttttaatttcagggtgtttatactttttgaaactagaccagaagatagtagactttatagagaaagaccagttttacctagatactaaaggaagaattaaaccgctgttagtttgaaatgctttttttttttttttttaaatggagatagggtcttaactcttgtccaggctggaggagtgcagtcgtacagtcatggctcactgaagtcttgaccccgctgcctcagcctcccaaataactggggccacaggtgtgcaccacaactctcagctaatttttaaaattttttatagaggtggggttttactatgctgtccagactggtcttaaactcctgggctcaagtgatccccctgccttggcctcccaaactggtgagattacaggcatgagccaccacaactggcctgaaattcttaaaggatgggagtgtcgatgacagcaccttggcatcgttgtgcctaacctgggagacggaagaagcacgccatgggaagtgtttacacttggggacaagtgctaagtattgtggagcccatagccccttgagatagatggctactttgcctttcttcttgaactgtcttgcagaatgtggatttggggtaagtggtcttgaaggattcatttagtcaccctcaaattaagatttttacttcatctttcttgggcctgcacctccaagataacaaagaagaagcaatggtcgtgccaaagaggtccacaaccaggtgtgcactgttcactgcagcccatttgctgtatgaactgtggttgttgtgtgcccaatgacaaggctactaagaaattcatcatttgaaacgtagaggccgcagcagtcagcgatgtttctgaaatgagcatccttgacgcctgtgtacttcccaggctggatgtgaagctacattaccatgtgagttgtgccattcacagcacagtggtgaggaattgagctcatgaagcaggcaaggaccgaacacctccaccccaacgtagacctgcaggtgctgccccatgacctccaccaaagcccatataaggagcggagttgttaaggactgaagaaaaacttctctggagaaaaataaaattgcaattctactt

SEQ ID NO: 8406 - protein, 104 aa, Homo sapiens; identical to SEQ ID NO: 8376

SEQ ID NO: 8407 - DNA, 1612 bp, Homo sapiens
cgcgcggcgcggcgcggcgatggcggcgggtggcagcgatccgcgggctggcgacgtagaggaggacgcctcacagctcatctttcctaaagcttggagggacggtttgaagatgaggagctgcagcagattcttgatgatatccagacaaagcgcagctttcagtattaatctccaaacatcactgctgctcggagaaaccacatccccaggcataacaccaccttcccactgtctggggctgacttgcacagaaattctgttgaagacagttgagaattcctttggagaaaacagcccagcttggcgtggggttaggttgctgtttcaaataactcacaggcccaggtgacatggaatcttggagcagccttgtgcagtggcagccagtggcttcctgaacgtgcctctgcgaagtgtgagatgaggggtcacataaccacactgttgactacctcattcctggtttttggcctccacatcatcttttttcttaatatttcatgttttaatttcagggtgtttatactttttgaaactagaccagaagatagtagactttatagagaaagaccagttttacctagatactaaaggaagaattaaaccgctgttagtttgaaatgctttttttttttttttttaaatggagatagggtcttaactcttgtccaggctggaggagtgcagtcgtacagtcatggctcactgaagtcttgaccccgctgcctcagcctcccaaataactggggccacaggtgtgcaccacaactctcagctaatttttaaaattttttatagaggtggggttttactatgctgtccagactggtcttaaactcctgggctcaagtgatccccctgccttggcctcccaaactggtgagattacaggcatgagccaccacaactggcctgaaattcttaaaggatgggagtgtcgatgacagcaccttggcatcgttgtgcctaacctgggagacggaagaagcacgccatgggaagtgtttacacttggggacaagtgctaagtattgtggagcccatagccccttgagatagatggctactttgcctttcttcttgaactgtcttgcagaatgtggatttggggtaagtggtcttgaaggattcatttagtcaccctcaaattaagatttttacttcatctttcttgggcctgcacctccaagataacaaagaagaagcaatggtcgtgccaaagaggtccacaaccaggtgtgcactgttcactgcagcccatttgctgtatgaactgtggttgttgtgtgcccaatgacaaggctactaagaaattcatcatttgaaacgtagaggccgcagcagtcagcgatgtttctgaaatgagcatccttgacgcctgtgtacttcccaggctggatgtgaagctacattaccatgtgagttgtgccattcacagcacagtggtgaggaattgagctcatgaagcaggcaaggaccgaacacctccaccccaacgtagacctgcaggtgctgccccatgacctccaccaaagcccatataaggagcggagttgttaaggactgaagaaaaacttctctggagaaaaataaaattgcaattctactt

SEQ ID NO: 8408 - protein, 110 aa, Homo sapiens; identical to SEQ ID NO: 8378

SEQ ID NO: 8409 - DNA, 1710 bp, Homo sapiens
ggcgcgcggcgcggcgcggcgatggcggcgggtggcagcgatccgcgggctggcgacgtagaggaggacgcctcacagctcatctttcctaaagcttgctactccagaaaaagcttcataagtttgagttggcctgtttggccaacctttgcccagagactgctgaggagtccaaggctctaatcccaagcttggagggacggtttgaagatgaggagctgcagcagattcttgatgatatccagacaaagcgcagctttcagtattaatctccaaacatcactgctgctcggagaaaccacatccccaggcataacaccaccttcccactgtctggggctgacttgcacagaaattctgttgaagacagttgagaattcctttggagaaaacagcccagcttggcgtggggttaggttgctgtttcaaataactcacaggcccaggtgacatggaatcttggagcagccttgtgcagtggcagccagtggcttcctgaacgtgcctctgcgaagtgtgagatgaggggtcacataaccacactgttgactacctcattcctggtttttggcctccacatcatcttttttcttaatatttcatgttttaatttcagggtgtttatactttttgaaactagaccagaagatagtagactttatagagaaagaccagttttacctagatactaaaggaagaattaaaccgctgttagtttgaaatgctttttttttttttttttaaatggagatagggtcttaactcttgtccaggctggaggagtgcagtcgtacagtcatggctcactgaagtcttgaccccgctgcctcagcctcccaaataactggggccacaggtgtgcaccacaactctcagctaatttttaaaattttttatagaggtggggttttactatgctgtccagactggtcttaaactcctgggctcaagtgatccccctgccttggcctcccaaactggtgagattacaggcatgagccaccacaactggcctgaaattcttaaaggatgggagtgtcgatgacagcaccttggcatcgttgtgcctaacctgggagacggaagaagcacgccatgggaagtgtttacacttggggacaagtgctaagtattgtggagcccatagccccttgagatagatggctactttgcctttcttcttgaactgtcttgcagaatgtggatttggggtaagtggtcttgaaggattcatttagtcaccctcaaattaagatttttacttcatctttcttgggcctgcacctccaagataacaaagaagaagcaatggtcgtgccaaagaggtccacaaccaggtgtgcactgttcactgcagcccatttgctgtatgaactgtggttgttgtgtgcccaatgacaaggctactaagaaattcatcatttgaaacgtagaggccgcagcagtcagcgatgtttctgaaatgagcatccttgacgcctgtgtacttcccaggctggatgtgaagctacattaccatgtgagttgtgccattcacagcacagtggtgaggaattgagctcatgaagcaggcaaggaccgaacacctccaccccaacgtagacctgcaggtgctgccccatgacctccaccaaagcccatataaggagcggagttgttaaggactgaagaaaaacttctctggagaaaaataaaattgcaattctactt

SEQ ID NO: 8410 - protein, 53 aa, Homo sapiens; identical to SEQ ID NO: 8380

SEQ ID NO: 8411 - DNA, 1801 bp, Homo sapiens
ggtggtggcgcgcggcgcggcgcggcgatggcggcgggtggcagcgatccgcgggctggcgacgtagaggaggacgcctcacagctcatctttcctaaagagtttgaaacagctgagacacttctaaattcagaagttcatatgcttctggaacatcgaaagcagcagaatgagagtgcagaggacgaacaggagctctcagaagtcttcatgaaaacattaaactacacagcccgtttcagtcgtttcaaaaacagagagaccattgccagtgttcgtagcttggagggacggtttgaagatgaggagctgcagcagattcttgatgatatccagacaaagcgcagctttcagtattaatctccaaacatcactgctgctcggagaaaccacatccccaggcataacaccaccttcccactgtctggggctgacttgcacagaaattctgttgaagacagttgagaattcctttggagaaaacagcccagcttggcgtggggttaggttgctgtttcaaataactcacaggcccaggtgacatggaatcttggagcagccttgtgcagtggcagccagtggcttcctgaacgtgcctctgcgaagtgtgagatgaggggtcacataaccacactgttgactacctcattcctggtttttggcctccacatcatcttttttcttaatatttcatgttttaatttcagggtgtttatactttttgaaactagaccagaagatagtagactttatagagaaagaccagttttacctagatactaaaggaagaattaaaccgctgttagtttgaaatgctttttttttttttttttaaatggagatagggtcttaactcttgtccaggctggaggagtgcagtcgtacagtcatggctcactgaagtcttgaccccgctgcctcagcctcccaaataactggggccacaggtgtgcaccacaactctcagctaatttttaaaattttttatagaggtggggttttactatgctgtccagactggtcttaaactcctgggctcaagtgatccccctgccttggcctcccaaactggtgagattacaggcatgagccaccacaactggcctgaaattcttaaaggatgggagtgtcgatgacagcaccttggcatcgttgtgcctaacctgggagacggaagaagcacgccatgggaagtgtttacacttggggacaagtgctaagtattgtggagcccatagccccttgagatagatggctactttgcctttcttcttgaactgtcttgcagaatgtggatttggggtaagtggtcttgaaggattcatttagtcaccctcaaattaagatttttacttcatctttcttgggcctgcacctccaagataacaaagaagaagcaatggtcgtgccaaagaggtccacaaccaggtgtgcactgttcactgcagcccatttgctgtatgaactgtggttgttgtgtgcccaatgacaaggctactaagaaattcatcatttgaaacgtagaggccgcagcagtcagcgatgtttctgaaatgagcatccttgacgcctgtgtacttcccaggctggatgtgaagctacattaccatgtgagttgtgccattcacagcacagtggtgaggaattgagctcatgaagcaggcaaggaccgaacacctccaccccaacgtagacctgcaggtgctgccccatgacctccaccaaagcccatataaggagcggagttgttaaggactgaagaaaaacttctctggagaaaaataaaattgcaattctactt

SEQ ID NO: 8412 - protein, 110 aa, Homo sapiens; identical to SEQ ID NO: 8382

SEQ ID NO: 8413 - DNA, 1918 bp, Homo sapiens
gcttctgcttccggcggcgctggtggtggcgcgcggcgcggcgcggcgatggcggcgggtggcagcgatccgcgggctggcgacgtagaggaggacgcctcacagctcatctttcctaaagagtttgaaacagctgagacacttctaaattcagaagttcatatgcttctggaacatcgaaagcagcagaatgagagtgcagaggacgaacaggagctctcagaagtcttcatgaaaacattaaactacacagcccgtttcagtcgtttcaaaaacagagagaccattgccagtgttcgtagcttgctactccagaaaaagcttcataagtttgagttggcctgtttggccaacctttgcccagagactgctgaggagtccaaggctctaatcccaagcttggagggacggtttgaagatgaggagctgcagcagattcttgatgatatccagacaaagcgcagctttcagtattaatctccaaacatcactgctgctcggagaaaccacatccccaggcataacaccaccttcccactgtctggggctgacttgcacagaaattctgttgaagacagttgagaattcctttggagaaaacagcccagcttggcgtggggttaggttgctgtttcaaataactcacaggcccaggtgacatggaatcttggagcagccttgtgcagtggcagccagtggcttcctgaacgtgcctctgcgaagtgtgagatgaggggtcacataaccacactgttgactacctcattcctggtttttggcctccacatcatcttttttcttaatatttcatgttttaatttcagggtgtttatactttttgaaactagaccagaagatagtagactttatagagaaagaccagttttacctagatactaaaggaagaattaaaccgctgttagtttgaaatgctttttttttttttttttaaatggagatagggtcttaactcttgtccaggctggaggagtgcagtcgtacagtcatggctcactgaagtcttgaccccgctgcctcagcctcccaaataactggggccacaggtgtgcaccacaactctcagctaatttttaaaattttttatagaggtggggttttactatgctgtccagactggtcttaaactcctgggctcaagtgatccccctgccttggcctcccaaactggtgagattacaggcatgagccaccacaactggcctgaaattcttaaaggatgggagtgtcgatgacagcaccttggcatcgttgtgcctaacctgggagacggaagaagcacgccatgggaagtgtttacacttggggacaagtgctaagtattgtggagcccatagccccttgagatagatggctactttgcctttcttcttgaactgtcttgcagaatgtggatttggggtaagtggtcttgaaggattcatttagtcaccctcaaattaagatttttacttcatctttcttgggcctgcacctccaagataacaaagaagaagcaatggtcgtgccaaagaggtccacaaccaggtgtgcactgttcactgcagcccatttgctgtatgaactgtggttgttgtgtgcccaatgacaaggctactaagaaattcatcatttgaaacgtagaggccgcagcagtcagcgatgtttctgaaatgagcatccttgacgcctgtgtacttcccaggctggatgtgaagctacattaccatgtgagttgtgccattcacagcacagtggtgaggaattgagctcatgaagcaggcaaggaccgaacacctccaccccaacgtagacctgcaggtgctgccccatgacctccaccaaagcccatataaggagcggagttgttaaggactgaagaaaaacttctctggagaaaaataaaattgcaattctactt

SEQ ID NO: 8414 - protein, 142 aa, Homo sapiens; identical to SEQ ID NO: 618

SEQ ID NO: 8415 - DNA, 759 bp, Homo sapiens
gctggtggtggcgcgcggcgcggcgcggcgatggcggcgggtggcagcgatccgcgggctggcgacgtagaggaggacgcctcacagctcatctttcctaaagagtttgaaacagctgagacacttctaaattcagaagttcatatgcttctggaacatcgaaagcagcagaatgagagtgcagaggacgaacaggagctctcagaagtcttcatgaaaacattaaactacacagcccgtttcagtcgtttcaaaaacagagagaccattgccagtgttcgtagagacaaggtctcactgtgttgcccaggctgaagacgtcttgaactcctggactcaagtgatcctcctgccttggcctcccaaagtgctaggattacaggcatgagctgctaagcctggcctcttctaccttttttttgttttgtttcgttttgttttgagacagtctcacttcatcacccagattggagtgtagtggtgcggtcttggctcactgcaacctccacctcccaggttaaagcagttctcatgcctcagccttccaaatagctgggactacagacacacaccaccacacccggctaatttttttagttttttgtttttttggttttgtttgtttgtttgtttgtctgttttgagacggagtctagttctgtcacccaggctggagtgcagtggcgtgatcttggctcactgcagcctccgcctcccgggttcaagcaattctcctgcctcagcctcccgagtagctgg

SEQ ID NO: 8416 - protein, 94 aa, Homo sapiens
MAAGGSDPRAGDVEEDASQLIFPKEFETAETLLNSEVHMLLEHRKQQNESAEDEQELSEVFMKTLNYTARFSRFKNRETIASVRRDKVSLCCPG

SEQ ID NO: 8417 - DNA, 4650 bp, Homo sapiens
gttggtgaagagatcaggaagagatttcttcgagactaaggatggatgacccttagcaacagtgaccgtctcctcccggcatagcaagatggcctgccctcaggtacaggaagaaggaatggaatcggaaggaagaaaattcattccagagacaaaatagctcccctcctctgttgtagctgttcctctggcaatacaaactttctgctttcaggttctgcagcattccagaccttgagcactgaatcaggatgggaaaaagacgttgtgttcctccactcgagcccaagttggcagcaggctgttgtggggtcaagaagcccaaattatctggaagtggaacgcacagtcacgggaatcagtccacaactgtccccggctctagttcaggacctcttcaaaaccaccagcatgtggacagcagcagtggacgggagaatgtgtcagacttaactctgggacctggaaactctcccatcacacgaatgaatcccgcatcgggagcgctgagccctcttccccggcctaatggaactgccaacaccactaagaatctggtggtgactgcagagatgtgctgctactgcttcgacgtactctactgtcacctctatggcttcccacagccacgacttcctagattcaccaatgacccctatccgctctttgtgacgtggaagacagggcgggacaagcggcttcgtggctgcattgggaccttctcagccatgaatcttcattcaggactcagggaatacacgttaaccagtgcacttaaggacagccgatttccccccctgacccgagaggagctgcctaaacttttctgctctgtctccctccttactaactttgaggatgccagtgattacctggactgggaggtaggggtccatgggattcgaattgaattcattaatgaaaaaggtgtcaaacgcacagccacatatttacctgaggttgctaaggaacaagactgggatcagatccagacaatagactccttgctcaggaaaggtggctttaaagctccaattaccagtgaattcagaaaaacgatcaaactcaccaggtaccgaagtgagaaggtgacaatcagttacgcagagtatattgcttcccgacagcactgtttccagaacggcactcttcatgccccgcccctctacaatcattactcctgacacacggctgcatgaccagtcccacccccccgtggccaccaatggctatgacatcattggagcagatgcctcctcttcctggtccagttacttctattactgcaccattttatgatgctagcttccgttgccaagtctgcctcccgctgactgagggagggtagggttaccttgaacgaaacagaacttgaggggcccaagccttatctcagcctttcctcaatatggggttccgttggattggggctcctccatgactagtgggaattactgtgggttcagaagacccttgtctggtatttgccacatggggtattggccacacgctggaagctgaaattgatgatccctgaaggttgaacccacacacacccctgcagcctccccagatgaagtaggtgtattcccctggcagtctgggcaacggagaccaagaaacatttttaggttgttttaaattcctttttttaaacttccagtttattgcgtaccaagagttgattacaacctccatgcttcataagcggacgccacgttagggttggacgtgggcaccacgagtcctttgaggctcctggacagagacccacatcaagatcggaagccctttgggtggcgttgcagatctcattgctcagtaggccgtgaagattttcatcctcatcccactctcagttggattttctggcactcttcctgcattgagtctcctgattactgaacagagctccgtcatgtagcctgctgaggaatggaatggaatggagatgcccacaggaggtcctgatgtcatcactgcacgcaggtgtgagaggagagacctcttctgcaccgcctggctacctcactcctctgctggtagcagtgcctatagctggacctaagttctcagaagcgtagatgtgcaaacaagcgattgagttgggctttaggaggacacatcataggagagaatccagggtctgtaagctggttttcttttcaggtgacatcctgaggggcctgtaagcaggggagctcctttttctagtttgcctgtagaggtgggaagactgttggtgtttctgtcctttacaggacattaggaaacagttgtgtaattacacaaggtggacctttatcttgcctgacatgctgggaatcttcaccccaccagggcaaatttccaaatagctcattttattctaggtctttcaaactttcatgtgacatatttccctttcccattgttgctgatttccaaatcgctgtcagcaattttttcctctctccttgcctattcttcactcatttggtggcaaagttcatagaactaggggacttggaagatgctttgaaaatattgttacaaaggcactgctaaaatgattcacagggagagtggccagttggaagaaggatcctaaggatgtgacactggttttcaacaacatgcttagagaactcatgaagtggattgggtgtcaacccagtgaacatgtttttatttaatttattttttgaagtttatgtggtgatggtgtggctttccgaaatgggcaaatattcagaagatcttttgcattttcttctgtcaggaatggggaaggggagtgggggcacaatctgagaaaggacacctgtgctgttctaggcatcgctggcaagtttgtgggaagggatgggcaagggtgagtgggtttgctccacaccgtcctgtgctgctcgagaggacctgggacgtgcgagggaaacgtgggtgacggtgcctaggctgcggcccttcactgctgtgctgggttcctgcagcctgctacgtttcccttggcaatgtaaatgaagatggaggggtcgtttcgtgatttcctgctgctgagaataaatgtcttgttaaaaacgtggcaacggttactcttaggtgccatggatcgatgtcagggtggtcagctctggactaagccacccacctccaatttgtacaacagtattgatacatagggctacactcattactgttcaagtgttctatgttaagagttgtgtttaatttctaaagattaaaaaaagcaaaaaaattggtgctaaaccttcacccctgagcacgctcagtgagactggtcatgcaagcatttacagtgccatgctcctcaagccgattttttcttgtagaaatgttgccctatttgtcttctccaatgtatggtatgttattttattttattattttattttattttattttattttatcgagggggggtacgatacctgccatttaagaaaatgaatagaaaattttaaaacccgagaaatggggaaaaaaaaatcagtgcacaagaattgggctggttaggcccagcaccacactgaagtgggctcagtggtttttggagtgaagaagccttactccctgcacattccctcatgctcccacacaagtccagcaatggaaatgcttgggttcctcttgctttgtcaggggactcaggagtcgaccaagggaaaccatttggccccgtgaggaatgggcattgtcagtatccgtcctgaacggggcctagtcaggaagcggtctagaagtgtacggtcacggtcgcctcatgaaagtgtgtagcaggtggctctcaggaaaaataccaagtctggatcatccatgtggcagctttgcatagggagaggatagctccgaactggaactgaactgccttctctgcacgcttgaccaaagcagtgatgagggcggccagtacctgcggtgtgcgtggtaggtttaaagaaaagggaatgttttctgctgagtgtttcctttgtccttgggctgctcgagctggacagtaggtaaccactgttttcaaggaccagcccaatttctctggcttggttcggagttcgtttcatccctagctgtgagtgccttttggtctggaaagttggcttgtctcataatacccacagctaggacattctctctgtaattatgaattgtccttgttttacattaaaagagaatgtctttgatcactagagtctgtcggtgttggattatttccactgtgagattcttaaaacttttttgcttcataataataaaacaactcatgttagagaccctttcaacatgaaaggtttgtagttgagacattacatatattttattgtttataataaaaatcatctatacaaaagaagtcctgggtgttaatattttgcacaagatctgttttccatgatgtgttgacatctacaatttcactaactgttgacgttattttctattgagattctggagcctagggagctatgtgttctttttgttcatttcgttcttacttccctgaagcaagagactatatggccttcagtgcaaagacttcagaccaattctttgtattacacttggttgcctcttggctatataacttctgagtgcaaatcattgaacactttaacgaagtattgtagagaataaatcataatggataaaaatc

SEQ ID NO: 8418 - protein, 310 aa, Homo sapiens; identical to SEQ ID NO: 620

SEQ ID NO: 8419 - DNA, 513 bp, Homo sapiens
aggacagccgatttccccccctgacccgagaggagctgcctaaacttttctgctctgtctccctccttactaactttgaggatgccagtgattacctggactgggaggtaggggtccatgggattcgaattgaattcattaatgaaaaaggtgtcaaacgcacagccacatatttacctgaggttgctaaggaacaaggtgagttggatgaatgggattttaatgacaagtatcattcacagtggtgccagttaaagggcaagaaagtgaagtgtgtcatcttgcagcccaactgcagctgagaatgagggcctttctgcctcttaatacctgtcaaattcctatagaaccaagggtaaacttccaaaaaggtttaggagctgggaaaagcaaaagggtaaatcgttcacttactcgcctgatatttcaaacacttcttttcaatgaatagttttatttcttagccccttaaactacagtggcaattgtagcaaaataccaccaatcaacctg

SEQ ID NO: 8420 - protein, 48 aa, Homo sapiens
MRAFLPLNTCQIPIEPRVNFQKGLGAGKSKRVNRSLTRLIFQTLLFNE

SEQ ID NO: 8421 - DNA, 301 bp, Homo sapiens
agaccatttaaaagctctccgccggtttcagaacacaaataaatttcccaatcctctgcaaagacagaactgaagaattactggacagcacgccagaggcagggacctgagggcaggccatcttgctatgccgggaggagacggtcactgttgctaagggtcatccatccttagtctcgaagaaatctcttcctgatctcttcaccaactctccccactactagagaattgagctactcccaaagatgaggccttgatgtgcagacgcgatggggcaacgatgagaccgaataaacaattg

SEQ ID NO: 8422 - protein, 43 aa, Homo sapiens
ISQSSAKTELKNYWTARQRQGPEGRPSCYAGRRRSLLLRVIHP

SEQ ID NO: 8423 - DNA, 4066 bp, Homo sapiens
gaggactgcgagcacagcggcggccgggtggcgggggtgagtggggccagcggggctggacagcagcgggccccgggcgccgccgccgcgatccctccccgcgcccgccgagcacatcgccgccgccgagatgggccctccgcggcacccccaggccggcgagatagaagcgggcggtgcgggcggcgggcggcggctacaggtggaaatgagttctcaacagtttcctcggttaggagccccttctaccgggctgagccaggccccttctcagattgcaaacagtggttctgctggattgataaacccagctgctacagtcaatgatgaatctggtcgagattctgaagtcagtgccagggagcacatgagttccagcagctccctccagtcccgggaggagaagcaagagcctgttgtggtaaggccctatccacaggtgcagatgttgtcgacacaccatgctgtcgcatcagccacacctgttgcagtgacagccccgccagcacacctgacgccagcagtgccactttcattttcggagggacttatgaagccgcccccgaagcccaccatgcctagccgtcccattgctcctgctccaccttctaccctgtcacttccccccaaggttccagggcaggttaccgttaccatggagagtagcatccctcaagcttcagccattcctgtggcaacaatcagtggacaacagggccatcccagtaacctgcatcacatcatgactacaaatgtgcaaatgtctatcatccgcagcaatgctcctgggccccctcttcacattggagcttctcatttacctcgaggtgcagctgctgctgctgtgatgtccagttctaaagtaaccacagtcctgaggccgacctcacagctgccaaatgctgctactgctcagccagcagtacagcacatcattcaccaaccaatccagtctcggccacctgtgaccacctccaatgccatccctcctgctgtggtagcaactgtctcagccaccagagctcagtctccagtcatcactacgacagcggcgcatgctactgattcagcacttagtaggccaaccttgtctatccagcatcctccatctgcagcaatcagtattcagcgtcctgcccagtcacgagatgtcacaacaagaatcacactaccatctcaccctgcattagggacgccaaaacagcagcttcatacaatggctcagaaaacaatcttcagtactggcacgccagtggctgcagccacagtagcacctattttggcaaccaacaccattccttcagcgaccacagctggatctgtgtcacacacgcaagctcccacaagtaccattgttaccatgacagtaccctcccattcctcccatgctactgctgtgaccacctcaaacatcccagtcgccaaggtggtgccccagcagatcacgcacacttctcctcggatccagccagactaccctgccgagaggagtagcctgattcccatctccggacatcgggcctctcccaatcctgtggccatggaaacccgaagtgacaacagaccgtctgttcccgttcagttccaatattttttgccaacttaccccccttctgcatacccactggcggcacatacctacaccccaatcaccagttccgtgtccactatccgacagtatccagtttcagctcaggctccaaactctgccatcacagctcagactggtgttggggtagcgtctaccgtccacctaaaccccatgcagttgatgacagtggatgcatcgcatgctcgacatattcaagggatccagccagcacccatcagtacccagggtatccagccggcccccattgggaccccagggatacagcctgcaccacttggcacacagggaattcactcagcaaccccaatcaacacacaagggcttcagcctgcacctatgggtactcagcagcctcagcctgaaggaaagacttcagcagtggtgttggcagatggagccacaattgtggccaaccctattagcaatccattcagtgctgctccagcagcaacaaccgtggtgcagacccacagccagagtgctagcaccaacgctcccgcccagggctcatcgccacggccaagcatactccggaagaaacctgccacagatggtgccaaacccaagtctgaaatccacgtgtctatggccactccggtcactgtgtccatggagactgtatccaatcaaaataatgatcagcctaccattgccgtccctccaactgcccagcagcccccaccgaccattccaactatgattgcagcagccagtcccccgtcacaaccagccgttgccctttcaaccattcctggagcggtccccatcactccacccatcaccaccattgcagctgcaccacctccatcagtcactgtgggtggcagtctttcctccgtcttgggccctcccgttcctgaaattaaagtgaaagaagaagtagaaccaatggatatcatgaggccagtttctgcagttcctccactggctaccaacactgtgtctccatctcttgcattgctggcaaacaacttgtccatgcctacaagtgacctaccacctggtgcctccccaaggaaaaagcctcgaaagcaacagcatgtgatctcaacagaagaaggtgacatgatggagacaaacagcactgatgatgagaagtccactgccaagagtcttctggtgaaggctgagaagcgcaagtctcctcccaaggagtatattgatgaggaaggtgtgagatatgtcccagtgcgtccaagaccccccattactttgcttcgtcactatcggaacccctggaaagctgcttaccaccactttcagaggtacagtgacgtccgggtcaaagaggagaagaaagctatgctgcaggaaatagctaatcagaaaggagtatcctgtcgtgctcaaggctggaaagtccacctctgtgctgcccagttactacagctgacgaatctagaacatgatgtctatgaaagacttactaacctgcaggaagggattatcccaaagaaaaaagcagcaacagatgatgatctccaccgaataaacgaactgatacagggaaatatgcagaggtgtaaacttgtgatggatcaaatcagtgaagccagagactccatgcttaaggttttagatcataaagaccgtgtcctgaagctgcttaacaagaacgggactgtcaaaaaagtgtccaaattgaagcgaaaggaaaaagtctagacccagaacaatcaggagattggaagcaaatttatgaagaatgatggtgggggtggggggagggttttggttttttccaaagtggaacattgaaataaaggaagtgttccttagttcccgtgtgaaagcagaggaacccatgacatccaagggcgtgaaaggatcagagctgactggacatagtgagctgccttcttgcgttcgggtgcacccctgttaaacctgatctgtgtcataagtgactccggatgcatcagtgtccaccagttggaagcaatgacaaggatggctggctggtgtttttcagccttccggtttatagactgtatttatctagtggattcctgcaggccccatactgagcctggactgaaagtatccactcggaccatctgttatctctctacactgaaaataaaacctcttccacccaccccattcggttcttctgcctgaccttcaaatgcccatgttggccttttacagcagtgccacggcaccaagcgagctgccacatctcacactctaaagggtttgaactattagttcttgtcattttttaaaaaaaaccattcccaagtgaaattgttatatcgtctgtcttgcgtgtgtcagaactgggtttttgtggaggttcagagcaggcaacaccataagttgctctcagatccttgttctgaagtacattcttggttatctgtacttctgtagctggtgtgatgctgttaattgtatgtaccacacatctccagacgttaataaaggactcaaagaggtttttgtacttgc

SEQ ID NO: 8424 - protein, 1048 aa, Homo sapiens; identical to SEQ ID NO: 622

SEQ ID NO: 8425 - DNA, 3690 bp, Homo sapiens
cgggtggcgggggtgagtggggccagcggggctggacagcagcgggccccgggcgccgccgccgcgatccctccccgcgcccgccgagcacatcgccgccgccgagatgggccctccgcggcacccccaggccggcgagatagaagcgggcggtgcgggcggcgggcggcggctacaggtggaaatgagttctcaacagtttcctcggttaggagccccttctaccgggctgagccaggccccttctcagattgcaaacagtggttctgctggattgataaacccagctgctacagtcaatgatgaatctggtcgagattctgaagtcagtgccagggagcacatgagttccagcagctccctccagtcccgggaggagaagcaagagcctgttgtggtaaggccctatccacaggtgcagatgttgtcgacacaccatgctgtcgcatcagccacacctgttgcagtgacagccccgccagcacacctgacgccagcagtgccactttcattttcggagggacttatgaagccgcccccgaagcccaccatgcctagccgtcccattgctcctgctccaccttctaccctgtcacttccccccaaggttccagggcaggttaccgttaccatggagagtagcatccctcaagcttcagccattcctgtggcaacaatcagtggacaacagggccatcccagtaacctgcatcacatcatgactacaaatgtgcaaatgtctatcatccgcagcaatgctcctgggccccctcttcacattggagcttctcatttacctcgaggtgcagctgctgctgctgtgatgtccagttctaaagtaaccacagtcctgaggccgacctcacagctgccaaatgctgctactgctcagccagcagtacagcacatcattcaccaaccaatccagtctcggccacctgtgaccacctccaatgccatccctcctgctgtggtagcaactgtctcagccaccagagctcagtctccagtcatcactacgacagcggcgcatgctactgattcagcacttagtaggccaaccttgtctatccagcatcctccatctgcagcaatcagtattcagcgtcctgcccagtcacgagatgtcacaacaagaatcacactaccatctcaccctgcattagggacgccaaaacagcagcttcatacaatggctcagaaaacaatcttcagtactggcacgccagtggctgcagccacagtagcacctattttggcaaccaacaccattccttcagcgaccacagctggatctgtgtcacacacgcaagctcccacaagtaccattgttaccatgacagtaccctcccattcctcccatgctactgctgtgaccacctcaaacatcccagtcgccaaggtggtgccccagcagatcacgcacacttctcctcggatccagccagactaccctgccgagaggagtagcctgattcccatctccggacatcgggcctctcccaatcctgtggccatggaaacccgaagtgacaacagaccgtctgttcccgttcagttccaatattttttgccaacttaccccccttctgcatacccactggcggcacatacctacaccccaatcaccagttccgtgtccactatccgacagtatccagtttcagctcaggctccaaactctgccatcacagctcagactggtgttggggtagcgtctaccgtccacctaaaccccatgcagttgatgacagtggatgcatcgcatgctcgacatattcaagggatccagccagcacccatcagtacccagggtatccagccggcccccattgggaccccagggatacagcctgcaccacttggcacacagggaattcactcagcaaccccaatcaacacacaagggcttcagcctgcacctatgggtactcagcagcctcagcctgaaggaaagacttcagcagtggtgttggcagatggagccacaattgtggccaaccctattagcaatccattcagtgctgctccagcagcaacaaccgtggtgcagacccacagccagagtgctagcaccaacgctcccgcccagggctcatcgccacggccaagcatactccggaagaaacctgccacagatggtgccaaacccaagtctgaaatccacgtgtctatggccactccggtcactgtgtccatggagactgtatccaatcaaaataatgatcagcctaccattgccgtccctccaactgcccagcagcccccaccgaccattccaactatgattgcagcagccagtcccccgtcacaaccagccgttgccctttcaaccattcctggagcggtccccatcactccacccatcaccaccattgcagctgcaccacctccatcagtcactgtgggtggcagtctttcctccgtcttgggccctcccgttcctgaaattaaagtgaaagaagaagtagaaccaatggatatcatgaggccagtttctgcagttcctccactggctaccaacactgtgtctccatctcttgcattgctggcaaacaacttgtccatgcctacaagtgacctaccacctggtgcctccccaaggaaaaagcctcgaaagcaacagcatgtgatctcaacagaagaaggtgacatgatggagacaaacagcactgatgatgagaagtccactgccaagagtcttctggtgaaggctgagaagcgcaagtctcctcccaaggagtatattgatgaggaaggtgtgagatatgtcccagtgcgtccaagaccccccattactttgcttcgtcactatcggaacccctggaaagctgcttaccaccactttcagaggtacagtgacgtccgggtcaaagaggagaagaaagctatgctgcaggaaatagctaatcagaaaggagtatcctgtcgtgctcaaggctggaaagtccacctctgtgctgcccagttactacagctgacgaatctagaacatgatgtctatgaaagacttactaacctgcaggaagggattatcccaaagaaaaaagcagcaacagatgatgatctccaccgaataaacgaactgatacagggaaatatgcagaggtgtaaacttgtgatggatcaaatcagtgaagccagagactccatgcttaaggttttagatcataaagaccgtgtcctgaagctgcttaacaagaacgggactgtcaaaaaagtgtccaaattgaagcgaaaggaaaaagtctagacccagaacaatcaggagattggaagcaaatttatgaagaatgatggtgggggtggggggagggttttggttttttccaaagtggaacattgaaataaaggaagtgttccttagttcccgtgtgaaagcagaggaacccatgacatccaagggcgtgaaaggatcagagctgactggacatagtgagctgccttcttgcgttcgggtgcacccctgttaaacctgatctgtgtcataagtgactccggatgcatcagtgtccaccagttggaagcaatgacaaggatggctggctggtgtttttcagccttccggtttatagactgtatttatctagtggattcctgcaggccccatactgagcctggactgaaagtatccactcggaccatctgttatctctctacactgaaaataaaacctcttccacccacccc

SEQ ID NO: 8426 - protein, 1048 aa, Homo sapiens; identical to SEQ ID NO: 622

SEQ ID NO: 8427 - DNA, 765 bp, Homo sapiens
ttgccagaaattgaggacggactcccgccctggtcgactgagctcccacaggagcgcctctgctgcgtctcggggctgagtgtggacgcgccgcgcgcggccccgccagggctggtagtttgcagaccgtccctgccgcggcccgctcggcggcggccctgcggctcccgcggcggcggccccgggcgcgatccagcccaggtagccgcgccgcaggctcggggcgtcgcgacctcgcgcctcgggccgcgtgggcacggcggccggcgggtgctcccggctgctgctgctgcccaacaaggaggcaatgggaaaacagtaagaggcagaccaacagtgatccagggctctgaaagctaattgcttcaagatcctgctaccattttcttttgggccgcttgcaaagaagaatcctttgactgaagcataatggaagtgaggaaaggcaaccagctgacacaggagccagagtgagaccagcagactctcacactcaacctacaccatgaatttgtgtctatcttctacgcgttaagagccaaggacaggtgaagttgccagagagcaatggctctcttcactccgtggaagttgtcctctcagaagctgggctttttcctggtgacttttggcttcatttggggtatgatgcttctgcactttaccatccagcagcgaactcagcctgaaagcagctccatgctgcgcgagcagatcctggacctcagcaaaaggtacatcaaggcactggcagaagaaaacagg

SEQ ID NO: 8428 - protein, 65 aa, Homo sapiens
MALFTPWKLSSQKLGFFLVTFGFIWGMMLLHFTIQQRTQPESSSMLREQILDLSKRYIKALAEEN

SEQ ID NO: 8429 - DNA, 559 bp, Homo sapiens
gaattgatggccactgggcatctgttcctcactggagcccactgtgtgctcacacccagcttcaccttggaatgtggtagggagcaggagcatggggtaggtgaggagtgacctggaagaggtatcaggaccattccttaacatttctgataatcggtgcctgtgaagacattcccgcagtgtctgcggagtcctagaaagagagcagaggccacacaaaatgcttttctgaacccaagatcgccatactttgtggaatcttcccattggacatagcagtgagcacccgtttcctttcctgccctcacctgttcctgattcggaatgcttctgccaaataaatagtcactggctacccaaggagtttaaagtctaagcctggtcaatgcacacccagaagagttaagttcagtgataaagggaaatgtagatgaacatactaattcagcccatgtgaccactttgggcctcagctgttaggttgagaagtaagaggggattgaatgcgctccaaagatccgttcagttcctaatgttgcttaattctatacatgtggca

SEQ ID NO: 8430 - protein, 34 aa, Homo sapiens
MATGHLFLTGAHCVLTPSFTLECGREQEHGVGEE

SEQ ID NO: 8431 - DNA, 598 bp, Homo sapiens
tgaacagcaaacatctgtcgaggagtttttacagggtatttgtactttcacatgatctaattttactatcttcataagtagtatgaggctgggcatggtggctaacgcctgcaatcccagtaccttgggaggctgaggcgggcagatcacatgaggttaggagtttgagaccagcctggccaacatggtgaaaccctggctgtcctttaaaaaaaaaattagctggtcatggtggtgcacgcctgtaactccaactgcttgggaggctgaggcaggagaattacttgaatccaggaagtggaggttgcagtgagtcgagatcacgccactgcagtgcagcctgggtgacagagcaggactccatgtcaaaaaaaaacaaaaacaaaatacacctgctctccttaaagaaatggttctccttgcagctcaccatgtaattttcttgtactcatggtgttaggaccttttgctgaagactggcgggttgtcagctgaaactctgggcctgatttagggacttcccttaaagaatatgaccagaaggagatggcagtgaggcaagcaaggagtccaaaggtgtgtctttcttttctagttg

SEQ ID NO: 8432 - protein, 42 aa, Homo sapiens
MVKPWLSFKKKISWSWWCTPVTPTAWEAEAGELLESRKWRLQ

SEQ ID NO: 8433 - DNA, 5165 bp, Homo sapiens
taatactcctttattccctgttttaaaaatttttttaaatttgatacaataattatacataataatggagtaccatgtgagattcaatccacatatacattgtgaaatgatcaaattaggatagttagcatgcacatcacccccaaataattattacttttgtggtgagaacacttaaaattgtctcttttagaaatatacgttattattaaccatagtcaccttgctgtgcaatagaacaccagaacttattcctcctaaatgtaactttttacccattgaccactccctcctcatccccctctctcctccccacccctggtaaccactgttctgttatctcctatgatagcaactttttagcttctgcatgtgagattgtacggtagttgcctttctgtgcctggattatttcatttagcataatgtccttcgggtatatccctgttgctgcaaaagacaggatttctctctctttttctggttgaatagtattccattgtcagagaagtgttgtaagactaggaaaggaacactgcaggctggagccctggggaaagtggtctgaggcaggtggtgggactagagctggggtctggcaaacaggctgggtttgattgtcagcataatagagagcactcatgtgccagctgggtgggaggagcagccgagtgaagaaggggaagcctctcaggaagcatgtgcagggtttatggtaatgagcagaccagcaggtacgtagtgggagaggggtgtgatggggcagaggaacttacgttatgatagtacaagacagaggttgagcctcattttaataggcattgtggtgggtgttgaatagtgatggaatgtatgggtctggaatcaggctgcctggtcaagggctctgaaacatgagtgtgcatcagaatcacctcgaggcttgttaaaggataggctgtggaccacatctcctcagttgctgattcagtgggtgtgggtggggcctgagaattcacatttctcactggtgatgctgctgttactgagtttgggaccacatttggagaaccactggtctagaattgagaggttggcaaaccttctctgttaagaggtagatagtaaatattttaggccttctgggctacaaagagtatctgttacatattttttattgcttttcatgacccattaagcatatatatatcattctctgccatatacaaacaggctgttgggggagtgaggatgatgtagggaaggtggggcatggtttaataacccctgggccatgcctagatgatcagtcctctgccacatagctggctgacctttgccaagttaatcaccttttacctttattttctcatgtttctaataaaacagagacgataatattcatacttcttaccatatagaacttctgaggattcagtgagcaaagccacaaaagatggtatgtcacaatatctgggatatagctagaatttataatttatttttactctgttgataggcaatgggaaaacagtaagaggcagaccaacagtgatccagggctctgaaagctaattgcttcaagatcctgctaccattttcttttgggccgcttgcaaagaagaatcctttgactgaagcatgtatgtacactctgaagtacagcctgggttagtctcttataagggatcggatcattgctcagcctctcccttgagtggcacttagaaaatggcgctattcgtaagctgactggtattgggcccaggactctggctgaaggggtgggcatgctggtaaccatttgcaacctatgctcaggtcctacttgttgggaagccctgattgagaagagtggcctggtctgtgctggcattagataggatctggctgcattaatattgaaactactctgccttttaatgtctcattttgcctcatggtgggagtgaaagtgagaaccacagaaaatctgcctgccaggtgttccacatttcttgtgctacagcatgcaagtgagcagtgaggtgtaccttttcctcatgtagctgggaaagcaatacccctgcttgtacctctggcatatcttctctgtgctggtgcacctagagaggttgcctggtggccctgagagagccatctcatcactaaacactgatggtgaaagctggccatgctcaaataagatgtagcaatctacctcttctttgtctagttacccccaagggggcatccactttcttgctcacctcaccagttgcatgttctagtccttgccagaagcacataataatgactttgtaagcttaagttacaggcacacaaaagggcctgatggtgatatgactccaccctccccgtttttgctgacattccgccaaatatccttctgtctcctccccaccttgcaaaacaaacttcctgttttgaatttggtccaggctggaacagccccactacacctgttaacacacgcagacgcacacttcccccttcataattgcttagcttcttgttgcctagccagatttcccctcagcttacagttcctgaatcataagatattgaaccagcaaatttaagagttgacattttacttagaggtattcaagtgaaaacatggcttctggtttattttgctgtattgtgccatgaccacttggctaattcttctcctccttcacagcagaatggaagtgaggaaaggcaaccagctgacacaggagccagagtgagaccagcagactctcacactcaacctacaccatgaatttgtgtctatcttctacgcgttaagagccaaggacaggtgaagttgccagagagcaatggctctcttcactccgtggaagttgtcctctcagaagctgggctttttcctggtgacttttggcttcatttggggtatgatgcttctgcactttaccatccagcagcgaactcagcctgaaagcagctccatgctgcgcgagcagatcctggacctcagcaaaaggtacatcaaggcactggcagaagaaaacaggaatgtggtggatgggccatacgctggagtcatgacagcttatgatctgaagaaaacccttgctgtgttattagataacattttgcagcgcattggcaagttggagtcgaaggtggacaatcttgttgtcaatggcaccggaacaaactcaaccaactccactacagctgttcccagcttggttgcacttgagaaaattaatgtggcagatatcattaacggagctcaagaaaaatgtgtattgcctcctatggacggctaccctcactgtgagggaaagatcaagtggatgaaagacatgtggcgttcagatccctgctacgcagactatggagtggatggatccacctgctctttttttatttacctcagtgaggttgaaaattggtgtcctcatttaccttggagagcaaaaaatccctacgaagaagctgatcataattcattggcggaaattcgtacagattttaatattctctacagtatgatgaaaaagcatgaagaattccggtggatgagactacggatccggcgaatggctgacgcatggatccaagcaatcaagtccctggcagaaaagcagaaccttgaaaagagaaagcggaagaaagtcctcgttcacctgggactcctgaccaaggaatctggatttaagattgcagagacagctttcagtggtggccctcttggtgaattagttcaatggagtgatttaattacatctctgtacttactgggccatgacattaggatttcagcttcactggctgagctcaaggaaatcatgaagaaggttgtaggaaaccgatctggctgcccaactgtaggagacagaattgttgagctcatttacattgatattgtaggacttgctcaattcaagaaaactcttggaccatcctgggttcattaccagtgcatgctccgagtccttgattcatttggtactgaacccgaatttaatcatgcaaattatgcccaatcgaaaggccacaagaccccttggggaaaatggaatctgaaccctcagcagttttataccatgttccctcataccccagacaacagctttctggggtttgtggttgagcagcacctgaactccagtgatatccaccacattaatgaaatcaaaaggcagaaccagtcccttgtgtatggcaaagtggatagcttctggaagaataagaagatctacttggacattattcacacatacatggaagtgcatgcaactgtttatggctccagcacaaagaatattcccagttacgtgaaaaaccatggtatcctcagtggacgggacctgcagttccttcttcgagaaaccaagttgtttgttggacttgggttcccttacgagggcccagctcccctggaagctatcgcaaatggatgtgcttttctgaatcccaagttcaacccacccaaaagcagcaaaaacacagactttttcattggcaagccaactctgagagagctgacatcccagcatccttacgctgaagttttcatcgggcggccacatgtgtggactgttgacctcaacaatcaggaggaagtagaggatgcagtgaaagcaattttaaatcagaagattgagccatacatgccatatgaatttacgtgcgaggggatgctacagagaatcaatgctttcattgaaaaacaggacttctgccatgggcaagtgatgtggccacccctcagcgccctacaggtcaagcttgctgagcccgggcagtcctgcaagcaggtgtgccaggagagccagctcatctgcgagccttctttcttccagcacctcaacaaggacaaggacatgctgaagtacaaggtgacctgccaaagctcagagctggccaaggacatcctggtgccctcctttgaccctaagaataagcactgtgtgtttcaaggtgacctcctgctcttcagctgtgcaggcgcccaccccaggcaccagagggtctgcccctgccgggacttcatcaagggccaggtggctctctgcaaagactgcctatagcagctacctgctcagccctgcaccatgctgctggggaagacagtggccccagccccgtcaggcagggccagggacagaagtcatgcagggactctggcaagagcctgaactttttcgtagaaggttctgaat

SEQ ID NO: 8434 - protein, 741 aa, Homo sapiens; identical to SEQ ID NO: 624

SEQ ID NO: 8435 - DNA, 301 bp, Homo sapiens
caccaaccagacagagtaacaatgaaactcactggctatccaaaagccagggatgaaaaacaacaaaaatacaaaattttcatgatgatataataggaagctctcgaaggttggattcaggttctgcttttctgccagggacttgattgcttggatccatgcgtcagccattcgccggatccgtagtctcatccaccggaattcttcatgctttttcatcatactgtagagaatattaaaatctgtacgaatttccgcctagcaacagaaatttaataaaatgaatagaagataaaaagtc

SEQ ID NO: 8436 - protein, 46 aa, Homo sapiens
YNRKLSKVGFRFCFSARDLIAWIHASAIRRIRSLIHRNSSCFFIIL

SEQ ID NO: 8437 - DNA, 432 bp, Homo sapiens
gctcataccccagacaacagctttctggggtttgtggttgagcagcacctgaactccagtgatatccaccacattaatgaaatcaaaaggcagaaccagtcccttgtgtatggcaaagtggatagcttctggaagattgagctccttgaggagatgataatggctgacattttagtgcttcctgtgttccaggcatggccttcacaatgactatgaagtaaatactattattaaccccacttttgagtgaaagaactgaagcagatagaggtaaaggttcctcaggtggtcaggatttgaattacatcatgtattgtagccaacacactggactacaaggaatggattctctcttggtaatttcctcctctgtctccaacccatcctctcaaatcccaaaagcctaaataaatacatttatgttggtgtggt

SEQ ID NO: 8438 - protein, 32 aa, Homo sapiens
MYCSQHTGLQGMDSLLVISSSVSNPSSQIPKA

SEQ ID NO: 8439 - DNA, 393 bp, Homo sapiens
ggcagaaccagtcccttgtgtatggcaaagtggatagcttctggaaggtgagtcagtctcgaacttgggaagcattttgctcattgtcctacccaagtattaatagcataatagttgatgccaaaggagatggtgacgtcccttccactgtagttgctgtcacaaccttgacgtctttaagctaatggccgtttgcatctgtgtcttcaaacagatcctggttacagccattttgtgtgattcacttcgggggttaagtaatgcaggattctgcaaacaaggtgtcgccgtccaaatgtactgtcctggcatagagagcactgctttgttttccactgttgtagagaaaactagggagaactttatttttcaataaacttttcttgtgtgaca

SEQ ID NO: 8440 - protein, 63 aa, Homo sapiens [sequence omitted]

SEQ ID NO: 8441 - DNA, 2445 bp, Homo sapiens
aaaagctgcaaggatcatttgctggctgtccctaagttcaaggcctccctaccttccccttcttttccaagtcacaacccgccctgcccgggccagacagcccagaagaacacttttctgccatttaaaaatccctctttcatcccccccagtccagtattgagtggaagtgcgccggagttccactgacagggcagctgctcttggagcaaacaagcccacactccagttgtttagggcattatctgaagagtcagtgacccctgaatgtgtactggctcccaggcctcctcagacttggcccaggtctagtcagtgatcctggagaggaaactggggagggggcttccaactgccctgcatggaagaggagaggaaggtgcccctgtgtgggctggaagcctgcggaggttttgccattgctgatcttgatagaatcctaaaccgatttatagctgataacagttccatggggagagaaatcctaagttatgattaatgtttttccccgctataatatcttgcctgtttttttggattattttccccattgtgatcctaagctcttaaaaaacttgagggaaaacattcatctaatttactaaaagagaaagctttccattgaaaggtagatactttgaggagtaaaaagacttctttgaatgctggtaaacaccgcatttattttgtgtatgcagtttgatttgcacatgtataaatggagatgcttttcatttttgtttggactgggtttgtgtcactgctcattacagtttgcttttttgtgtgtttgctgtgcgtttggagatattagtcagtttctttagtgatatttgtttccttgatgtgccttttcgtttttctttggggtttttggaatccggatgctgttgaagggcaatagcagactcctccagctaagagacaggacatgttcttgagccactgtagctgttgaagctggacaccagacgctccctataacccccccgccaggccatagcgtgtatgcatgtgcacttccacccacagaggagggtgtgaagccttgagaacctcaagaaagggctggattctgccatacctttgggtctaccttgggactgctggttgccaacgtgtcaaccagcctgtgttccctgccacccacgcacttgctgaggtgtggctgaggcagaatcatgtgaatgggtgcatccaaggagttcagggccctgcttggagaagaaatagtctttcagaacattccaagggttttcctcaaggaacatttttgagctagaaattaaaatgggttctctggcagactgcaccccttgagtcaaagttaacagtattcctttgaatgcaataatagaggcttttctgcgttaagggagaaggaatgaccaattgaacttacacattccccaggcaggtccctttgccggcccctacaggctggggtggcccctcctgtcctcagggatcagactcccagactggttagttctgcatgtttccatcaaattaaaggttattccctggccgcctcctggagaaaaccaaccccaccctgccagctgggggcaatggggcagggattttggcctctcagaacagctcctagaggctgctcatgactgaatgttttcccaaatcacctaaatatcggtttgctttttgttttgggggagaggatttagcctcttacttccctgatggattcaaagttttatctatctccttatctcctgccctgtcttggcacaactctggatagattgcaggtgtggaatttgctggagtttggtgacttcgtcaaattcctttggattctgttccgccaaatcagcagtctcgtcctgtggatgcagtgactggaatttcccatctgcaaagcatctctgtagcccagattttgtggagccttaagacactccctcaatgccaccctgaccccacggctggagaaccctgtgcttatgtggtgggcagggccactgttgatggaggatggcggggacggggtggtgctcaaaggatctgtggtgctggaggtctacacgcctctcaggacagcgtgtcaggaacctcagagcagcttcacatctgccaaagctgagagggagcgaacttgggaagcattttgctcattgtcctacccaagtattaatagcataatagttgatgccaaaggagatggtgacgtcccttccactgtagttgctgtcacaaccttgacgtctttaagctaatggccgtttgcatctgtgtcttcaaacagatcctggttacagccattttgtgtgattcacttcgggggttaagtaatgcaggattctgcaaacaaggtgtcgccgtccaaatgtactgtcctggcatagagagcactgctttgttttccactgttgtagagaaaactagggagaactttatttttcaataaacttttcttgtgtgaca

SEQ ID NO: 8442 - protein, 89 aa, Homo sapiens [sequence omitted]

SEQ ID NO: 8443 - DNA, 2527 bp, Homo sapiens
aaggtgggttaatcccagtaggagcaatccaatccaatctgggaaggagggagggaggaacatcgcaagaaccagcccttgttcctgttacaggaacagttacaggtgggtggtggatgtggtgtggggaatatgaggtatcctcgaccaaacctcggtgtcctgagcacaggggagagaagggcgtgccaccaagtgcgttgtagggtccaggccagtccctggggtgcccttgcaggtccgcggttcatcttccattcctgtgagcggccattgcatccctgccttggatcctgagtagatttgctcaggtcatccctgcctggcaatcttcctctgccccaggggaagccaggcctggcgtgggaggttacgggcctgcacaaacctaccagcagggcctccttgggcagcgtggacctggagcttctcttggggccaccagtgtgttggggcaggggaggagctggtgtccttcgcggggagaccctagaagctaccttaagccattcccttcccttcccatgtggcctttgacagctctggtaaagtagaagtatcacatgtaagctgggagccccagtgggctgctgtgtgaaaggagatggcagtcactatctagtagctccagttctgtttttatggccatttctccaaccatgtagccaatactttgcaaaaaacttagcataatagactttacatttctcttctggagggaaaggaaaaaacctcaggttacttagaggagactcgggagggaaaggatgcaggttgggatagaatgcccttctcaatctggataacctccatcaatgtatttaacctcattcttagttttctcatcggaaagcagggatgatgatgataatgtgacgtcacacgattgagaaaggttataggtaaccacacgtcctgaacacccaactcggaatctggcccagcagacactcagatatgagtccccaagtatttgaatgtctactgtgagcctggaactgtcctggggactgtggactcaacagaaaaccacacccctgcctctaggaggtttgcgttctagcgggcacgggcgagaccagctataaaccacatatggcgtcagttcccagaagagaaataaagcaggtacagaatgatggtgggggtgacggctctattctgggaggtatctggtgacatttgagcagagacttgatgggcccaggtggtggctatcactcgtgagagctttgggcatcattcctcccagcacatgctccagttacgtggaggcaggactggcatttgggtgattttcttggattgcttggcactgccatctagcctctctccacttcctttgcagggtttaactccctcgtgggtggcgtgatgggcttctccattcttctgagcgcggaagtgttcaagcatgactcggcggtctggtacctggacggcagcataggcgttctgatcggcctcaccatatttgcctatggggtcaaactcctcatcgacatggtgccgagggtgaggcagacacgtcactacgagatgtttgagtgaagggggccagcatccgcatgagaccatcgagatgaggagtttccacataggcaaagggtgccaatatttaactgaacatctggtttctttttggaagttttctttcacatggtttgtcattacaagacaaggtctgcccagccaggtggatctaccttgcccccatcacctgccgcccccatcaaacatgttgggacaatgcccataggaatggacctccttccccgtctccagctgggactggcgttttttagtctctggagtatgatggttctcatgggtaggatgagatctttggcagaaaggtcttcggtggtgctctgagcctgcgctgcataggactgagcagacccacctcctccagcttgggtggccctgccactcctggttccaagtctctcctttcctggcaggtcttaagggaagattgtacccctcaccctttacatacccagaatcatcagtatgtcacttcctaatttctatcagtgtatctcattatttcatactgttttactaatcctaagtctaaacagatttgctcaaaaggagaccattctattttttaaagtacttagtgatacacgtataagctttgcatggacgaattaaataagcacattgaccttttcttgtacattcagaacctgaacatccatgtgaaaactgggtccatttttgagagatgtgaaactacagtttatttgtaataaataaatataatctatccgtatatgcatatatctatatgctgtgttaagtggtaatgggtacattacagtctgtgagagatggatcgctccctctgtaaggaacaagacgttctcagctgatgtcacggtaggtttagattctgtagagtgttccccaacccgcaccgttctgtacctctcacaccactgcttgcccgggcagtagtggctgaccaataaagacctttacctgttttgtatggcatgggaaggcaatctttggc

SEQ ID NO: 8444 - protein, 58 aa, Homo sapiens
MGFSILLSAEVFKHDSAVWYLDGSIGVLIGLTIFAYGVKLLIDMVPRVRQTRHYEMFE

SEQ ID NO: 8445 - DNA, 5102 bp, Homo sapiens
aacccctctaagtgatgcagaataggggtttgtggcaggggtgcgactttccacatggtggttgctggtgccgacgtcctggtaaagcggttgcctctgagtgtggtgttggtctgaagtcagcagccgtgcagtcaggaaagaaggctgggcaaagagaaaggcgcaaggacaaactggcgcccatgaagatggcctggacctgtacgtgaccctcactgtctcagcctccatgacattgggcatcctgcagaagaagctggcgcctttgccacagagctatatgcacgcctggcttatgactcagcgaagctggagcggggagatgcagcaggagcggagaatccatgggctcggtgcggcccctctctcccctgggcgagcccgtggagccacagaatgcagaatgtgcctggctgagctgcggcagcaccggagccgcttcacctccacctttcactcatgcagatgtctctgggagtcagcttcaactgggaaccacgtaggaaggaaattctgggcaacgtagttccagttgagctctgtgcacgcagtatatgcagccaccgtgagggagtctgttatttttttccactttataggtaggacagtggagggagggaggggttaagtgacctgcccagagtcacctagctagtaagtgggactcccgcttcagtgcttttgaagctgccacccagtgcttctactttttcgctccaggaagcccacccgagtcctccaggagctggacctcggggccctccggtccatcgagagctcccccgagatgaagcctcccaggtacaggaaacttcccgcacagcccctggataggccgcggtggagctcagtcctggtctcttggaagttgaagtttctttatgtttcaccatgcatacttatttctcggtgacaagcttcctgtgtctctcttacgagaatgctgaccaggcttgtctggggctcaccgtgagcacccgatgcggctggcaggtggaggacgtttgtgtgtggatcatgtgtttgggccccttcacaacaactcgtaccttttactgccagctgctgccaggggctgtaggcatcccactgccgcttacagagatccaagtgtttgtttcccagtaagccatggagtttagagttgagcaaaggcctgcctggcacacgactgccactgggtcggccgagccctgggtctgcagctccctttaggagctggaggaagggccaccaaagccatgggtggcgtttcttgagctgcatctcagggtggggcagcacaccccaggccctgtgccctaggggcctagatggggtaagcacagattttctctaccgctggaaacttagggaggagggctttgcaaacagcgactgaatggagccaaaggggattcaggcatcatgggataagcaaagtgagtattcagtctccaaatctgagacctcaaagttcttgaatttcctgactgcctcagtctcccagcctatgcttcctgagtcctgttagcacctggggctgttgacatgcaattctttggtcatgtgtcttagtcagttctagctgttataacaaaacaccacagactgggtggcttataaaccacagacacttccatctcacagttctggaggctgggagtccaagacaaggtgccagcagattcagtgcctggtggggccccttttcctggttcatgagatggtggcttcttcctgtgtcctcacatgcggagggggcaagctggcactatgggacctcttttataagggcactcattccattagtgagggctctgtccttgcagcctaatcacctcccagaggccccacctcctcataccgtcaccctggcaattaggtttccatgtgtgaattttggagggacacatactcagattgtagcatcatgttcaccttattttctgtgggtgctgtctcctggacttaggctgagtcctgcacaaagagagcttccatgtggggctcctgaccccctcccactgtgtcccctgctgtgtaacctctgcataggagggactgaagagttgtcaagaggcctggtttgggacggtccttactggtcatttgaggaggtaaaacttccgtgaggtgattactttaaataagcttttaaatgtgaaataattttagattaatagaagagttttacagatagtacagagagtgcccatatcccctccatccagcctgacctactgttaacatcgcacacagccacggcaaattaatctctaccatgagatgacagcactattcacgaaaccctagactttcttctcatgtccccggttttcccactgatgacctttttgtgttccaggatccagtctggatgccatgctgcatttacttgtcacatctccttaagtctccagtgtgtgacagtctctcggtcgttcctcatgtttcatgaccttgacacgtgaggagtcgggtattttgtagacggtccctccgtttgggtttgtttgatgttgtttcgcagttaaaatgaggttatggatttggggatggaacaccgtggaggtaaagtgcccttcttgtcacatcgtatcaggggccacatgttaccaacacaacttaataatggtgatgtgaaccttgatcacttggctaaggtggtgtctgcttggtttctccattggtaagctactgtttttccctttctctactctgtgttagatttgagtctgttaagtccagcccaaactcaagggcaggggatggggtggggagattaatctccaactcttggaggatggagtagcaaagaatttgtgaacataggttgccaaaaccaccaccgtcattgacccatgttttcggagagatgctttgaccctatacagataccctgtttccagtgaagttgcttttcaaatggctttgttcagttttgaacatgatgcaggctgtctccctcttcccaggttctgacatgaggtttgtgaatttgattaataaaatgcatagggagaagccgatttctttgcctatttatgatgctgcatcagagttctgctggccgttgcattttaatattgggaaatctgaaggctgtgtctcttgggggtgacacatgggagcttgaagcagaagagctggatgggccccaatgtcaggagaatagtggtgcttacttattgcatatgggactcacttgtttgcttgcgaaggtaaggtaacaacttagaggaagtgttaagataacgtcagtagcagacgatatttttagatgctattttctctacccatgtctatgaactctcaattgccctgtgtgaatttaaggggaaaaaatatggttttaagtagctctggccctaactgaccctgtggcaaattcagttggctctgttgaaggattgttaggctggtggtgtgtttacgtgttccaaaattctcagtcaactgcttggtgagttatctgtggaaaattctatatagaagatgctgttcttagcattctgaccaactctgttattgatctatgactgctactcattttagcagaatagtggggaggtcaatctcctacaggaaaataaatacgtaatggttttttaagtaaatataaattgggattatctgtttttgagcatcttttccaattcctggtgacacataactgaggtgtgaaagcatgcagtatacccccacctggtggcagcacacctgactatttgtacttggaacaaggctgatctgtaaggcaagtgggttgcagatgatctgctccagcaggaggtgaactgttgaaatctggaactttctcttgcaggacgatttcctgttcagtgtctccattttaagtgggattctttgcagcatcctggccgtgttgaagttcatgctggggaaggttctgaccagtagagcactcataacagatgggtttaactccctcgtgggtggcgtgatgggcttctccattcttctgagcgcggaagtgttcaagcatgactcggcggtctggtacctggacggcagcataggcgttctgatcggcctcaccatatttgcctatggggtcaaactcctcatcgacatggtgccgagggtgaggcagacacgtcactacgagatgtttgagtgaagggggccagcatccgcatgagaccatcgagatgaggagtttccacataggcaaagggtgccaatatttaactgaacatctggtttctttttggaagttttctttcacatggtttgtcattacaagacaaggtctgcccagccaggtggatctaccttgcccccatcacctgccgcccccatcaaacatgttgggacaatgcccataggaatggacctccttccccgtctccagctgggactggcgttttttagtctctggagtatgatggttctcatgggtaggatgagatctttggcagaaaggtcttcggtggtgctctgagcctgcgctgcataggactgagcagacccacctcctccagcttgggtggccctgccactcctggttccaagtctctcctttcctggcaggtcttaagggaagattgtacccctcaccctttacatacccagaatcatcagtatgtcacttcctaatttctatcagtgtatctcattatttcatactgttttactaatcctaagtctaaacagatttgctcaaaaggagaccattctattttttaaagtacttagtgatacacgtataagctttgcatggacgaattaaataagcacattgaccttttcttgtacattcagaacctgaacatccatgtgaaaactgggtccatttttgagagatgtgaaactacagtttatttgtaataaataaatataatctatccgtatatgcatatatctatatgctgtgttaagtggtaatgggtacattacagtctgtgagagatggatcgctccctctgtaaggaacaagacgttctcagctgatgtcacggtaggtttagattctgtagagtgttccccaacccgcaccgttctgtacctctcacaccactgcttgcccgggcagtagtggctgaccaataaagacctttacctgttttgtatggcatgggaaggcaatctttggc

SEQ ID NO: 8446 - protein, 81 aa, Homo sapiens
MLGKVLTSRALITDGFNSLVGGVMGFSILLSAEVFKHDSAVWYLDGSIGVLIGLTIFAYGVKLLIDMVPRVRQTRHYEMFE

SEQ ID NO: 8447 - DNA, 1084 bp, Homo sapiens
gtgcaagtcttcgtgtggacgtatgccttcatttctcttggagtagaattgctgaatcctatggacgatttcctgttcagtgtctccattttaagtgggattctttgcagcatcctggccgtgttgaagttcatgctggggaaggttctgaccagtagagcactcataacagatgggtttaactccctcgtgggtggcgtgatgggcttctccattcttctgagcgcggaagtgttcaagcatgactcggcggtctggtacctggacggcagcataggcgttctgatcggcctcaccatatttgcctatggggagtttccacataggcaaagggtgccaatatttaactgaacatctggtttctttttggaagttttggttctcatgggtaggatgagatctttggcagaaaggtcttcggtggtgctctgagcctgcgctgcataggactgagcagacccacctcctccagcttgggtggccctgccactcctggttccaagtctctcctttcctggcaggtcttaagggaagattgtacccctcaccctttacatacccagaatcatcagtatgtcacttcctaatttctatcagtgtatctcattatttcatactgttttactaatcctaagtctaaacagatttgctcaaaaggagaccattctattttttaaagtacttagtgatacacgtataagctttgcatggacgaattaaataagcacattgaccttttcttgtacattcagaacctgaacatccatgtgaaaactgggtccatttttgagagatgtgaaactacagtttatttgtaataaataaatataatctatccgtatatgcatatatctatatgctgtgttaagtggtaatgggtacattacagtctgtgagagatggatcgctccctctgtaaggaacaagacgttctcagctgatgtcacggtaggtttagattctgtagagtgttccccaacccgcaccgttctgtacctctcacaccactgcttgcccgggcagtagtggctgaccaataaagacctttacctgttttgtatggcatgggaaggcaatctttggc

SEQ ID NO: 8448 - protein, 96 aa, Homo sapiens
MDDFLFSVSILSGILCSILAVLKFMLGKVLTSRALITDGFNSLVGGVMGFSILLSAEVFKHDSAVWYLDGSIGVLIGLTIFAYGEFPHRQRVPIFN

SEQ ID NO: 8449 - DNA, 1366 bp, Homo sapiens
gagaacactggtgtgcaagtcttcgtgtggacgtatgccttcatttctcttggagtagaattgctgaatcctatggacgatttcctgttcagtgtctccattttaagtgggattctttgcagcatcctggccgtgttgaagttcatgctggggaaggttctgaccagtagagcactcataacagatgggtttaactccctcgtgggtggcgtgatgggcttctccattcttctgagcgcggaagtgttcaagcatgactcggcggtctggtacctggacggcagcataggcgttctgatcggcctcaccatatttgcctatggggtcaaactcctcatcgacatggtgccgagggtgaggcagacacgtcactacgagatgtttgagtgaagggggccagcatccgcatgagaccatcgagatgaggagtttccacataggcaaagggtgccaatatttaactgaacatctggtttctttttggaagttttctttcacatggtttgtcattacaagacaaggtctgcccagccaggtggatctaccttgcccccatcacctgccgcccccatcaaacatgttgggacaatgcccataggaatggacctccttccccgtctccagctgggactggcgttttttagtctctggagtatgatggttctcatgggtaggatgagatctttggcagaaaggtcttcggtggtgctctgagcctgcgctgcataggactgagcagacccacctcctccagcttgggtggccctgccactcctggttccaagtctctcctttcctggcaggtcttaagggaagattgtacccctcaccctttacatacccagaatcatcagtatgtcacttcctaatttctatcagtgtatctcattatttcatactgttttactaatcctaagtctaaacagatttgctcaaaaggagaccattctattttttaaagtacttagtgatacacgtataagctttgcatggacgaattaaataagcacattgaccttttcttgtacattcagaacctgaacatccatgtgaaaactgggtccatttttgagagatgtgaaactacagtttatttgtaataaataaatataatctatccgtatatgcatatatctatatgctgtgttaagtggtaatgggtacattacagtctgtgagagatggatcgctccctctgtaaggaacaagacgttctcagctgatgtcacggtaggtttagattctgtagagtgttccccaacccgcaccgttctgtacctctcacaccactgcttgcccgggcagtagtggctgaccaataaagacctttacctgttttgtatggcatgggaaggcaatctttggc

SEQ ID NO: 8450 - protein, 105 aa, Homo sapiens
MDDFLFSVSILSGILCSILAVLKFMLGKVLTSRALITDGFNSLVGGVMGFSILLSAEVFKHDSAVWYLDGSIGVLIGLTIFAYGVKLLIDMVPRVRQTRHYEMFE

SEQ ID NO: 8451 - DNA, 1743 bp, Homo sapiens
aggaggaggttccaagatacccaaataggaacagctccagtctgcagctcccagcatgagcaacacagaagacagaaacaccaaggaaggctctggtctaaaccttgccctcactcctgtcttctggctcctgaccaccctggtgtcttcccctgtggccctgcaaggcatatcatgcttcctgtctctaggacctgcttactagaaagcagcacccgcctgaaacctcacgaagcccagaactacaggaagaaggcattgtgggtgtcctggttctccatcattgtcaccctggccctcgcggtggctgcctttactgtctccgttatgaggtacagcgcctctgcttttgggtttgcatttgatgccatcctggacgtcctgtcatcggcgattgtcctgtggcgttacagcaacgcggccgctgtgcactctgcccatagggagtacatgacgatttcctgttcagtgtctccattttaagtgggattctttgcagcatcctggccgtgttgaagttcatgctggggaaggttctgaccagtagagcactcataacagatgggtttaactccctcgtgggtggcgtgatgggcttctccattcttctgagcgcggaagtgttcaagcatgactcggcggtctggtacctggacggcagcataggcgttctgatcggcctcaccatatttgcctatggggtcaaactcctcatcgacatggtgccgagggtgaggcagacacgtcactacgagatgtttgagtgaagggggccagcatccgcatgagaccatcgagatgaggagtttccacataggcaaagggtgccaatatttaactgaacatctggtttctttttggaagttttctttcacatggtttgtcattacaagacaaggtctgcccagccaggtggatctaccttgcccccatcacctgccgcccccatcaaacatgttgggacaatgcccataggaatggacctccttccccgtctccagctgggactggcgttttttagtctctggagtatgatggttctcatgggtaggatgagatctttggcagaaaggtcttcggtggtgctctgagcctgcgctgcataggactgagcagacccacctcctccagcttgggtggccctgccactcctggttccaagtctctcctttcctggcaggtcttaagggaagattgtacccctcaccctttacatacccagaatcatcagtatgtcacttcctaatttctatcagtgtatctcattatttcatactgttttactaatcctaagtctaaacagatttgctcaaaaggagaccattctattttttaaagtacttagtgatacacgtataagctttgcatggacgaattaaataagcacattgaccttttcttgtacattcagaacctgaacatccatgtgaaaactgggtccatttttgagagatgtgaaactacagtttatttgtaataaataaatataatctatccgtatatgcatatatctatatgctgtgttaagtggtaatgggtacattacagtctgtgagagatggatcgctccctctgtaaggaacaagacgttctcagctgatgtcacggtaggtttagattctgtagagtgttccccaacccgcaccgttctgtacctctcacaccactgcttgcccgggcagtagtggctgaccaataaagacctttacctgttttgtatggcatgggaaggcaatctttggc

SEQ ID NO: 8452 - protein, 102 aa, Homo sapiens
MLPVSRTCLLESSTRLKPHEAQNYRKKALWVSWFSIIVTLALAVAAFTVSVMRYSASAFGFAFDAILDVLSSAIVLWRYSNAAAVHSAHREYMTISCSVSPF

SEQ ID NO: 8453 - DNA, 840 bp, Homo sapiens
gtgcaagtcttcgtgtggacgtatgccttcatttctcttggagtagaattgctgaatcctatggacgatttcctgttcagtgtctccattttaagtgggattctttgcagcatcctggccgtgttgaagttcatgctggggaaggttctgaccagtagagcactcataacagatgggtttaactccctcgtgggtggcgtgatgggcttctccattcttctgagcgcggaagtgttcaagcatgactcggcggtctggtacctggacggcagcataggcgttctgatcggcctcaccatatttgcctatggggagtttccacataggcaaagggtgccaatatttaactgaacatctggtttctttttggaagttttggttctcatgggtaggatgagatctttggcagaaaggtcttcggtggtgctctgagcctgcgctgcataggactgagcagacccacctcctccagcttgggtggccctgccactcctggttccaagtctctcctttcctggcaggtcttaagggaagattgtacccctcaccctttacatacccagaatcatcagtatgtcacttcctaatttctatcagtgtatctcattatttcatactgttttactaatcctaagtctaaacagatttgctcaaaaggagaccattctattttttaaagtacttagtgatacacgtataagctttgcatggacgaattaaataagcacattgaccttttcttgtacattcagaacctgaacatccatgtgaaaactgggtccatttttgagagatgtgaaactacagtttatttgtaataaataaatataatctatccgt

SEQ ID NO: 8454 - protein, 96 aa, Homo sapiens; identical to SEQ ID NO: 8448

SEQ ID NO: 8455 - DNA, 1122 bp, Homo sapiens
gagaacactggtgtgcaagtcttcgtgtggacgtatgccttcatttctcttggagtagaattgctgaatcctatggacgatttcctgttcagtgtctccattttaagtgggattctttgcagcatcctggccgtgttgaagttcatgctggggaaggttctgaccagtagagcactcataacagatgggtttaactccctcgtgggtggcgtgatgggcttctccattcttctgagcgcggaagtgttcaagcatgactcggcggtctggtacctggacggcagcataggcgttctgatcggcctcaccatatttgcctatggggtcaaactcctcatcgacatggtgccgagggtgaggcagacacgtcactacgagatgtttgagtgaagggggccagcatccgcatgagaccatcgagatgaggagtttccacataggcaaagggtgccaatatttaactgaacatctggtttctttttggaagttttctttcacatggtttgtcattacaagacaaggtctgcccagccaggtggatctaccttgcccccatcacctgccgcccccatcaaacatgttgggacaatgcccataggaatggacctccttccccgtctccagctgggactggcgttttttagtctctggagtatgatggttctcatgggtaggatgagatctttggcagaaaggtcttcggtggtgctctgagcctgcgctgcataggactgagcagacccacctcctccagcttgggtggccctgccactcctggttccaagtctctcctttcctggcaggtcttaagggaagattgtacccctcaccctttacatacccagaatcatcagtatgtcacttcctaatttctatcagtgtatctcattatttcatactgttttactaatcctaagtctaaacagatttgctcaaaaggagaccattctattttttaaagtacttagtgatacacgtataagctttgcatggacgaattaaataagcacattgaccttttcttgtacattcagaacctgaacatccatgtgaaaactgggtccatttttgagagatgtgaaactacagtttatttgtaataaataaatataatctatccgt

SEQ ID NO: 8456 - protein, 105 aa, Homo sapiens; identical to SEQ ID NO: 8450

SEQ ID NO: 8457 - DNA, 1668 bp, Homo sapiens
cgcacttctgactcgagtccccgccgcgcttgtcgtcgccgccgccgggatccgcagccccgcgccatggagccggccgcgggcatccagcgccgcagctcccaggggcccaccgtcccgccgccgccccggggccacgcgccaccggctgccgcccccggcccggccccgctgagctccccggtgcgcgagccgccccagctggaggaggagcggcaggtgcggatcagcgagagcggccagttcagcgacgggctggaggaccgaggcttactagaaagcagcacccgcctgaaacctcacgaagcccagaactacaggaagaaggcattgtgggtgtcctggttctccatcattgtcaccctggccctcgcggtggctgcctttactgtctccgttatgaggtacagcgcctctgcttttgggtttgcatttgatgccatcctggacgtcctgtcatcggcgattgtcctgtggcgttacagcaacgcggccgctgtgcactctgcccatagggagtacatagcctgtgtcatcttgggggtgatattccttctgtcatccatatgtatagtggtcaaagccatccatgacctctcaactaggctgctcccagaagtggacgatttcctgttcagtgtctccattttaagtgggattctttgcagcatcctggccgtgttgaagttcatgctggggaaggttctgaccagtagagcactcataacagatgggtttaactccctcgtgggtggcgtgatgggcttctccattcttctgagcgcggaagtgttcaagcatgactcggcggtctggtacctggacggcagcataggcgttctgatcggcctcaccatatttgcctatggggtcaaactcctcatcgacatggtgccgagggtgaggcagacacgtcactacgagatgtttgagtgaagggggccagcatccgcatgagaccatcgagatgaggagtttccacataggcaaagggtgccaatatttaactgaacatctggtttctttttggaagttttctttcacatggtttgtcattacaagacaaggtctgcccagccaggtggatctaccttgcccccatcacctgccgcccccatcaaacatgttgggacaatgcccataggaatggacctccttccccgtctccagctgggactggcgttttttagtctctggagtatgatggttctcatgggtaggatgagatctttggcagaaaggtcttcggtggtgctctgagcctgcgctgcataggactgagcagacccacctcctccagcttgggtggccctgccactcctggttccaagtctctcctttcctggcaggtcttaagggaagattgtacccctcaccctttacatacccagaatcatcagtatgtcacttcctaatttctatcagtgtatctcattatttcatactgttttactaatcctaagtctaaacagatttgctcaaaaggagaccattctattttttaaagtacttagtgatacacgtataagctttgcatggacgaattaaataagcacattgaccttttcttgtacattcagaacctgaacatccatgtgaaaactgggtccatttttgagagatgtgaaactacagtttatttgtaataaataaatataatctatccgt

SEQ ID NO: 8458 - protein, 289 aa, Homo sapiens; identical to SEQ ID NO: 626

SEQ ID NO: 8459 - DNA, 5911 bp, Homo sapiens
atgaggactgctgacgaagtctgtcatactctggggattggtaagaacctggagaaagagaagaaaagagtgtgctctgtgaaggggggacagttgggacaattatggccaggtccgtggggaaggtgtacaggagactgtggtcccggaggagtccagagtcgggcagtgtggtgttttcatgttgacgggtggacaagtcacctgtctaactgtggtgagagcaacaggcctccaaaggaaagaagttgtttccgagtttgtgactggcacagtgacctctttcagtgggaggtttctgactggcaccactgtgtgcttgttccttacgctcgcggtgaagtcaagcctcggactgcagagtgtgtgacggctcagcatggactgcagcaccggatggtgcgctgcattcagaagctgaaccgaactgtggttgcaaatgaaatatgcgaacactttgcccttcagcctcctacagaacaggcttgcctcattccttgtccccgggattgtgtagtatctgagttcttaccatggtccaactgtagcaagggatgtgggaagaaattgcagcatagaactcgcgcggtcatagctccccctctctttggtggtttgcaatgtccaaatctgactgagtcaagagcctgtgatgctcccatttcctgtcctcttggggaagaggaatatacatttagccttaaggttggaccatggagtaaatgcagactgcctcatcttaaagaaattaatccaagcggaagaactgttctggattttaactctgattcaaatgagcgagtcacctttaaacatcaaagttacaaagcacatcatcattcgaagtcttgggcaatagagataggttatcaaacccggcaggtttcgtgtacaagaagtgatggacaaaatgctatgttaagcctttgccttcaagattccttcccattgactgttcagtcctgcatcatgcccaaagactgtgaaacctcccagtggtcctcctggagcccctgctccaagacatgccgttcagggagtctcttgccaggatttaggagcaggagccggaacgtgaagcacatggctattggaggtggaaaggagtgtcctgaacttcttgagaaagaggcctgcattgttgaaggagaacttctgcagcaatgtcccaggtattcctggagaacttctgaatggaaagaatgccaagtctctctcctcctcgagcagcaggatccccactggcatgtgacgggacccgtgtgtggcggtgggatccagacccgggaggtgtactgtgcccagagcgtaccagcagctgccgcactgagggccaaggaagtctctagacctgtggaaaaggcattatgtgtgggacccgccccgttgccctctcagctctgcaatatcccttgctctacggactgcatagtatcttcctggtcagcctggggcctgtgcatccatgaaaactgtcatgatcctcaggggaaaaaaggatttagaacgaggcagcgccatgtcctcatggaatctacagggcctgcagggcattgccctcatttggtggagtctgttccttgtgaggatccaatgtgctaccgatggctggcatcagaagggatctgtttccctgatcatggaaaatgtggcctgggacatcgtattctgaaggccgtctgccagaatgaccgcggagaagatgtatcagggagtctttgcccagttccccctcctcctgagaggaagtcttgtgaaattccctgccgaatggactgtgtgctgagcgagtggacggagtggtcatcctgttcccagtcctgttcaaataaaaactcagatgggaaacagaccaggtcaagaactatcctggcactggctggggaaggtggaaagccatgtccccctagtcaggctctccaagagcatcgtttgtgtaatgaccattcctgtatgcagcttcactgggagacatcgccttggggcccttgttctgaggacacattggtaactgcccttaatgcaaccattggctggaatggagaagccacgtgtggtgtaggcattcagactcggagagtcttctgtgtcaagagtcacgtgggacaagtaatgaccaaaagatgtccagattctactcgacctgaaactgtgcgcccctgttttctcccatgcaaaaaagactgtattgtgactgctttcagtgagtggacaccctgcccaaggatgtgccaagcaggaaatgccacagtaaaacagtctcgatacagaatcatcatccaagaagcagccaatggaggccaggaatgcccagataccttatatgaggagagagagtgtgaagatgtttccttgtgtcctgtatatcggtggaagccacagaaatggagcccttgcatcttagtgccagagtctgtctggcagggaataacgggcagcagtgaagcctgtggaaaggggttacaaacaagagctgtctcatgcatctctgatgacaaccggtcagcagaaatgatggaatgcctcaagcagacaaacggcatgcctctccttgtgcaagaatgcacagtcccatgtcgagaagactgcaccttcactgcttggtccaagtttacgccctgctccacgaactgtgaagccacaaaaagtaggcggcgacagctcacagggaaaagcagaaagaaggagaaatgccaggattctgacctttaccctctagtggagacagaactatgtccttgtgatgaatttatatcccaaccttatggaaactggtcagattgcattcttccagaaggcagaagggagcctcaccgaggactgcgggtacaagcagacagcaaagaatgtggagaaggcctgcgctttcgagcagtagcctgttctgataaaaatggaagacctgttgacccctccttctgcagcagctctggttacattcaagaaaaatgtgtcattccctgcccatttgattgcaagttaagcgattggtctagttgggggtcttgcagttcatcttgtggaattggagtgagaattcgatccaaatggctaaaagaaaaaccttacaatggaggacgaccatgtcccaaactggatctcaagaatcaggtaaagtacatgaggcagtcccatgttacagtgagtgcaatcagtattcctgggttgtagaacactggtcttcatgcaaaatcaacaatgagctgaggtccctgcgctgtggaggaggaacacaatctaggaaaatcagatgtgtgaatactgcggatggtgaaggtggagcagtggatagcaacctgtgcaaccaggatgaaattcccccagaaacccagtcctgttctcttatgtgtcccaatgagtgtgtcatgtctgagtggggactttggagcaaatgcccacagtcatgcgatccccacacaatgcagagaagaactcgccacctgctaagaccatcactgaactcaaggacttgtgctgaagactcacaggtgcagccttgcctcctgaatgaaaattgcttccagttccagtacaatctaacagagtggagcacatgccagctgagtgaaaacgcaccctgtggtcaaggcgtcaggacccgcctgctaagctgtgtgtgcagtgatggcaagccagtcagcatggaccaatgtgagcagcataatttggagaagccccagagaatgagcattccctgcttggtggaatgcgtggtcaactgtcagctctcagggtggacggcttggacagagtgttcacagacctgtggccatggaggtcgaatgagccggactcgatttatcattatgccaacccaaggagaaggacggccatgccccacagagcttacccaggagaaaacctgcccagtgaccccctgctacagctgggtccttggcaactggtctgcatgtaaattggagggtggagactgtggggaaggagttcagatccgcagcctttcctgcatggtccacagtggttcaatatctcatgcagctggacgtgtcgaggatgcactgtgtggagaaatgccctttcaggacagcatcctgaagcagctgtgttctgtgccttgcccaggagactgccatttaacagaatggtcagagtggagcacatgtgaattaacctgcattgatggaagaagctttgagactgtgggccgccagtctagatcaaggacttttataattcagtcttttgagaaccaagacagctgcccccaacaggttctagaaacacgcccttgtacaggaggcaaatgttatcactacacatggaaagcaagtctttggaacaataacgaacgaactgtatggtgccagcgttcagatggcgttaatgtcacaggaggctgctcccctcaggcccgtcctgctgccattcggcagtgcattccagcctgcagaaaacctttctcctactgtacacagggtggagtctgtggttgtgagaagggctatacagagataatgaaatcaaatggtttcctggattactgcatgaaagtaccaggctcagaggataaaaaagctgatgtgaaaaacctttctgggaaaaacagacctgtgaattcaaaaatacatgatatttttaaaggatggtctcttcaaccacttgatccagatggccgagtaaaaatttgggtttatggcgtttcaggtggcgcttttctcatcatgattttcctaatatttacttcctaccttgtttgcaagaagccaaaaccacatcaaagcacacctccccaacagaagcctctgaccttagcctacgatggagacttagacatgtaatctgaaaaagaaatccaaatgtagacatcaactgccttaaccgctttctcttttgtagctctcagacttctcagttttttgaggaatctcaagatgtgatatattgggcagaatacaaatattgcaaaagtaatattgcctcaacttcatttggacatggagtcaaggattattaggtctgccattttgttttcaagttgtttgtgggtgtgttttatttttttggttttcccaagggacctgaaaacccttctcttcctgtttggaactgggaggaagaaaacatgatggaattcccacagacttgagtaaacttgatcttcagcagcataatgacaatccagaggaaaatacagtcaaggcatttactctaaatgacgagtctgacactgcattgttacgcactatattagtgcaaagtctttattcttcccatacttcaacactgagttttctagagtttactttggtttaaagactttcaaattggattgcctatttttcatgaacacagagagaatggattaccatttcagaaattctctgagtttttaacctttaaatattgtattttgttttgtagccaggggatgatggcgcttcatgggttgcagctactgaaaatagcagcgtgtgtgtaattgctggactagatgaaagctaggtcatttctgaagggaatgtgtactgaatgttagagtgtacaaatgaaatatgtggttaaattggagaatgaggtagattatttgattactaaaactgtattttaacaaaaacttatccatgtagatatagcattaaccacacacagttgtaattcagtttaatgatgacaaactctgcttttgtaatttcaattttcttatctgaatatttataaattcttctttcaaatttaattatctgacctcatttaatatacatcaaacaccgatcctgtttgtacaaagtcttgcttttataaggtttcaataatatctaaaacaacacattaaaaagctgagaccattttatgaagataattgtttgtaatcataggtgttgaaagtaaaaaggtgccatcttgtggtattgacttgtatttataacaaataaactgctcaagagactgc

SEQ ID NO: 8460 - protein, 1056 aa, Homo sapiens
MRTADEVCHTLGIGKNLEKEKKRVCSVKGGQLGQLWPGPWGRCTGDCGPGGVQSRAVWCFHVDGWTSHLSNCGESNRPPKERSCFRVCDWHSDLFQWEVSDWHHCVLVPYARGEVKPRTAECVTAQHGLQHRMVRCIQKLNRTVVANEICEHFALQPPTEQACLIPCPRDCVVSEFLPWSNCSKGCGKKLQHRTRAVIAPPLFGGLQCPNLTESRACDAPISCPLGEEEYTFSLKVGPWSKCRLPHLKEINPSGRTVLDFNSDSNERVTFKHQSYKAHHHSKSWAIEIGYQTRQVSCTRSDGQNAMLSLCLQDSFPLTVQSCIMPKDCETSQWSSWSPCSKTCRSGSLLPGFRSRSRNVKHMAIGGGKECPELLEKEACIVEGELLQQCPRYSWRTSEWKECQVSLLLEQQDPHWHVTGPVCGGGIQTREVYCAQSVPAAAALRAKEVSRPVEKALCVGPAPLPSQLCNIPCSTDCIVSSWSAWGLCIHENCHDPQGKKGFRTRQRHVLMESTGPAGHCPHLVESVPCEDPMCYRWLASEGICFPDHGKCGLGHRILKAVCQNDRGEDVSGSLCPVPPPPERKSCEIPCRMDCVLSEWTEWSSCSQSCSNKNSDGKQTRSRTILALAGEGGKPCPPSQALQEHRLCNDHSCMQLHWETSPWGPCSEDTLVTALNATIGWNGEATCGVGIQTRRVFCVKSHVGQVMTKRCPDSTRPETVRPCFLPCKKDCIVTAFSEWTPCPRMCQAGNATVKQSRYRIIIQEAANGGQECPDTLYEERECEDVSLCPVYRWKPQKWSPCILVPESVWQGITGSSEACGKGLQTRAVSCISDDNRSAEMMECLKQTNGMPLLVQECTVPCREDCTFTAWSKFTPCSTNCEATKSRRRQLTGKSRKKEKCQDSDLYPLVETELCPCDEFISQPYGNWSDCILPEGRREPHRGLRVQADSKECGEGLRFRAVACSDKNGRPVDPSFCSSSGYIQEKCVIPCPFDCKLSDWSSWGSCSSSCGIGVRIRSKWLKEKPYNGGRPCPKLDLKNQVKYMRQSHVTVSAISIPGL

SEQ ID NO: 8461 - DNA, 2362 bp, Homo sapiens
gcctcatcttaaagaaattaatccaagcggaagaactgttctggattttaactctgattcaaatgagcgagtcacctttaaacatcaaagttacaaagcacatcatcattcgaagtcttgggcaatagagataggttatcaaacccggcaggtttcgtgtacaagaagtgatggacaaaatgctatgttaagcctttgccttcaagattccttcccattgactgttcagtcctgcatcatgcccaaagactgtgaaacctcccagtggtcctcctggagcccctgctccaagacatgccgttcagggagtctcttgccaggatttaggagcaggagccggaacgtgaagcacatggctattggaggtggaaaggagtgtcctgaacttcttgagaaagaggcctgcattgttgaaggagaacttctgcagcaatgtcccaggtattcctggagaacttctgaatggaaagaatgccaagtctctctcctcctcgagcagcaggatccccactggcatgtgacgggacccgtgtgtggcggtgggatccagacccgggaggtgtactgtgcccagagcgtaccagcagctgccgcactgagggccaaggaagtctctagacctgtggaaaaggcattatgtgtgggacccgccccgttgccctctcagctctgcaatatcccttgctctacggactgcatagtatcttcctggtcagcctggggcctgtgcatccatgaaaactgtcatgatcctcaggggaaaaaaggatttagaacgaggcagcgccatgtcctcatggaatctacagggcctgcagggcattgccctcatttggtggagtctgttccttgtgaggatccaatgtgctaccgatggctggcatcagaagggatctgtttccctgatcatggaaaatgtggcctgggacatcgtattctgaaggccgtctgccagaatgaccgcggagaagatgtatcagggagtctttgcccagttccccctcctcctgagaggaagtcttgtgaaattccctgccgaatggactgtgtgctgagcgagtggacggagtggtcatcctgttcccagtcctgttcaaataaaaactcagatgggaaacagaccaggtcaagaactatcctggcactggctggggaaggtggaaagccatgtccccctagtcaggctctccaagagcatcgtttgtgtaatgaccattcctgtatgcagcttcactgggagacatcgccttggggcccttgttctgaggacacattggtaactgcccttaatgcaaccattggctggaatggagaagccacgtgtggtgtaggcattcagactcggagagtcttctgtgtcaagagtcacgtgggacaagtaatgaccaaaagatgtccagattctactcgacctgaaactgtgcgcccctgttttctcccatgcaaaaaagactgtattgtgactgctttcagtgagtggacaccctgcccaaggatgtgccaagcaggaaatgccacagtaaaacagtctcgatacagaatcatcatccaagaagcagccaatggaggccaggaatgcccagataccttatatgaggagagagagtgtgaagatgtttccttgtgtcctgtatatcggtggaagccacagaaatggagcccttgcatcttagtgccagagtctgtctggcagggaataacgggcagcagtgaagcctgtggaaaggggttacaaacaagagctgtctcatgcatctctgatgacaaccggtcagcagaaatgatggaatgcctcaagcagacaaacggcatgcctctccttgtgcaagaatgcacagtcccatgtcgagaagactgcaccttcactgcttggtccaagtttacgccctgctccacgaactgtgaagccacaaaaagtaggcggcgacagctcacagggaaaagcagaaagaaggagaaatgccaggattctgacctttaccctctagtggagacagaactatgtccttgtgatgaatttatatcccaaccttatggaaactggtcagattgcattcttccagaaggcagaagggagcctcaccgaggactgcgggtacaagcagacagcaaagaatgtggagaaggcctgcgctttcgagcagtagcctgttctgataaaaatggaagacctgttgacccctccttctgcagcagctctggtaaggagatggatggagagtaacagatgagaacactcacacacagctcgggaggtttgtctcaggtctagaattaatagctctgctctataataattgttttaattttcctttgtcaataacacattgtctctcataaaatatggacagatgaaatgcat

SEQ ID NO: 8462 - protein, 679 aa, Homo sapiens
MLSLCLQDSFPLTVQSCIMPKDCETSQWSSWSPCSKTCRSGSLLPGFRSRSRNVKHMAIGGGKECPELLEKEACIVEGELLQQCPRYSWRTSEWKECQVSLLLEQQDPHWHVTGPVCGGGIQTREVYCAQSVPAAAALRAKEVSRPVEKALCVGPAPLPSQLCNIPCSTDCIVSSWSAWGLCIHENCHDPQGKKGFRTRQRHVLMESTGPAGHCPHLVESVPCEDPMCYRWLASEGICFPDHGKCGLGHRILKAVCQNDRGEDVSGSLCPVPPPPERKSCEIPCRMDCVLSEWTEWSSCSQSCSNKNSDGKQTRSRTILALAGEGGKPCPPSQALQEHRLCNDHSCMQLHWETSPWGPCSEDTLVTALNATIGWNGEATCGVGIQTRRVFCVKSHVGQVMTKRCPDSTRPETVRPCFLPCKKDCIVTAFSEWTPCPRMCQAGNATVKQSRYRIIIQEAANGGQECPDTLYEERECEDVSLCPVYRWKPQKWSPCILVPESVWQGITGSSEACGKGLQTRAVSCISDDNRSAEMMECLKQTNGMPLLVQECTVPCREDCTFTAWSKFTPCSTNCEATKSRRRQLTGKSRKKEKCQDSDLYPLVETELCPCDEFISQPYGNWSDCILPEGRREPHRGLRVQADSKECGEGLRFRAVACSDKNGRPVDPSFCSSSGKEMDGE

SEQ ID NO: 8463 - DNA, 302 bp, Homo sapiens
cagaattttcaaatcaccgaaccccaaagttatgggaatttgttgccaagggagaaagacagtggaatttctgctttcctgatctgcagaaactataaaactgacccaatagatatggatatcgcctcatcagcaaagcagcactctcgcatattctttcctgaagggcttgatgcttcctgtctggtttctagctctgactgatgtagagggtaatgtaaacaccataaagaatccatagggaagttcatataaggccaaaaacggaatctgaaaataaagtatctaaatatacatgctaa

SEQ ID NO: 8464 - protein, 31 aa, Homo sapiens
EFSNHRTPKLWEFVAKGERQWNFCFPDLQKL

SEQ ID NO: 8465 - DNA, 289 bp, Homo sapiens
cacaacttccaccacaaggaaagtctattatcatcttcaagtaaaagaatgcctggtggtaaaggttagctcatgtattttaagaagagtgatgccaatccaaggggaaacgtacctagccctggatatgataccctttgtgtcgtttggaaagtgatgctgttaatacctcagttgaaatcttcacatctcatagtacattacctatttttatatgaaatcagctgcttcataattaaatttgatgcatgacatttttgaatgtaaaattttactagtaaataaattg

SEQ ID NO: 8466 - protein, 59 aa, Homo sapiens
MYFKKSDANPRGNVPSPGYDTLCVVWKVMLLIPQLKSSHLIVHYLFLYEISCFIIKFDA

SEQ ID NO: 8467 - DNA, 531 bp, Homo sapiens
gtttgtactttgaagactaaaagaagtagaagacagaatttcagatcctttaagcattgtgaaaacctagatagcctgtgtctctgtggaactctaaatgaaaatgacagaaaaactaaaagtgagataggacagagttcagtctattaaaatgaagacttacatgtataaggcaacattctgttcttcaggtccctttccaagccaaactaactgaaaagctgacacctcccttatcattttaggtcgaatgagccggactcgatttatcattatgccaacccaaggagaaggacggccatgccccacagagcttacccaggagaaaacctgcccagtgaccccctgctacagctgggtccttggcaactggtctgcatgtaaattggagggtggagactgtggggaaggagttcagatccgcagcctttcctgcatggtccacagtggttcaatatctcatgcagctggacgtgtcgaggatgcactgtgtggagaaatgccctttcaggacagcatcctgaagcagct

SEQ ID NO: 8468 - protein, 92 aa, Homo sapiens
MSRTRFIIMPTQGEGRPCPTELTQEKTCPVTPCYSWVLGNWSACKLEGGDCGEGVQIRSLSCMVHSGSISHAAGRVEDALCGEMPFQDSILK

SEQ ID NO: 8469 - DNA, 8192 bp, Homo sapiens
ggtctaggagggagcgcgccgcacgcgtgagtaaacagccggagctgggaaagtcgagctctggcagcgtctgggtgctgaggggcagaggcggagagaaccctgtcctgatcttcctagggtggccgacatgacggccaggggtcagagccccctcgcgccgctgttggagactttggaagacccttctgcctcccatggagggcagactgacgcttacctgactctgaccagtcgtatgactggagaagaaggaaaagaagtaattacagaaattgagaaaaaacttcctcggctgtacaaagttttaaagactcacatttccagtcaaaactcggagctgagtagtgctgctctacaagccctggggttttgcttatataatcccaaaattacctcagaattatcagaggcaaatgctctagaattgctttcaaaattgaatgataccattaagaattcagacaaaaatgtacgtactagagcactttgggtgatatctaagcagacatttccctctgaagtggttggcaaaatggtatccagtataattgattcattagaaatactgtttaacaaaggagagacgcattctgctgttgttgattttgaagcattaaatgttatcgtaaggctaattgaacaagccccaattcaaatgggagaagaggcagtgaggtgggcaaaactggtcatacctttagtggttcattcagcacaaaaggtacatttgcggggagcaactgctctggagatgggaatgccattattgcttcagaaacagcaagaaatagcatctattacggagcagcttatgactactaaattaatctcagaacttcagaagctatttatgagtaaaaatgagacttacgtgttaaaattatggcctttgtttgtcaaactacttggaaggaccttgcatcgaagtgggagtttcatcaattctctcttgcaactagaagaacttggatttcgtagtggagcacccatgattaaaaagatagcttttattgcttggaagagtttaatagataattttgctttaaatccagatatactatgtagtgcaaaaagactcaagttgttaatgcagcctttgagttccatccatgtgagaacagaaactctagcattaacaaaactagaagtctggtggtatttactgatgagacttggacctcatcttcctgctaattttgaacaggtttgtgtgcctctgattcaaagtacaataagcattgattctaatgcctcacctcagggcaattcgtgtcatgtagctacatctccaggtttaaatcctatgactcctgtacacaaaggtgcttcctccccgtacggagccccgggaactccccgaatgaacctgagttcgaatttaggtggaatggccacaatcccatccattcaacttttgggacttgaaatgttgcttcatttcttgttgggtccagaagccttgagttttgctaagcaaaataaacttgtgctgagcttagagccattggaacatccgttaatcagcagcccttcctttttttccaaacatgcaaatacacttatcactgctgttcatgatagctttgttgcagttggaaaagatgcccccgatgtggttgtcagtgctatctggaaggagctaattagcttggtgaagtcagttactgaatcaggtaacaaaaaagagaaaccaggttctgaagttttgactctcttattaaagtctttggaaagcatagtaaagtctgaagtatttcctgtatcaaaaacgctggtcctcatggaaattacaattaaaggacttcctcagaaagtattaggttcaccagcatatcaggttgctaatatggatattcttaatggaactccagctttgttcttaattcaattaattttcaacaatttcttggaatgtggtgtatcagatgaaaggttctttctcagtttggaatcacttgtaggctgtgttctttctggtccaacttcaccactagctttcagtgactcagttttaaatgttattaatcaaaatgcaaagcagttggaaaataaggagcatctctggaaaatgtggagtgttatagtcaccccattaactgaattgattaatcagaccaatgaagtaaatcaaggtgatgccttagaacataattttagtgccatctatggtgcattgactttaccagtaaaccacattttttcagaacagagatttccagtggccaccatgaagactttgcttagaacttggtcagaattatatagagcatttgctcgttgtgctgctttggtggcaacagcagaagagaacttgtgctgtgaggaactttcttccaagataatgtccagtttggaagatgaaggcttttctaatttgttgttcgtggatagaattatttatattattactgtaatggttgattgcattgacttctcaccatataatattaaatatcagcccaaagttaaatcaccacagagaccttcagattggtccaaaaagaagaatgagcccctagggaaattgacttctttatttaaacttattgtgaaagtgatctattctttccacacactgagcttcaaggaagcacattctgataccctcttcactattggcaactcaatcaccggcattatttccagtgtacttgggcatatttctttgccttctatgatccgaaaaatatttgcaactttaacaagacctctggcattattttatgaaaactcaaagcttgatgaagttcctaaagtatatagttgtctgaacaacaagttagaaaagctactgggagaaattattgcttgtctgcaattcagctacaccggaacttatgatagtgaacttcttgaacaactctccccactattatgcataatatttctgcacaagaataaacagattcgaaaacagagtgctcagttctggaatgccacttttgccaaagtgatgatgttggtttatcctgaagagttaaaaccagtactaacacaagccaaacaaaaatttctgctcctgttgcctggtttggaaactgttgaaatgatggaggaatccagtggaccatattctgatggaacagaaaattcacaactaaatgtgaagataagtggcatggagagaaaatcaaatggaaaaagagattcatttttggcacaaacaaagaataaaaaagaaaatatgaaaccagcagccaaactgaaacttgaatcttcgtctttaaaagtaaagggtgaaattcttttggaagaggaaaagtctactgactttgtgtttatacctccagaaggaaaagatgcaaaggaaagaatattaactgatcatcaaaaagaagttctcaaaacaaagcggtgtgatattcctgccatgtataataatctggatgtttcccaagataccttatttactcagtatagtcaggaagagcctatggaaattcctactttaaccagaaaaccaaaggaggattctaagatgatgattacggaggagcaaatggacagtgacattgtcattcctcaagatgtcacggaagactgtggtatggctgaacatcttgaaaagtcctccctttcgaataatgagtgtggttctcttgacaaaaccagtccagaaatgtcaaacagtaataatgatgaaagaaaaaaagctttaatttcatcaaggaaaacatcaactgaatgtgcatctagtacagaaaattctttcgttgtcagcagtagttcagtttctaataccactgttgctggaactcccccataccctacaagtcggaggcaaacctttattactttggagaagtttgatggttcagaaaatagaccttttagtccatcccccttgaataatatttcatcaactgttacagtgaaaaataaccaggaaaccatgattaaaacagattttctaccaaaagcaaagcaaagagaagggactttttcaaaatctgattctgaaaaaatagtgaatggaactaagagatcaagccggagagctggtaaagctgaacaaacagggaataaaaggtctaagcccttaatgagatctgagccggagaaaaatactgaggaatctgttgaaggcattgtagtcttagaaaataacccacctggtttgcttaatcaaacagaatgtgtgtcagataatcaggttcatctttctgaatctacaatggagcatgacaatacaaagcttaaagcagcaacagtggaaaatgctgtattattggaaactaatactgtagaggagaaaaatgtagaaattaatttggaatccaaagagaatacacccccagtagtaatatcagcagatcaaatggtaaatgaggatagtcaggttcagataactccaaatcagaaaacccttagacggtcttcaaggcgacgttcagaagtagtagagtctaccactgaaagccaagataaggaaaatagtcatcaaaaaaaggaacgacgtaaggaagaagaaaaacctcttcagaagagtccattgcatataaaagatgatgtgttacctaaacaaaaactgattgctgaacaaactctacaggagaatttaattgagaaaggaagtaatttacatgagaagactcttggggaaactagtgctaatgcagaaactgaacaaaataaaaaaaaggcagaccctgagaacattaagtctgagggggatggtacccaggacattgtagataagtcctctgagaaactagtcagaggccgaacacggtatcaaactagaagagcatctcagggtttgctttccagcattgaaaactcagaatctgatagttcggaggcaaaagaagaaggttctaggaagaagagatctggaaaatggaaaaacaaaagcaatgaaagtgttgacattcaagatcaagaagagaaagtggtgaaacaggaatgtataaaagctgaaaatcagtcacatgattataaagcaacttctgaagaagatgtaagcataaaatctccgatttgcgaaaaacaagatgaaagtaatactgtaatatgtcaggattctacagtaacttcagatttgttgcaagttcctgatgatttaccaaatgtgtgtgaggaaaaaaatgaaactagcaaatatgcagaatattcctttacaagtctacctgtgccagaatcaaatctaaggactagaaatgccattaagagattacataagcgagactcttttgataattgtagtttgggagaatcctcaaaaatagggatatcagatatttcttcgctttcagaaaaaacttttcaaacacttgaatgccaacacaagagaagtaggagggtgaggagatctaaaggttgtgattgctgtggggaaaaatcacaacctcaggaaaagtcactcattgggttaaagaatacagaaaataatgacgtagagattagtgaaacaaaaaaggcagatgtgcaagcacctgtaagcccatcagaaacttctcaagctaatccatattctgaaggacaatttttagatgaacatcatagtgtgaattttcatttgggtctcaaagaggataatgatactattaatgattcattaattgtttctgaaaccaaatcaaaagaaaacactatgcaagaatctcttccttctggaatagtaaactttagagaggaaatttgtgatatggattctagtgaagcaatgtctcttgaaagccaggagtcacctaatgaaaattttaaaactgttggcccgtgtttaggagactcgaaaaatgtttcacaggaatctttggagacaaaagaagaaaaaccagaagaaaccccaaaaatggaactgagtctagagaatgttactgttgaaggaaatgcatgtaaagtaacagaatccaatctagagaaagcaaaaactatggaattgaatgtaggaaatgaagctagctttcatggacaagagagaaccaaaactggtatttctgaagaagcagcaatagaagaaaataaaagaaatgatgactctgaagcagacacagctaaactgaatgccaaagaagtagcaactgaggaatttaattcagatattagtctttctgataatactacacctgtaaaattgaatgctcaaactgagatttctgaacaaacagcagctggggaactagatggaggaaatgatgtatctgatctacactcatctgaagaaacgaataccaaaatgaaaaataatgaagaaatgatgatcggcgaggcaatggctgaaactggccatgatggtgaaacagagaatgagggcataactaccaaaacctcaaagcctgatgaagctgaaacaaacatgttgactgcagaaatggacaactttgtttgtgacacagttgaaatgagcactgaagaaggaatcattgacgctaataaaactgaaacaaatactgagtatagtaaatctgaagaaaaattagataacaatcaaatggtaatggaaagtgatattttacaggaagatcaccatacttcacagaaagtggaggaaccatcacagtgtctggcatctggaacagctatctctgagctaataatagaagacaataatgcatctcctcaaaaactaagggaacttgatccttcacttgtgtcagcaaatgacagtcctagtggcatgcagacacgctgtgtctggtctcctttggcttctccgtctacgagcattttaaagagaggactaaaaagatcccaagaagatgaaatctcatcacctgttaataaggttcgccgtgtctcctttgcagatccaatataccaagcaggattggcagatgacattgatagacggtgctctattgttaggtcccattcttccaatagttctcccataggaaaaagtgttaaaacttctcctactacacaatctaagcataataccacttcagccaaaggatttctgtccccaggatcacgtagccctaaatttaagagctcaaagaagtgtttaatttcagaaatggccaaagaatccataccatgcccaacagaaagtgtttacccaccattggtgaactgtgtggcaccagttgacatcattttacctcagattacatcaaacatgtgggcaagaggcctgggacaactcattagagctaagaatataaaaactattggtgatttgagtactcttacagcatctgaaataaaaactcttcctatccgttctccaaaagtgtccaatgtaaaaaaggctctcagaatatatcatgagcagcaggtgaagactcgtggactagaagagattccagtttttgatatttctgaaaaaacagtaaatggaatagaaaataaatctttgtcacctgatgaagaaagacttgtctcagatataattgatcctgttgctttagaaattccattatccaaaaaccttctggcacagattagtgctcttgctcttcagctggattcagaagatcttcataattattcaggaagccaactatttgaaatgcacgagaaactaagttgtatggcaaactctgtaataaaaaatctacagtcacgttggagatcaccatcccatgaaaattctatttagtattttcagagaaaattgaaggtttttttaaacatcactggatttcttgattgaggaaacaagttctgaaataatagcacaatttcaaagaagagactctttgcaaagttgataacatttcaaaccctgaaggacagtgacttattatgtaagttcaattttgtaagttcattatgtaagatccttttttttttcataatatgtattcttggctgctatgcgtggtttttcaggaaatttaattatcttactgagatgtgaaagcaaaactagtaacagaacttacattttatttcatgctttcttaaacccgtgcatattctggtgaaacatgtaaaatactttaagtaaaattgaacatttttatttgaatttttgctgaactgataaaggtgtttatatttttgtttgttggtttgtttaattcatgtttgttgggactgaggtttaggaagtttgttactggttaaaaacctcaaatgaaatgcgaaagaatttgaatttttcctgcatatgtcaactttggacagctttcaagaaaaatgagaaaagtttcaacttctggcggttaaaatattaatgcagaatttactaagattttattcatttgcattagcaaatattcatgcagcagcagttgact

SEQ ID NO: 8470 - protein, 2472 aa, Homo sapiens; identical to SEQ ID NO: 4440

SEQ ID NO: 8471 - DNA, 4434 bp, Homo sapiens
agataaggaaaatagtcatcaaaaaaaggaacgacgtaaggaagaagaaaaacctcttcagaagagtccattgcatataaaagatgatgtgttacctaaacaaaaactgattgctgaacaaactctacaggagaatttaattgagaaaggaagtaatttacatgagaagactcttggggaaactagtgctaatgcagaaactgaacaaaataaaaaaaaggcagaccctgagaacattaagtctgagggggatggtacccaggacattgtagataagtcctctgagaaactagtcagaggccgaacacggtatcaaactagaagagcatctcagggtttgctttccagcattgaaaactcagaatctgatagttcggaggcaaaagaagaaggttctaggaagaagagatctggaaaatggaaaaacaaaagcaatgaaagtgttgacattcaagatcaagaagagaaagtggtgaaacaggaatgtataaaagctgaaaatcagtcacatgattataaagcaacttctgaagaagatgtaagcataaaatctccgatttgcgaaaaacaagatgaaagtaatactgtaatatgtcaggattctacagtaacttcagatttgttgcaagttcctgatgatttaccaaatgtgtgtgaggaaaaaaatgaaactagcaaatatgcagaatattcctttacaagtctacctgtgccagaatcaaatctaaggactagaaatgccattaagagattacataagcgagactcttttgataattgtagtttgggagaatcctcaaaaatagggatatcagatatttcttcgctttcagaaaaaacttttcaaacacttgaatgccaacacaagagaagtaggagggtgaggagatctaaaggttgtgattgctgtggggaaaaatcacaacctcaggaaaagtcactcattgggttaaagaatacagaaaataatgacgtagagattagtgaaacaaaaaaggcagatgtgcaagcacctgtaagcccatcagaaacttctcaagctaatccatattctgaaggacaatttttagatgaacatcatagtgtgaattttcatttgggtctcaaagaggataatgatactattaatgattcattaattgtttctgaaaccaaatcaaaagaaaacactatgcaagaatctcttccttctggaatagtaaactttagagaggaaatttgtgatatggattctagtgaagcaatgtctcttgaaagccaggagtcacctaatgaaaattttaaaactgttggcccgtgtttaggagactcgaaaaatgtttcacaggaatctttggagacaaaagaagaaaaaccagaagaaaccccaaaaatggaactgagtctagagaatgttactgttgaaggaaatgcatgtaaagtaacagaatccaatctagagaaagcaaaaactatggaattgaatgtaggaaatgaagctagctttcatggacaagagagaaccaaaactggtatttctgaagaagcagcaatagaagaaaataaaagaaatgatgactctgaagcagacacagctaaactgaatgccaaagaagtagcaactgaggaatttaattcagatattagtctttctgataatactacacctgtaaaattgaatgctcaaactgagatttctgaacaaacagcagctggggaactagatggaggaaatgatgtatctgatctacactcatctgaagaaacgaataccaaaatgaaaaataatgaagaaatgatgatcggcgaggcaatggctgaaactggccatgatggtgaaacagagaatgagggcataactaccaaaacctcaaagcctgatgaagctgaaacaaacatgttgactgcagaaatggacaactttgtttgtgacacagttgaaatgagcactgaagaaggaatcattgacgctaataaaactgaaacaaatactgagtatagtaaatctgaagaaaaattagataacaatcaaatggtaatggaaagtgatattttacaggaagatcaccatacttcacagaaagtggaggaaccatcacagtgtctggcatctggaacagctatctctgagctaataatagaagacaataatgcatctcctcaaaaactaagggaacttgatccttcacttgtgtcagcaaatgacagtcctagtggcatgcagacacgctgtgtctggtctcctttggcttctccgtctacgagcattttaaagagaggactaaaaagatcccaagaagatgaaatctcatcacctgttaataaggttcgccgtgtctcctttgcagatccaatataccaagcaggattggcagatgacattgatagacggtgctctattgttaggtcccattcttccaatagttctcccataggaaaaagtgttaaaacttctcctactacacaatctaagcataataccacttcagccaaaggatttctgtccccaggatcacgtagccctaaatttaagagctcaaagaagtgtttaatttcagaaatggccaaagaatccataccatgcccaacagaaagtgtttacccaccattggtgaactgtgtggcaccagttgacatcattttacctcagattacatcaaacatgtgggcaagaggcctgggacaactcattagagctaagaatataaaaactattggtgatttgagtactcttacagcatctgaaataaaaactcttcctatccgttctccaaaagtgtccaatgtaaaaaaggctctcagaatatatcatgagcagcaggtgaagactcgtggactagaagagattccagtttttgatatttctgaaaaaacagtaaatggaatagaaaataaatctttgtcacctgatgaagaaagacttgtctcagatataattgatcctgttgctttagaaattccattatccaaaaaccttctggcacagattagtgctcttgctcttcagctggattcagaagatcttcataattattcaggaagccaactatttgaaatgcacgagaaactaagttgtatggcaaactctgtaataaaaaatctacagtcacgttggagatcaccatcccatgaaaattctatttagtattttcagagaaaattgaaggtttttttaaacatcactggatttcttgattgaggaaacaagttctgaaataatagcacaatttcaaagaagagactctttgcaaagttgataacatttcaaaccctgaaggacagtgacttattatccttcctttctccaaagaacagttaaaaccaaatgtgttatggtaagctgtaaataccgttggaataaaagataaccgttcatcttacctaaaaaattgaagacaatattttccattgttgatgtcacaatttcttgaagatggctctttgcagcctacgtggtagtggagatatatacaaaggacttccctagtatcgttggaccaacaagcacaagcagatggcaggaagattagaacattggatattgattgccagtttttaagtgtcattcttggaaacgtgggagatttaggaaatgacattgaagaggaagaattctgttgaaatagtgattctcaacgtggggtccttggacagcaagtgatggggattggaatcccttttccaacgttttctttatacaacacctgtatgacacaagaaagcatccagaaaaaacaagagcagtcaaaacagccctttcatctaccttgtggggaacctggtataaaactacagacgtcagacagaaaagacagattcaacaagtcaacctctctgttcaggcacagatctggttttaatgatgaactctacaatgctaattctggaaatgaaaaagtacaatggaaagcattaagttatataacgctgaggaatcttgttaattctacttatagtatttcaaatctagtcaagtcactgaaaatgttcaagtataatcggaaatgtgtctttccgatagccgttcctggtgagacatcctctttatataaaacctgggcattcagaatcaggacagtgttaacacagaagaaaagaaaacccagcagttcctggagaaagactaggacacatggcttttgtgaaaacaagacactagacgatgttcccaggggttttcgccatgaaccttgccatgggtgaggaaaagatactatattttctccccaataccaccaacgaagtaacagatgagtctttcatgctgtgatttgggattaagatacaaggtgagcccagagatgaattgggcacacatttcctggggcaggatgggagttgtggagggctgcacaacagccccactgcaagcctgggatatccagaggcatcttcctcagcacccctaggtgcctgtgggctgtgccttacatttaataaaaacttacaaggctg

SEQ ID NO: 8472 - protein, 650 aa, Homo sapiens
MQESLPSGIVNFREEICDMDSSEAMSLESQESPNENFKTVGPCLGDSKNVSQESLETKEEKPEETPKMELSLENVTVEGNACKVTESNLEKAKTMELNVGNEASFHGQERTKTGISEEAAIEENKRNDDSEADTAKLNAKEVATEEFNSDISLSDNTTPVKLNAQTEISEQTAAGELDGGNDVSDLHSSEETNTKMKNNEEMMIGEAMAETGHDGETENEGITTKTSKPDEAETNMLTAEMDNFVCDTVEMSTEEGIIDANKTETNTEYSKSEEKLDNNQMVMESDILQEDHHTSQKVEEPSQCLASGTAISELIIEDNNASPQKLRELDPSLVSANDSPSGMQTRCVWSPLASPSTSILKRGLKRSQEDEISSPVNKVRRVSFADPIYQAGLADDIDRRCSIVRSHSSNSSPIGKSVKTSPTTQSKHNTTSAKGFLSPGSRSPKFKSSKKCLISEMAKESIPCPTESVYPPLVNCVAPVDIILPQITSNMWARGLGQLIRAKNIKTIGDLSTLTASEIKTLPIRSPKVSNVKKALRIYHEQQVKTRGLEEIPVFDISEKTVNGIENKSLSPDEERLVSDIIDPVALEIPLSKNLLAQISALALQLDSEDLHNYSGSQLFEMHEKLSCMANSVIKNLQSRWRSPSHENSI

SEQ ID NO: 8473 - DNA, 2100 bp, Homo sapiens
ttcatggacaagagagaaccaaaactggtatttctgaagaagcagcaatagaagaaaataaaagaaatgatgactctgaagcagacacagctaaactgaatgccaaagaagtagcaactgaggaatttaattcagatattagtctttctgataatactacacctgtaaaattgaatgctcaaactgagatttctgaacaaacagcagctggggaactagatggaggaaatgatgtatctgatctacactcatctgaagaaacgaataccaaaatgaaaaataatgaagaaatgatgatcggcgaggcaatggctgaaactggccatgatggtgaaacagagaatgagggcataactaccaaaacctcaaagcctgatgaagctgaaacaaacatgttgactgcagaaatggacaactttgtttgtgacacagttgaaatgagcactgaagaaggaatcattgacgctaataaaactgaaacaaatactgagtatagtaaatctgaagaaaaattagataacaatcaaatggtaatggaaagtgatattttacaggaagatcaccatacttcacagaaagtggaggaaccatcacagtgtctggcatctggaacagctatctctgagctaataatagaagacaataatgcatctcctcaaaaactaagggaacttgatccttcacttgtgtcagcaaatgacagtcctagtggcatgcagacacgctgtgtctggtctcctttggcttctccgtctacgagcattttaaagagaggactaaaaagatcccaagaagatgaaatctcatcacctgttaataaggttcgccgtgtctcctttgcagatccaatataccaagcaggattggcagatgacattgatagacggtgctctattgttaggtcccattcttccaatagttctcccataggaaaaagtgttaaaacttctcctactacacaatctaagatttcagaaatggccaaagaatccataccatgcccaacagaaagtgtttacccaccattggtgaactgtgtggcaccagttgacatcattttacctcagattacatcaaacatgtgggcaagaggcctgggacaactcattagagctaagaatataaaaactattggtgatttgagtactcttacagcatctgaaataaaaactcttcctatccgttctccaaaagtgtccaatgtaaaaaaggctctcagaatatatcatgagcagcaggtgaagactcgtggactagaagagattccagtttttgatatttctgaaaaaacagtaaatggaatagaaaataaatctttgtcacctgatgaagaaagacttgtctcagatataattgatcctgttgctttagaaattccattatccaaaaaccttctggcacagattagtgctcttgctcttcagctggattcagaagatcttcataattattcaggaagccaactatttgaaatgcacgagaaactaagttgtatggcaaactctgtaataaaaaatctacagtcacgttggagatcaccatcccatgaaaattctatttagtattttcagagaaaattgaaggtttttttaaacatcactggatttcttgattgaggaaacaagttctgaaataatagcacaatttcaaagaagagactctttgcaaagttgataacatttcaaaccctgaaggacagtgacttattatgtaagttcaattttgtaagttcattatgtaagatccttttttttttcataatatgtattcttggctgctatgcgtggtttttcaggaaatttaattatcttactgagatgtgaaagcaaaactagtaacagaacttacattttatttcatgctttcttaaacccgtgcatattctggtgaaacatgtaaaatactttaagtaaaattgaacatttttatttgaatttttgctgaactgataaaggtgtttatatttttgtttgttggtttgtttaattcatgtttgttgggactgaggtttaggaagtttgttactggttaaaaacctcaaatgaaatgcgaaagaatttgaatttttcctgcatatgtcaactttggacagctttcaag

SEQ ID NO: 8474 - protein, 429 aa, Homo sapiens
MKNNEEMMIGEAMAETGHDGETENEGITTKTSKPDEAETNMLTAEMDNFVCDTVEMSTEEGIIDANKTETNTEYSKSEEKLDNNQMVMESDILQEDHHTSQKVEEPSQCLASGTAISELIIEDNNASPQKLRELDPSLVSANDSPSGMQTRCVWSPLASPSTSILKRGLKRSQEDEISSPVNKVRRVSFADPIYQAGLADDIDRRCSIVRSHSSNSSPIGKSVKTSPTTQSKISEMAKESIPCPTESVYPPLVNCVAPVDIILPQITSNMWARGLGQLIRAKNIKTIGDLSTLTASEIKTLPIRSPKVSNVKKALRIYHEQQVKTRGLEEIPVFDISEKTVNGIENKSLSPDEERLVSDIIDPVALEIPLSKNLLAQISALALQLDSEDLHNYSGSQLFEMHEKLSCMANSVIKNLQSRWRSPSHENSI

SEQ ID NO: 8475 - DNA, 2395 bp, Homo sapiens
ttcatggacaagagagaaccaaaactggtatttctgaagaagcagcaatagaagaaaataaaagaaatgatgactctgaagcagacacagctaaactgaatgccaaagaagtagcaactgaggaatttaattcagatattagtctttctgataatactacacctgtaaaattgaatgctcaaactgagatttctgaacaaacagcagctggggaactagatggaggaaatgatgtatctgatctacactcatctgaagaaacgaataccaaaatgaaaaataatgaagaaatgatgatcggcgaggcaatggctgaaactggccatgatggtgaaacagagaatgagggcataactaccaaaacctcaaagcctgatgaagctgaaacaaacatgttgactgcagaaatggacaactttgtttgtgacacagttgaaatgagcactgaagaaggaatcattgacgctaataaaactgaaacaaatactgagtatagtaaatctgaagaaaaattagataacaatcaaatggtaatggaaagtgatattttacaggaagatcaccatacttcacagaaagtggaggaaccatcacagtgtctggcatctggaacagctatctctgagctaataatagaagacaataatgcatctcctcaaaaactaagggaacttgatccttcacttgtgtcagcaaatgacagtcctagtggcatgcagacacgctgtgtctggtctcctttggcttctccgtctacgagcattttaaagagaggactaaaaagatcccaagaagatgaaatctcatcacctgttaataaggttcgccgtgtctcctttgcagatccaatataccaagcaggattggcagatgacattgatagacggtgctctattgttaggtcccattcttccaatagttctcccataggaaaaagtgttaaaacttctcctactacacaatctaagatttcagaaatggccaaagaatccataccatgcccaacagaaagtgtttacccaccattggtgaactgtgtggcaccagttgacatcattttacctcagattacatcaaacatgtgggcaagaggcctgggacaactcattagagctaagaatataaaaactattggtgatttgagtactcttacagcatctgaaataaaaactcttcctatccgttctccaaaagtgtccaatgtaaaaaaggctctcagaatatatcatgagcagcaggtgaagactcgtggactagaagagattccagtttttgatatttctgaaaaaacagtaaatggaatagaaaataaatctttgtcacctgatgaagaaagacttgtctcagatataattgatcctgttgctttagaaattccattatccaaaaaccttctggcacagattagtgctcttgctcttcagctggattcagaagatcttcataattattcaggaagccaactatttgaaatgcacgagaaactaagttgtatggcaaactctgtaataaaaaatctacagtcacgttggagatcaccatcccatgaaaattctatttagtattttcagagaaaattgaaggtttttttaaacatcactggatttcttgattgaggaaacaagttctgaaataatagcacaatttcaaagaagagactctttgcaaagttgataacatttcaaaccctgaaggacagtgacttattatgtaagttcaattttgtaagttcattatgtaagatccttttttttttcataatatgtattcttggctgctatgcgtggtttttcaggaaatttaattatcttactgagatgtgaaagcaaaactagtaacagaacttacattttatttcatgctttcttaaacccgtgcatattctggtgaaacatgtaaaatactttaagtaaaattgaacatttttatttgaatttttgctgaactgataaaggtgtttatatttttgtttgttggtttgtttaattcatgtttgttgggactgaggtttaggaagtttgttactggttaaaaacctcaaatgaaatgcgaaagaatttgaatttttcctgcatatgtcaactttggacagctttcaagaaaaatgagaaaagtttcaacttctggcggttaaaatattaatgcagaatttactaagattttattcatttgcattagcaaatattcatgcagcagcagttgactgaaaatttattcttatgagacgtatagtattcatttttaaatgcatgattgtacattatgtatagacgacaatgtttttaatttataaatttcattctttgttaattgcatgggtttttctgcagcttattgtgaataccttggttctgttcaatagaaacattttgtatatattaaatactgaaatatc

SEQ ID NO: 8476 - protein, 429 aa, Homo sapiens; identical to SEQ ID NO: 8474

SEQ ID NO: 8477 - DNA, 4214 bp, Homo sapiens
ttcatggacaagagagaaccaaaactggtatttctgaagaagcagcaatagaagaaaataaaagaaatgatgactctgaagcagacacagctaaactgaatgccaaagaagtagcaactgaggaatttaattcagatattagtctttctgataatactacacctgtaaaattgaatgctcaaactgagatttctgaacaaacagcagctggggaactagatggaggaaatgatgtatctgatctacactcatctgaagaaacgaataccaaaatgaaaaataatgaagaaatgatgatcggcgaggcaatggctgaaactggccatgatggtgaaacagagaatgagggcataactaccaaaacctcaaagcctgatgaagctgaaacaaacatgttgactgcagaaatggacaactttgtttgtgacacagttgaaatgagcactgaagaaggaatcattgacgctaataaaactgaaacaaatactgagtatagtaaatctgaagaaaaattagataacaatcaaatggtaatggaaagtgatattttacaggaagatcaccatacttcacagaaagtggaggaaccatcacagtgtctggcatctggaacagctatctctgagctaataatagaagacaataatgcatctcctcaaaaactaagggaacttgatccttcacttgtgtcagcaaatgacagtcctagtggcatgcagacacgctgtgtctggtctcctttggcttctccgtctacgagcattttaaagagaggactaaaaagatcccaagaagatgaaatctcatcacctgttaataaggttcgccgtgtctcctttgcagatccaatataccaagcaggattggcagatgacattgatagacggtgctctattgttaggtcccattcttccaatagttctcccataggaaaaagtgttaaaacttctcctactacacaatctaagatttcagaaatggccaaagaatccataccatgcccaacagaaagtgtttacccaccattggtgaactgtgtggcaccagttgacatcattttacctcagattacatcaaacatgtgggcaagaggcctgggacaactcattagagctaagaatataaaaactattggtgatttgagtactcttacagcatctgaaataaaaactcttcctatccgttctccaaaagtgtccaatgtaaaaaaggctctcagaatatatcatgagcagcaggtgaagactcgtggactagaagagattccagtttttgatatttctgaaaaaacagtaaatggaatagaaaataaatctttgtcacctgatgaagaaagacttgtctcagatataattgatcctgttgctttagaaattccattatccaaaaaccttctggcacagattagtgctcttgctcttcagctggattcagaagatcttcataattattcaggaagccaactatttgaaatgcacgagaaactaagttgtatggcaaactctgtaataaaaaatctacagtcacgttggagatcaccatcccatgaaaattctatttagtattttcagagaaaattgaaggtttttttaaacatcactggatttcttgattgaggaaacaagttctgaaataatagcacaatttcaaagaagagactctttgcaaagttgataacatttcaaaccctgaaggacagtgacttattatgtaagttcaattttgtaagttcattatgtaagatccttttttttttcataatatgtattcttggctgctatgcgtggtttttcaggaaatttaattatcttactgagatgtgaaagcaaaactagtaacagaacttacattttatttcatgctttcttaaacccgtgcatattctggtgaaacatgtaaaatactttaagtaaaattgaacatttttatttgaatttttgctgaactgataaaggtgtttatatttttgtttgttggtttgtttaattcatgtttgttgggactgaggtttaggaagtttgttactggttaaaaacctcaaatgaaatgcgaaagaatttgaatttttcctgcatatgtcaactttggacagctttcaagaaaaatgagaaaagtttcaacttctggcggttaaaatattaatgcagaatttactaagattttattcatttgcattagcaaatattcatgcagcagcagttgactgaaaatttattcttatgagacgtatagtattcatttttaaatgcatgattgtacattatgtatagacgacaatgtttttaatttataaatttcattctttgttaattgcatgggtttttctgcagcttattgtgaataccttggttctgttcaatagaaacattttgtatatattaaatactgaaatatcagtatcgacggtggaagtgcttcatgggcttgctgcacatatttgtaggatactgtatctgcaaatgcaacaacaaatagttttgtacttggttaacagtcttagttaaaacatgagtttattttctaaaagtatccagaataagtaaaattatagaaataagaaaatgttacacaactttgctgttcatacccttaccttcttactacttttggtttggaggagggtatcaccactagaaagtgtgcctccttaagatttcttaaaggaaagttagtttcagtatttcacagcaagttggactacaaaatctagagttgatctgctttttaaaccttcatttaaaagcaaacttggaagaaatttgaaactgatgtttttaatatatgtctgtgttgcctaggttttctttttttaaagaggtatgtaattaaaacctttgtaaaatttgccaactaatattagtgcctgacttcccatatttgtttcatctttttaactgacagtatatctcacttcttctttgaatagaatgagtgagtgatctcagttttcacattttattcagaagctaatccctacttagcaaggcacacattctacagcaagtcatagaaagtttaatccttgtgcctccttagctctcgtatattcagggatctctataaaagttggtgtcttttttcatcatcataaattcatcataatcacagatatttttgggtctaagatattcatataccaaggatggttttgtaaagaattctgggatcattgaattaaggattgtggcttgaagtaactaaagaaaaatactaatttccttaaaaggaattataattatgatttacattttacatcattaatttcccaaattatatttaaccgtaaggaggtgcacatgagtttttagcaaacaggtatgaataagcagctatgtatatgtgtttggggcagaggggagcagattactttaacacacttcagaattaaaatcagttcgtttcatgactctgtgccttaacgtttgtgtgaactaaacttgctgattgaatgaaattcttgggaagccgaacagtaatagcagaaaatgtgaccaaatgagtatcatgtacttaaatcactgaattttatataagcacaagtattaattttaaaaacattatagtttaataaagctgcatttaaaaatatttgggagcaaagacaagcatgctaaatcttcattttgctatggctataagcatatatttttggcaacttatttgcaatattcttgccttaaagtttcctgcaaatttcccccttagtaattcccgaatagcaaaacattaatattccatgattagctctactgtgttgtctcactattaaaatggaattcgttttttcagatcttttctaatggttaataaaacaaatgtcagatcataataacactcaaatgtgtcttaattgtcttatgcatatttaagaagaaaaaactagtggcatacaggattgtcatgtagtatctttttttttttttgagacacagtcttgctctgttgcctatgctggagtgcaatggtgcgatctcggttcactgcaagctctgcctcccaggtttacaccattctcctgcctcagcctcccaagtagctgggactacaggtgcccgccaccatgcccggctaattttttatatttttagtagagaaggggttcactgtgttagccaggatggtcttgatctgacctcgtgatccgcctgcctcggcctcccaaagtgctgggattacaggcgtgagccaccccacctggccattttctttttttt

SEQ ID NO: 8478 - protein, 429 aa, Homo sapiens; identical to SEQ ID NO: 8474

SEQ ID NO: 8479 - DNA, 8192 bp, Homo sapiens
ggaattcacaacacaccgttggacatgatgtcaattgttcaagccaagaaatgccaggtcctggttagcgacattgattatcgcaattatctgcaccagtggacgtgtctgccagatcagaacgatgtgatccaggccaagaaagcctacgacctgcagagcgataacttgtacaagtcagacctggaatggctgaagggtattggatggttgccagagggttctgtggaagtgatgagagtgaagaatgcccagaatctcttgaatgaaaggctgtatcgtataaagcctgaggccctcaaattcaccagcattgttgacaccccggaagtaatccaggcaaagatcaatgctgtacagatcagtgagccattgtatcgcgatgcctgggagaaagagaaggctaatgtgaacgtgccagctgacactcccctgatgctgcaatccaaaatcaatgccctgcagatcagcaataaacgctatcagcaagcttgggaagatgtcaagatgactggttatgacctgcgagcagatgccattgggatccagcatgccaaggcttccagggatattgccagtgactatctgtacaaaactgcttatgagaaacagaaaggccattacattggctgtcgcagcgccaaggaagaccctaaactggtttgggcagcaaatgtgttgaagatgcagaatgacaggctgtacaaaaaggcctacaacgaccacaaagccaagatctccatccctgtggacatggtgtccatcagcgctgccaaagaaggtcaggcactggcaagtgatgtggactatcgccattacctgcaccgctggtcttgctttcccgaccagaatgatgtgatccaagccaggaaagcctacgacctacagagcgacgccctctacaaggctgacttggagtggttgcgtggcattggctggatgccccaagggtctcctgaagtgttgagagtcaaaaacgcccagaatatcttttgtgacagtgtctatcggacgcctgtggtgaaccttaagtacacaagcattgttgacacacctgaagtggtccttgctaaatcaaatgctgaaaatattagtattccaaagtacagagaggtttgggacaaggataaaacttcaatacacataatgccagatactccagaaattaatctcgctagagcaaatgctcttaatgtgagcaataaactttaccgtgagggctgggatgaaatgaaggcgggctgtgatgtccggctggatgccatccccatccaggctgccaaggcctccagggagattgccagtgactataaatataagcttgaccatgagaagcagaagggacactacgtgggcaccctcacagccagggatgacaacaagatccgctgggccctcatagctgacaagctccagaatgaacgagagtaccggctggactgggccaaatggaaggccaagatccagagccctgtggacatgctttccatcctgcactctaaaaattcccaggctctggtcagtgacatggattaccgcaattacctgcaccagtggacctgcatgcccgaccagaacgatgtgattcaggccaagaaggcctacgaactgcagagcgataatgtttacaaggctgacttggaatggttgcgtggaattgggtggatgccaaatgactccgtgtccgtcaatcatgccaaacatgccgcggacatcttcagtgagaaaaaatatcgcacaaaaatagaaactctcaactttacgcctgtggatgacagagttgattatgtgacagcgaaacaaagtggcgagatcctcgatgatattaaataccggaaagactggaatgccaccaaatcaaagtacaccctcacagaaacccccctgctgcacactgcccaggaggctgctaggatactggaccagtatctctacaaggaaggctgggagagacaaaaagccacaggttacattttgcctccagatgctgtgccatttgttcatgcccatcactgcaatgacgttcagagtgagctgaaatacaaagctgaacatgtgaagcaaaaaggtcattatgttggtgtcccgacgatgagagatgatcctaagctggtttggtttgagcatgcaggccagattcagaatgagagactatacaaagaggactatcacaaaacaaaggccaaaatcaatatacctgctgatatggtgtcagtcttggccgccaagcaggggcagacccttgtcagtgatattgattatcgtaattacttgcaccaatggatgtgtcatcctgaccagaacgatgttattcaggcaagaaaggcctatgacctacagagtgataatgtctacagagctgacctggagtggctccgaggcattggctggatcccactggattctgtggaccatgtaagggttactaagaaccaggaaatgatgagtcagatcaaatataagaaaaatgcccttgaaaactatcctaactttagaagtgtggtggatcctccagagattgttttagccaagattaattctgtcaatcaaagtgatgtaaaatataaagaaacatttaataaagcaaagggcaaatatacgttttcaccagatacaccacatatctcccactccaaagacatgggaaaactctacagtactatactgtataaaggggcgtgggagggcaccaaggcctatggctacaccctggatgagcgctacattcccattgttggagccaagcatgctgatctggtgaacagtgagcttaaatacaaagagacatatgagaagcagaaaggtcactacctggctggaaaagtgatcggtgaattccctggtgtggttcactgtctggatttccaaaagatgaggagtgcgttgaactacagaaaacattatgaggataccaaagcaaatgttcatatccccaatgacatgatgaatcacgtgctggctaaaaggtgccagtacatcctcagtgacctggagtatcgacactatttccaccagtggacgtctcttctggaagaacccaatgttatacgcgtccgaaacgcccaggagatcttgagtgataatgtgtataaagatgacctgaattggttgaaaggcattggttgctacgtttgggatacaccccaaatcctccatgccaagaaatcatacgaccttcagagtcagctacaatatacagcagcaggtaaagaaaatctacaaaactataatctggtcacagacacgcccctctatgtgactgctgttcagagtggcattaatgccagtgaggtaaaatataaagaaaattatcatcagattaaggacaaatacacaacagttctagaaacagtggattatgacagaaccagaaacctgaagaatctttacagcagtaacctgtacaaggaggcctgggatagagtgaaagccaccagctacatcctgccttccagcaccttgtccctgacacacgccaagaaccagaagcatctggccagccatatcaaatatcgggaagaatatgaaaagttcaaagctctttatacgttaccaagaagtgttgacgatgatccgaacacagcacggtgcctccgagttggcaagcttaacatcgatcgcctgtacagatcagtttatgaaaagaacaagatgaaaatccacatcgtgcccgacatggtagagatggttactgccaaggattcccagaagaaagtcagtgagattgattaccgcctgcgcctccacgaatggatttgccaccccgacttgcaagtcaatgatcacgtcaggaaagtcacagatcagatcagcgatattgtatacaaggatgacctcaactggctgaaaggcattggttgctacgtctgggacactcctgaaatcctccatgccaagcatgcttatgatctacgtgatgatatcaagtataaagctcacatgttgaaaacaaggaatgactacaagcttgtcacagatacaccagtctacgtgcaggctgtcaaaagtgggaaacagctaagtgacgctgtctaccactatgactatgtgcacagtgtcagaggcaaagtggctccaactaccaaaaccgtggatctggaccgggcccttcatgcatacaagctccagagttcgaatctatacaaaaccagcctgcgcaccctgcccactggatatagacttccaggtgacactcctcacttcaaacacatcaaggacacccgttacatgagcagttatttcaagtacaaagaagcctatgaacacaccaaggcatatgggtatacacttggccccaaagatgttccatttgtccacgtccggagagtcaacaatgttaccagcgagagactgtatcgggaattgtaccacaaactgaaagacaagatccatacaactcccgatacccctgagatccgccaagtcaagaagacacaagaggctgtcagtgagttgatctacaaatcagacttcttcaagatgcagggccacatgatctctctgccatacacaccccaagtgatccattgccgctatgtgggagacatcaccagtgatattaaatacaaagaggacttgcaggtcctgaagggatttggctgcttcctgtatgacactcctgacatggtccgctcccggcacctgcggaagctctggtctaattacctatacactgataaggcaaggaagatgcgagacaaatacaaagtggtgcttgacactccagaatacagaaaagtgcaagaactgaagacacatctgagtgagctggtctacagagctgcaggcaagaagcagaagtcaatctttacttcagttcctgatactcctgatcttttaagagccaagcgagggcagaagcttcagagtcagtatctgtatgttgaacttgccaccaaagagagaccccatcatcacgctggaaaccagaccacagccttgaagcatgctaaagacgtgaaggacatggtcagtgagaaaaagtacaagattcaatatgaaaagatgaaagacaagtacactccggttccagatacgccaatcctcatcagagccaagagggcttactggaatgccagtgatctacgctacaaagaaacatttcaaaagaccaaagggaaataccacacggtgaaagatgccctagacattgtctatcatcgcaaagtcacagatgacatcagtaaaataaaatacaaggagaactacatgagccagttgggtatctggaggtccattcctgatcgtccagagcatttccaccaccgagcagtcactgacacagtcagtgatgtaaaatataaagaagacttgacttggcttaaaggcattggttgctatgcctatgatacccctgatttcactctggctgaaaagaacaagactctctacagcaagtataagtataaagaagtatttgaaaggacaaagtcagatttcaagtatgttgccgactctccgatcaataggcatttcaagtatgcaactcaattgatgaatgagaaaaaatacagagctgattatgagcagcggaaagataaataccacctggtagtcgatgagcctagacatctgctggctaagaccgcaggcgaccagatcagtcagatcaaatacaggaaaaactatgaaaaatcaaaggacaaatttacctcaattgtggatactccagaacacctgcgtactacaaaagtcaacaaacaaatcagcgatatcctttataaattggaatacaacaaggccaaacccagaggctacaccacaatccacgacacacccatgttgctgcatgtccgcaaggttaaagatgaagtcagtgatctgaaatacaaagaagtataccaaagaaataaatccaactgcaccattgagccagatgctgttcatatcaaagcagccaaggacgcctacaaagtcaacaccaatctggactataagaaacagtacgaagccaacaaagcccactggaagtggactcctgaccgaccggacttcctccaggctgccaagtcatccctgcagcaaagcgattttgaatataagctggaccgggagttcctcaagggttgcaagctttctgtcactgatgacaaaaacacggtgctcgccctcaggaatactttaatagaaagtgatctgaaatacaaagagaaacatgtcaaggaaagaggaacctgccatgccgtacctgacacgcctcagatcctgctggcgaagactgtcagcaacctggtgtctgagaacaagtacaaggaccatgtcaagaagcacttggcacagggctcatacacaacactaccagagacccgggacactgttcacgtcaaggaagtgaccaagcatgtcagtgatacaaattacaaaaagaagtttgtcaaggagaaaggaaaatccaactactccatcatgctggagccaccagaggtgaaacatgctatggaagtggccaagaagcaaagtgatgtcgcttacagaaaagatgccaaagagaacctgcattacaccacagtggctgatcgaccagacatcaagaaggccacacaggcagccaaacaggccagtgaggtggagtacagagccaagcaccgcaaggaaggcagccatggcttaagcatgctcggtcgcccagacatagaaatggccaagaaggcagccaagctgagcagccaggttaaataccgagaaaatttcgataaagaaaagggcaagacaccaaaatacaatccaaaagacagccagctctacaaagtcatgaaagatgctaataatcttgcaagtgaggttaaatacaaggctgacctgaagaaacttcacaaacccgtgactgacatgaaggagtctctgatcatgaatcatgtcctgaatacaagccaacttgccagttcttaccagtacaagaagaagtatgagaagagtaaaggccactaccacaccatacccgataatctggagcagcttcacctaaaagaggccacagaattacagagtatagtgaaatacaaagaaaagtatgaaaaggaacgaggaaaacccatgctggactttgaaacaccaacgtacatcactgccaaagagtctcagcagatgcagagtgggaaagaatataggaaagattatgaagagtccattaaaggcagaaacctgactggcctggaggtcacgccagctttgttacatgtcaaatatgcaactaaaatagcaagcgagaaagagtacaggaaagatctagaggaaagcatccgtgggaagggcctcactgaaatggaagatacacctgacatgctaagagcaaagaatgccactcaaatcctcaatgagaaagaatataagcgagacctggaactggaagtcaaaggaagaggcctgaatgccatggccaatgaaactccggattttatgagggccaggaatgctactgatattgccagtcagattaagtataagcaatcagcagaaatggagaaagccaatttcacttctgtggttgatactccagagatcattcatgcccaacaagtcaagaatctttcaagccagaaaaagtacaaggaagatgctgagaagtccatgtcgtattatgagactgttttggacaccccagagatacagagagtccgggagaaccaaaagaacttcagccttctccaataccagtgtgaccttaaaaacagtaaaggaaaaattacagttgttcaagacacgccagaaatactgcgtgtaaaagaaaatcagaagaatttcagctcggttttatataaagaggatgtctcaccaggaacggctatcggaaagacacctgagatgatgagagtgaaacaaacacaggaccacattagctcggtgaagtataaggaagcaataggacaaggaactccaatccctgacctgcctgaagtgaaacgtgtgaaggagacgcagaagcacattagctcggttatgtacaaagaaaacttgggaacaggcattccaaccactgtgactccagagattgagagagtcaaacgcaatcaagagaactttagctcggtgttatacaaagaaaacatgggcaagggaactcctttagctgtcactcccgagatggagcgagtcaaacacaatcaagaaaatattagctcggttttgtacaaagaaaatgtggggaaagccaccgcaacccctgtcactcctgagatgcagagagtcaaacgcaa

SEQ ID NO: 8480 - protein, 2999 aa, Homo sapiens
MMSIVQAKKCQVLVSDIDYRNYLHQWTCLPDQNDVIQAKKAYDLQSDNLYKSDLEWLKGIGWLPEGSVEVMRVKNAQNLLNERLYRIKPEALKFTSIVDTPEVIQAKINAVQISEPLYRDAWEKEKANVNVPADTPLMLQSKINALQISNKRYQQAWEDVKMTGYDLRADAIGIQHAKASRDIASDYLYKTAYEKQKGHYIGCRSAKEDPKLVWAANVLKMQNDRLYKKAYNDHKAKISIPVDMVSISAAKEGQALASDVDYRHYLHRWSCFPDQNDVIQARKAYDLQSDALYKADLEWLRGIGWMPQGSPEVLRVKNAQNIFCDSVYRTPVVNLKYTSIVDTPEVVLAKSNAENISIPKYREVWDKDKTSIHIMPDTPEINLARANALNVSNKLYREGWDEMKAGCDVRLDAIPIQAAKASREIASDYKYKLDHEKQKGHYVGTLTARDDNKIRWALIADKLQNEREYRLDWAKWKAKIQSPVDMLSILHSKNSQALVSDMDYRNYLHQWTCMPDQNDVIQAKKAYELQSDNVYKADLEWLRGIGWMPNDSVSVNHAKHAADIFSEKKYRTKIETLNFTPVDDRVDYVTAKQSGEILDDIKYRKDWNATKSKYTLTETPLLHTAQEAARILDQYLYKEGWERQKATGYILPPDAVPFVHAHHCNDVQSELKYKAEHVKQKGHYVGVPTMRDDPKLVWFEHAGQIQNERLYKEDYHKTKAKINIPADMVSVLAAKQGQTLVSDIDYRNYLHQWMCHPDQNDVIQARKAYDLQSDNVYRADLEWLRGIGWIPLDSVDHVRVTKNQEMMSQIKYKKNALENYPNFRSVVDPPEIVLAKINSVNQSDVKYKETFNKAKGKYTFSPDTPHISHSKDMGKLYSTILYKGAWEGTKAYGYTLDERYIPIVGAKHADLVNSELKYKETYEKQKGHYLAGKVIGEFPGVVHCLDFQKMRSALNYRKHYEDTKANVHIPNDMMNHVLAKRCQYILSDLEYRHYFHQWTSLLEEPNVIRVRNAQEILSDNVYKDDLNWLKGIGCYVWDTPQILHAKKSYDLQSQLQYTAAGKENLQNYNLVTDTPLYVTAVQSGINASEVKYKENYHQIKDKYTTVLETVDYDRTRNLKNLYSSNLYKEAWDRVKATSYILPSSTLSLTHAKNQKHLASHIKYREEYEKFKALYTLPRSVDDDPNTARCLRVGKLNIDRLYRSVYEKNKMKIHIVPDMVEMVTAKDSQKKVSEIDYRLRLHEWICHPDLQVNDHVRKVTDQISDIVYKDDLNWLKGIGCYVWDTPEILHAKHAYDLRDDIKYKAHMLKTRNDYKLVTDTPVYVQAVKSGKQLSDAVYHYDYVHSVRGKVAPTTKTVDLDRALHAYKLQSSNLYKTSLRTLPTGYRLPGDTPHFKHIKDTRYMSSYFKYKEAYEHTKAYGYTLGPKDVPFVHVRRVNNVTSERLYRELYHKLKDKIHTTPDTPEIRQVKKTQEAVSELIYKSDFFKMQGHMISLPYTPQVIHCRYVGDITSDIKYKEDLQVLKGFGCFLYDTPDMVRSRHLRKLWSNYLYTDKARKMRDKYKVVLDTPEYRKVQELKTHLSELVYRAAGKKQKSIFTSVPDTPDLLRAKRGQKLQSQYLYVELATKERPHHHAGNQTTALKHAKDVKDMVSEKKYKIQYEKMKDKYTPVPDTPILIRAKRAYWNASDLRYKETFQKTKGKYHTVKDALDIVYHRKVTDDISKIKYKENYMSQLGIWRSIPDRPEHFHHRAVTDTVSDVKYKEDLTWLKGIGCYAYDTPDFTLAEKNKTLYSKYKYKEVFERTKSDFKYVADSPINRHFKYATQLMNEKKYRADYEQRKDKYHLVVDEPRHLLAKTAGDQISQIKYRKNYEKSKDKFTSIVDTPEHLRTTKVNKQISDILYKLEYNKAKPRGYTTIHDTPMLLHVRKVKDEVSDLKYKEVYQRNKSNCTIEPDAVHIKAAKDAYKVNTNLDYKKQYEANKAHWKWTPDRPDFLQAAKSSLQQSDFEYKLDREFLKGCKLSVTDDKNTVLALRNTLIESDLKYKEKHVKERGTCHAVPDTPQILLAKTVSNLVSENKYKDHVKKHLAQGSYTTLPETRDTVHVKEVTKHVSDTNYKKKFVKEKGKSNYSIMLEPPEVKHAMEVAKKQSDVAYRKDAKENLHYTTVADRPDIKKATQAAKQASEVEYRAKHRKEGSHGLSMLGRPDIEMAKKAAKLSSQVKYRENFDKEKGKTPKYNPKDSQLYKVMKDANNLASEVKYKADLKKLHKPVTDMKESLIMNHVLNTSQLASSYQYKKKYEKSKGHYHTIPDNLEQLHLKEATELQSIVKYKEKYEKERGKPMLDFETPTYITAKESQQMQSGKEYRKDYEESIKGRNLTGLEVTPALLHVKYATKIASEKEYRKDLEESIRGKGLTEMEDTPDMLRAKNATQILNEKEYKRDLELEVKGRGLNAMANETPDFMRARNATDIASQIKYKQSAEMEKANFTSVVDTPEIIHAQQVKNLSSQKKYKEDAEKSMSYYETVLDTPEIQRVRENQKNFSLLQYQCDLKNSKGKITVVQDTPEILRVKENQKNFSSVLYKEDVSPGTAIGKTPEMMRVKQTQDHISSVKYKEAIGQGTPIPDLPEVKRVKETQKHISSVMYKENLGTGIPTTVTPEIERVKRNQENFSSVLYKENMGKGTPLAVTPEMERVKHNQENISSVLYKENVGKATATPVTPEMQRVKRNQENISSVLYSDSFRKQIQGKAAYVLDTPEMRRVRETQRHISTVKYHEDFEKHKGCFTPVVTDPITERVKKNMQDFSDINYRGIQRKVVEMEQKRNDQDQETITGLRVWRTNPGSVFDYDPAEDNIQSRSLHMINVQAQRRSREQSRSASALSISGGEEKSEHSEAPDHHLSTYSDGGVFAVSTAYKHAKTTELPQQRSSSVATQQTTVSSIPSHPSTAGKIFRAMYDYMAADADEVSFKDGDAIINVQAIDEGWMYGTVQRTGRTGMLPANYVEAI

SEQ ID NO: 8481 - DNA, 8192 bp, Homo sapiens
aggcatcacgctggcttttgcctggggttctcaggaggggagagttgggagaggctttgctgctgaggaaatttatttggtagattgaaggtttgaacgagagctacagaaacgaaagaaaaagtctgtataagccaatggtgttcgggaagaaaataaccccattgccttgagtttgtaggtgccactactactctggaaaaatggcagatgacgaagactatgaggaggtggtggagtactacacagaagaagtggtttacgaagaggtgccgggagagacaataacaaaaatttatgagactacgacaacaaggacatctgactatgagcaatcagaaacttccaaaccagctctggcacagccagcactggcacagccagcatcagcaaagccggtggagaggaggaaggtcatccggaagaaagtggatccttcaaagttcatgaccccctacattgcacacagtcagaaaatgcaggatctttttagcccaaataaatacaaggagaagtttgagaaaacaaaaggacagccatacgccagcacaacagatactccagaacttcgcagaatcaaaaaagtacaagatcaactcagtgaggttaagtatcgaatggatggtgatgttgctaagactatatgtcacgtagatgaaaaagcaaaggatattgaacatgcaaagaaagtgtcgcagcaagtcagtaaggttttatacaagcagaactgggaagacaccaaggataagtacctgcttcctcctgatgcccctgaacttgtccaggccgttaagaacaccgccatgttcagcaagaaactgtacactgaagactgggaagcagacaaaagtttgttttacccctataatgatagcccggaactgaggagagttgcccaggcccagaaagctctcagtgatgttgcctacaaaaaaggtctcgctgaacagcaagctcaattcacgcctctggctgatcctccagatatagaatttgccaagaaagtaaccaatcaagtgagcaagcaaaaatacaaagaagactatgaaaataaaatcaaaggcaaatggagtgagacaccttgctttgaagttgcaaatgccagaatgaatgctgataacattagcacaaggaaataccaggaagattttgaaaacatgaaagaccagatctacttcatgcagaccgaaacaccagagtataaaatgaataaaaaagctggtgtggcagctagcaaggtaaaatacaaagaagactatgaaaagaataaaggaaaagcagattataatgtgcttcctgcttcagagaacccacagcttaggcagctgaaggcagcaggagatgccctaagtgacaaactatacaaggaaaactatgaaaagacaaaagcaaagagcataaattactgcgagacccccaaattcaagctcgatactgttctgcagaacttcagtagtgataaaaaatataaagattcctacttaaaagatattttgggacattatgtaggcagcttcgaggatccataccattcacactgcatgaaagtcacagctcaaaacagtgataaaaactacaaagcagaatacgaagaagacagaggcaaaggcttcttccctcagaccataactcaagaatatgaagcaattaagaaactagatcagtgtaaagaccacacctacaaagtccatccagataagacaaaattcacccaagttacagactctcctgttctgctacaagcccaagtcaattccaaacaactgagtgacttaaattacaaagcaaaacatgaaagtgaaaagttcaagtgccatatcccccctgatactcctgcttttatccagcacaaagtcaatgcctataacttgagtgataatctttataagcaagactgggagaagagcaaagccaaaaagtttgacattaaagtggatgccattcccctgctggcagccaaagccaacaccaagaacaccagcgatgtgatgtacaagaaagactatgaaaaaaacaaagggaaaatgattggagtcctcagcattaatgacgatcccaagatgctgcactccttgaaggtggccaaaaaccagagtgatagattatacaaggaaaactatgagaagacaaaggcaaagagtatgaattactgtgagaccccaaaatatcaacttgatactcagctgaagaacttcagtgaggctagatataaagacttatatgtaaaggatgttttgggacattatgtaggcagcatggaggacccatatcacacacactgcatgaaagttgcagctcaaaacagtgataaaagttacaaagcagaatatgaagaagataaaggaaaatgctatttccctcagacaataacacaagaatatgaagcaatcaagaagctggaccagtgtaaagatcatacctacaaagttcatccagataagaccaaattcacggcagtcactgattctcctgtactgttgcaagcccagctcaacacgaaacagcttagtgatctgaattacaaagcaaaacatgaaggtgagaagttcaagtgccatataccagcagatgctccacagtttatccaacacagagtcaatgcctataatctgagtgataatgtttataagcaagactgggagaagagcaaagccaagaagtttgacattaaagtggacgccattcccctgttggcagccaaagccaacaccaagaacaccagcgatgtgatgtacaagaaagactatgaaaagagcaaagggaaaatgattggagccctcagcattaatgacgatccaaagatgctgcactccttgaagacagccaaaaaccagagtgatcgcgaatatcgaaaagattatgaaaagtcaaaaactatctacacggcacctcttgatatgctccaagtcactcaagctaagaaatctcaggcaattgccagcgacgttgattataagcacatcttacacagttacagctacccccctgatagcatcaatgtggaccttgccaagaaggcatatgcgctgcagagcgatgttgaatacaaagctgactacaatagctggatgaaaggttgtggctgggtgccttttgggtccttagaaatggaaaaggcaaagcgagcttcagacatcctcaatgagaaaaaatatcgccaacatccagacaccctcaagtttacctcgattgaagatgctccaattacagtacagtctaaaattaaccaggcccagaggagtgatatcgcttacaaagccaaaggagaggaaattattcacaaatacaacctgccaccagacctgccccagttcatccaggctaaagttaatgcctacaatatcagtgagaatatgtacaaagcagacttgaaagacttgagcaagaagggatatgacctgagaactgatgcgattcccatcagagctgccaaagctgccaggcaggcggcgagtgacgttcagtacaaaaaagactatgaaaaggctaaagggaaaatggttggcttccaaagtcttcaagatgaccctaaactggttcattatatgaacgtggccaagatacaatcagatcgggagtataaaaaagactatgagaagacaaagtccaaatacaacacgccccatgatatgttcaatgtcgtggcggctaagaaagcccaggatgtggtcagcaatgtcaactataagcattctctccatcattacacctacttgcctgacgccatggacctggagctgtctaagaacatgatgcagatacagagtgataacgtctacaaggaagactacaacaactggatgaaaggcattggctggattcctattggcagtctcgacgtcgaaaaagttaaaaaggccggtgatgctctgaatgaaaagaagtacaggcaacatccagacaccctcaaatttaccagcattgtggactccccagttatggtccaggcaaaacagaacacgaagcaagtcagtgatatcttatacaaggctaaaggagaagatgtgaaacataaatacaccatgagtcctgatcttcctcagtttctccaggccaagtgcaatgcttacaatataagtgacgtctgttataaacgggattggtatgacttaatagccaagggcaacaatgtgctgggcgatgctattcccatcactgcagccaaggcatcgagaaacattgccagtgattataaatacaaggaagcttatgagaagtcaaagggaaagcatgtgggtttcagaagcctccaggatgatcccaagctggtccactatatgaatgtggcaaagctgcagtctgatcgtgaatacaagaagaactatgagaacaccaaaaccagctaccatacccctggggacatggttagcatcacagctgcaaagatggcccaggatgtcgctaccaatgtcaactacaaacagccattgcatcattacacatacctacctgacgccatgagtcttgagcatacgaggaatgtcaatcaaattcagagtgataatgtgtataaagacgagtataacagcttcttgaagggcatcggatggatccctattggttccctggaggtggagaaggtcaagaaagcaggcgatgcattaaatgagaggaagtatcgacagcacccagataccgtcaagttcacaagtgtgcctgattccatgggcatggtgttggctcagcataacacaaagcagctaagtgatttgaactacaaggtagagggagagaaactgaagcacaagtatactattgaccctgaattgcctcagtttattcaagccaaagtcaacgccctcaacatgagtgatgctcattataaagcagattggaagaaaaccattgccaagggctatgatttgagaccagatgccatcccaattgttgctgcaaaaagttcaaggaatattgctagtgattgcaaatataaggaggcctacgagaaagccaaaggcaagcaagttggatttctcagtcttcaggatgatcctaaactggttcactacatgaatgtggccaaaatccagtctgatcgtgagtacaaaaagggctatgaagccagcaagaccaagtaccacacacctctggatatggtcagtgtgacagctgcaaagaaatctcaggaggttgccaccaacgccaactacagacagtcataccaccactacactctcctgcccgatgccttgaatgtggagcactccaggaatgccatgcagattcagagtgataatctgtacaaatctgacttcaccaattggatgaaagggatcggctgggtgcccatagagtccctggaggtggagaaggcaaagaaagcaggagagattcttagtgagaagaagtatcgccagcaccccgagaagctgaagttcacttacgccatggacacaatggaacaggcacttaacaagagtaacaaactgaacatggacaagaggctctacactgaaaaatggaacaaggacaagaccaccattcatgtcatgcctgacacaccggatattttactctccagagtaaaccaaatcaccatgagtgataaactgtacaaagctggctgggaagaggaaaagaagaaaggatatgacctgaggcctgatgccattgcaataaaggctgcaagagcctctagagacattgccagtgattacaaatacaagaaagcctatgaacaagccaaagggaaacacattggcttccggagcctggaagatgaccccaagctggtgcacttcatgcaagtggccaagatgcagtcagaccgggaatacaagaagggatatgagaaatccaagacctccttccacaccccggtggacatgctcagtgtggtggcagccaagaagtctcaggaagtggccaccaatgccaactacaggaacgtgatccatacctacaacatgcttcctgatgccatgagctttgaattggccaaaaatatgatgcagattcaaagtgataatcagtacaaggctgactatgctgacttcatgaagggcattggatggctccctctgggctccctggaagcagagaaaaacaagaaagccatggagattattagtgaaaagaagtaccgccagcacccagacactttgaagtattccacactcatggactcgatgaacatggttttggcccagaataatgcaaaaattatgaacgaacatctctacaaacaagcatgggaggctgacaaaaccaaagtccacatcatgcctgatatcccccagattattttggcaaaggcaaatgcaattaatatgagtgataaactctacaaactttccttggaagagtctaaaaagaaaggctatgatctcagacctgatgcaattcctatcaaagctgccaaggcttccagagatattgcaagtgattataaatacaagtacaattatgaaaaagggaaggggaaaatggttggtttccgcagtctcgaggatgatcccaaattagtccattccatgcaagtggctaagatgcaatctgatcgggagtacaagaaaaactatgagaacacaaagaccagctaccacacccctgccgacatgctcagtgtcacggctgcaaaggatgcccaagccaacatcaccaacactaactacaagcacctgattcacaagtacatcctccttccagatgcaatgaacattgagctgaccaggaatatgaatcgcatacagagtgataatgaatataagcaagattacaatgaatggtacaaagggcttggctggagtccagcaggttctctggaagtggagaaggccaagaaagcaactgaatatgccagtgatcagaaataccgccagcacccgagcaacttccagtttaagaagctgactgattccatggacatggtgcttgccaagcagaatgcacataccatgaacaagcatttatacaccattgattggaataaagataagaccaagattcatgtgatgcctgatacaccagatattttacaagccaagcagaatcaaacactgtatagtcagaaactctataaacttggatgggaagaagctttgaagaaaggctatgatctcccagttgatgcaatttctgtacagctagctaaagcttcaagagacattgctagtgattataaatacaaacaaggctaccgaaagcaacttggccaccatgttggattccggagtctgcaagatgacccaaaacttgtgttgtccatgaatgtagccaaaatgcagagtgaaagagaatacaagaaggactttgagaagtggaaaactaagttctccagcccagtggacatgttgggagtggtactggccaagaagtgtcaggagttggttagtgacgtggactacaagaactacctgcatcagtggacatgtctgcctgatcagaacgatgttgtgcaagctaagaaagtttatgaactgcaaagtgagaatctatataaatctgaccttgagtggctgagaggcataggatggagtcccttgggttctttagaggcagaaaagaacaagcgggcttcggaaatcatcagtgagaagaaatatcgtcagcctccagacagaaacaagttcaccagcattcctgatgccatggatatagttctggcaaagacaaatgccaaaaataggagtgatagactttatagagaagcttgggacaaagacaagactcagatccacatcatgcctgatacacctgacattgttctggctaaagcaaacttaatcaacacaagtgataaactctaccgaatgggttatgaggagctgaagagaaaaggttacgatcttcctgttgatgccataccaatcaaagcagcaaaagcctcccgggaaattgccagtgaatacaagtacaaggaaggctttcgcaagcagctcggccaccacattggtgcccggaacattgaagatgaccccaagatgatgtggtccatgcatgtggccaagatccagagtgacagggagtacaagaaggactttgagaagtggaagaccaagttcagcagcccagtggacatgctgggggtggtgttggccaagaagtgccagaccttagtcagcgacgtggactacaagaactacctgcaccagtggacatgcctgcccgaccagagcgatgtcatccatgctcggcaggcctatgacctccagagcgataatttgtacaagtcagaccttcagtggctaaaa

SEQ ID NO: 8482 - protein, 4000 aa, Homo sapiens
MADDEDYEEVVEYYTEEVVYEEVPGETITKIYETTTTRTSDYEQSETSKPALAQPALAQPASAKPVERRKVIRKKVDPSKFMTPYIAHSQKMQDLFSPNKYKEKFEKTKGQPYASTTDTPELRRIKKVQDQLSEVKYRMDGDVAKTICHVDEKAKDIEHAKKVSQQVSKVLYKQNWEDTKDKYLLPPDAPELVQAVKNTAMFSKKLYTEDWEADKSLFYPYNDSPELRRVAQAQKALSDVAYKKGLAEQQAQFTPLADPPDIEFAKKVTNQVSKQKYKEDYENKIKGKWSETPCFEVANARMNADNISTRKYQEDFENMKDQIYFMQTETPEYKMNKKAGVAASKVKYKEDYEKNKGKADYNVLPASENPQLRQLKAAGDALSDKLYKENYEKTKAKSINYCETPKFKLDTVLQNFSSDKKYKDSYLKDILGHYVGSFEDPYHSHCMKVTAQNSDKNYKAEYEEDRGKGFFPQTITQEYEAIKKLDQCKDHTYKVHPDKTKFTQVTDSPVLLQAQVNSKQLSDLNYKAKHESEKFKCHIPPDTPAFIQHKVNAYNLSDNLYKQDWEKSKAKKFDIKVDAIPLLAAKANTKNTSDVMYKKDYEKNKGKMIGVLSINDDPKMLHSLKVAKNQSDRLYKENYEKTKAKSMNYCETPKYQLDTQLKNFSEARYKDLYVKDVLGHYVGSMEDPYHTHCMKVAAQNSDKSYKAEYEEDKGKCYFPQTITQEYEAIKKLDQCKDHTYKVHPDKTKFTAVTDSPVLLQAQLNTKQLSDLNYKAKHEGEKFKCHIPADAPQFIQHRVNAYNLSDNVYKQDWEKSKAKKFDIKVDAIPLLAAKANTKNTSDVMYKKDYEKSKGKMIGALSINDDPKMLHSLKTAKNQSDREYRKDYEKSKTIYTAPLDMLQVTQAKKSQAIASDVDYKHILHSYSYPPDSINVDLAKKAYALQSDVEYKADYNSWMKGCGWVPFGSLEMEKAKRASDILNEKKYRQHPDTLKFTSIEDAPITVQSKINQAQRSDIAYKAKGEEIIHKYNLPPDLPQFIQAKVNAYNISENMYKADLKDLSKKGYDLRTDAIPIRAAKAARQAASDVQYKKDYEKAKGKMVGFQSLQDDPKLVHYMNVAKIQSDREYKKDYEKTKSKYNTPHDMFNVVAAKKAQDVVSNVNYKHSLHHYTYLPDAMDLELSKNMMQIQSDNVYKEDYNNWMKGIGWIPIGSLDVEKVKKAGDALNEKKYRQHPDTLKFTSIVDSPVMVQAKQNTKQVSDILYKAKGEDVKHKYTMSPDLPQFLQAKCNAYNISDVCYKRDWYDLIAKGNNVLGDAIPITAAKASRNIASDYKYKEAYEKSKGKHVGFRSLQDDPKLVHYMNVAKLQSDREYKKNYENTKTSYHTPGDMVSITAAKMAQDVATNVNYKQPLHHYTYLPDAMSLEHTRNVNQIQSDNVYKDEYNSFLKGIGWIPIGSLEVEKVKKAGDALNERKYRQHPDTVKFTSVPDSMGMVLAQHNTKQLSDLNYKVEGEKLKHKYTIDPELPQFIQAKVNALNMSDAHYKADWKKTIAKGYDLRPDAIPIVAAKSSRNIASDCKYKEAYEKAKGKQVGFLSLQDDPKLVHYMNVAKIQSDREYKKGYEASKTKYHTPLDMVSVTAAKKSQEVATNANYRQSYHHYTLLPDALNVEHSRNAMQIQSDNLYKSDFTNWMKGIGWVPIESLEVEKAKKAGEILSEKKYRQHPEKLKFTYAMDTMEQALNKSNKLNMDKRLYTEKWNKDKTTIHVMPDTPDILLSRVNQITMSDKLYKAGWEEEKKKGYDLRPDAIAIKAARASRDIASDYKYKKAYEQAKGKHIGFRSLEDDPKLVHFMQVAKMQSDREYKKGYEKSKTSFHTPVDMLSVVAAKKSQEVATNANYRNVIHTYNMLPDAMSFELAKNMMQIQSDNQYKADYADFMKGIGWLPLGSLEAEKNKKAMEIISEKKYRQHPDTLKYSTLMDSMNMVLAQNNAKIMNEHLYKQAWEADKTKVHIMPDIPQIILAKANAINMSDKLYKLSLEESKKKGYDLRPDAIPIKAAKASRDIASDYKYKYNYEKGKGKMVGFRSLEDDPKLVHSMQVAKMQSDREYKKNYENTKTSYHTPADMLSVTAAKDAQANITNTNYKHLIHKYILLPDAMNIELTRNMNRIQSDNEYKQDYNEWYKGLGWSPAGSLEVEKAKKATEYASDQKYRQHPSNFQFKKLTDSMDMVLAKQNAHTMNKHLYTIDWNKDKTKIHVMPDTPDILQAKQNQTLYSQKLYKLGWEEALKKGYDLPVDAISVQLAKASRDIASDYKYKQGYRKQLGHHVGFRSLQDDPKLVLSMNVAKMQSEREYKKDFEKWKTKFSSPVDMLGVVLAKKCQELVSDVDYKNYLHQWTCLPDQNDVVQAKKVYELQSENLYKSDLEWLRGIGWSPLGSLEAEKNKRASEIISEKKYRQPPDRNKFTSIPDAMDIVLAKTNAKNRSDRLYREAWDKDKTQIHIMPDTPDIVLAKANLINTSDKLYRMGYEELKRKGYDLPVDAIPIKAAKASREIASEYKYKEGFRKQLGHHIGARNIEDDPKMMWSMHVAKIQSDREYKKDFEKWKTKFSSPVDMLGVVLAKKCQTLVSDVDYKNYLHQWTCLPDQSDVIHARQAYDLQSDNLYKSDLQWLKGIGWMTSGSLEDEKNKRATQILSDHVYRQHPDQFKFSSLMDSIPMVLAKNNAITMNHRLYTEAWDKDKTTVHIMPDTPEVLLAKQNKVNYSEKLYKLGLEEAKRKGYDMRVDAIPIKAAKASRDIASEFKYKEGYRKQLGHHIGARAIRDDPKMMWSMHVAKIQSDREYKKDFEKWKTKFSSPVDMLGVVLAKKCQTLVSDVDYKNYLHQWTCLPDQSDVIHARQAYDLQSDNMYKSDLQWMRGIGWVSIGSLDVEKCKRATEILSDKIYRQPPDRFKFTSVTDSLEQVLAKNNAITMNKRLYTEAWDKDKTQIHIMPDTPEIMLARQNKINYSETLYKLANEEAKKKGYDLRSDAIPIVAAKASRDVISDYKYKDGYRKQLGHHIGARNIEDDPKMMWSMHVAKIQSDREYKKDFEKWKTKFSSPVDMLGVVLAKKCQTLVSDVDYKNYLHEWTCLPDQNDVIHARQAYDLQSDNIYKSDLQWLRGIGWVPIGSMDVVKCKRAAEILSDNIYRQPPDKLKFTSVTDSLEQVLAKNNALNMNKRLYTEAWDKDKTQVHIMPDTPEIMLARQNKINYSESLYRQAMEEAKKEGYDLRSDAIPIVAAKASRDIASDYKYKEAYRKQLGHHIGARAVHDDPKIMWSLHIAKVQSDREYKKDFEKYKTRYSSPVDMLGIVLAKKCQTLVSDVDYKHPLHEWICLPDQNDIIHARKAYDLQSDNLYKSDLEWMKGIGWVPIDSLEVVRAKRAGELLSDTIYRQRPETLKFTSITDTPEQVLAKNNALNMNKRLYTEAWDNDKKTIHVMPDTPEIMLAKLNRINYSDKLYKLALEESKKEGYDLRLDAIPIQAAKASRDIASDYKYKEGYRKQLGHHIGARNIKDDPKMMWSIHVAKIQSDREYKKEFEKWKTKFSSPVDMLGVVLAKKCQILVSDIDYKHPLHEWTCLPDQNDVIQARKAYDLQSDAIYKSDLEWLRGIGWVPIGSVEVEKVKRAGEILSDRKYRQPADQLKFTCITDTPEIVLAKNNALTMSKHLYTEAWDADKTSIHVMPDTPDILLAKSNSANISQKLYTKGWDESKMKDYDLRADAISIKSAKASRDIASDYKYKEAYEKQKGHHIGAQSIEDDPKIMCAIHAGKIQSEREYKKEFQKWKTKFSSPVDMLSILLAKKCQTLVTDIDYRNYLHEWTCMPDQNDIIQAKKAYDLQSDALYKADLEWLRGIGWMPQGSPEVLRVKNAQNIFCDSVYRTPVVNLKYTSIVDTPEVVLAKSNAENISIPKYREVWDKDKTSIHIMPDTPEINLARANALNVSNKLYREGWDEMKAGCDVRLDAIPIQAAKASR

SEQ ID NO: 8483 - DNA, 1006 bp, Homo sapiens
caaattattaaaaccacaatgagataccccttcacacatgccagaatggtgatgataaaaaagacagacaataacagacattagaaaggatgtggagaaattgggtccttcataaaccactggtggaagtggaaaagagtgcagccaccttggaaaagaatttggcagttatcacatgttaaatacagcattaccctatggcccagcaaattccactcctaggtgtatacccaagaagaatgaagacataggtctgcacaataatttgtacatccatgtccgtagcagcattactcataatagccaaaaagtggaaacaacttaaatgcccaccaactgatgaatgcataagcaagatctggtatatccatacagatctattattgggtagtaacaagaatggggtagtaacaagaatgaagtactgacacatgatacaacatggatgaacttcaaaagtaaaggacgccatgcaccaagtgtcattcttggaaacgtgggagatttaggaaatgacattgaagaggaagaattctgttgaaatagtgattctcaacgtggggtccttggacagcaaggatgaggaaaaaacacagtcatccaaggagccagaagttatatgctgacaaaatgccaccgactactttagtggaagctgttgttgggatagggaatctgcaccctctagagaagcagggacttcagctgctgaggaagggctgtcagagttatccatgttattttttttcatttttgtgagtacggtgcctcctaaacaatcacatgaggatttgagactgttagaactcggtgttgttatccacacaaatggaaacattcattatttttaaaacatgtttgtttgtaaatatcagatgaagtaaaaaattgacattaactgtattatagaaatgggaaagtatatccttttgtaatataagatgtattagaagcaaagaagggaaatgggcttcaaacaaaaataaataaatgtaaagatcagttt

SEQ ID NO: 8484 - protein, 37 aa, Homo sapiens
MTLKRKNSVEIVILNVGSLDSKDEEKTQSSKEPEVIC

SEQ ID NO: 8485 - DNA, 2103 bp, Homo sapiens
atcataaaaacacgcctttctcattcaactgaaaaacacactaaaattttaaaagagaaaaatgcaacatcttggaaagtaacgttttaacaccataaaaatttgcacttattcaactgaaaatttacactaaaatagacattaactgtgcttttacattccaaaccatcatactaaacataacaagttaattgccaatgttttccttcccctatactttgaggtagttctacgtaaccaactataacaaatttacttcctaacatcctcaatcttctgctctcctttagttttaagatactttatgacatgggtaatactctgaaatggatgccttctttggatatattttggggttttagtgtctggaggactttgatttctatattagcatattggtttatgaagtctggacacaacctaaggaaaataatcacttgttttaaaggacagttctttcaaattccctacaatgtcagatttagagccaaataccatcgaatatgttgatgctgtaattcctagcaaatttcaagaggtcactctcttttcaaaattataccgtgccccttctttgaaaatgagtttcattttcgaagtcaaaacaagtcctttctcttccactggcgggcccttctggtccccagattagcctgttccaaaattggtcatgtgtctcactgggccccttcagttgacccaagcgtccctcaccagctcctatccatctctatctgctggaaaggctttgaggtttcagatttaggacagcaccactcattcacggtctctcctgcatcaggttctttattctgatagtttccggaaacaaatacaaggcaaagctgcctatgtattggatacccccgagatgagacgggtgagggagacccaacggcacatctcaacggtgaaatatcatgaagactttgagaaacacaagggttgcttcacaccagtggtgacagatcctatcactgaacgagtaaagaagaacatgcaggacttcagtgacattaactaccgaggtattcagaggaaagtggtagaaatggaacaaaaacggaatgaccaagatcaggagactattacaggtaactgagcctgggttgggggaggggattaactttaagtgagggggtagaagaacaaaagtagcattacctacatcaagtcaaaacataaaggacttcaatctgtttttctagaggtgcaagaaagctcctattatctcatagtttacaaagctgatttctaccttatctttgttctcctctgaggaaaagacatgacccagaacctaagctggaataagtgtgattcaatcctttggtggttgttaaaattcatgccttggttttcaagttattggaaaactccaagaacacttgttctgatcactggtttccctttcaggtttacgtgtctggcgtactaatcctggttcggtttttgactatgatccagcagaagacaacatccagtcccgaagcttacacatgattaatggtgtgttagctgaaaaaggcttacaacataaacatcaccatttagtatgctagagtcaatgactttcatttgggctctgaagttccttccctccagagttttccattttctgagctgcccatttggcataaaaataccttgttaactagtgagcaaaacttactttctagataagttcaagttagaaaaaattttgtttcactgcctcagtgcatgtctcccattattatcatttctaatttttcttccaaagaaaaaacagtagtaattctattggagaaataatgaaaatacataaaatacataggcaaagggaagagaaaggatttgacctgtaggaacttcctgagctctattgcatcaaggaagtttattcattacacaaagcaggctgcacaacttcattccttcttttcatgttaaaaagcagaatactagcctggaaaagagaatgagaccccttttctacaaacagtaaaaaaaaattagccgcgagtggtgttgtacacctgtagtaccagctgttcagggggctgaagtgggaggatagcttgagcctagaaagttgaagctgcagtgagccgtgattgtacc

SEQ ID NO: 8486 - protein, 76 aa, Homo sapiens [sequence omitted]

SEQ ID NO: 8487 - DNA, 806 bp, Homo sapiens
acagcagctgtttttttactggactgttttgcagcacttaaactctcatagacatatcagtaaaactgtaggccctcagacaaagcaaagggtttcccctaccctctttttctttgctatcctctatgctctgcctcttgctttagtttcatacaacattcagcttatcattaaggaataaggtttttggctcttatatcactatcatggcgaatcagtggaaaatgagaaacatagtaacacatcatgataaatcctcaacctcggtatctcccctcagtgtcattcttggaaacgtgggagatttaggaaatgacattgaagaggaagaattctgttgaaatagtgattctcaacgtggggtccttggacagcaaggatgaggaaaaaacacagtcatccaaggagccagaagttatatgctgacaaaatgccaccgactactttagtggaagctgttgttgggatagggaatctgcaccctctagagaagcagggacttcagctgctgaggaagggctgtcagagttatccatgttattttttttcatttttgtgagtacggtgcctcctaaacaatcacatgaggatttgagactgttagaactcggtgttgttatccacacaaatggaaacattcattatttttaaaacatgtttgtttgtaaatatcagatgaagtaaaaaattgacattaactgtattatagaaatgggaaagtatatccttttgtaatataagatgtattagaagcaaagaagggaaatgggcttcaaacaaaaataaataaatgtaaagatcagttt

SEQ ID NO: 8488 - protein, 37 aa, Homo sapiens; identical to SEQ ID NO: 8484

SEQ ID NO: 8489 - DNA, 6062 bp, Homo sapiens
gattgaagatagtaagtagattcaacagcatgtaaaaggtctgaatatttaatgttttcatctaatgtgtctcttgttcaattatcactacaactgttgcagggagatgaggattaccgtgcagctctatgaatattgtatatattcatggcgcctcttgactttgatgctgaattgctaggttatttccagcacatctgatcccacacacacaggttaacagtgtctctgataataatgcctttttagaaggccaactgaagcatgcactttccagcacatgctgaaaggtaaatttgatgcagcaataaacagtgataattggtaactaccagacacaatgttagtaataataccatttttcccagaccaaaaaaaaaaagttaattgagctttcctcatttctcctcctataaatatcctgtttgcctgaacttcctcctttgtccttatatgatcctcaaatagttgtgcatgaaattttatggtgctctctgtatctgtcctgcttaaaacagcttctgtgcatgaaaataattatgacttgaaaattgcaaaaacaaatgaattttttaaaatgataaatacttcatatatactcattctttattttacatccctgtttcatctttgacatggaaaaatgcctttggagattgtacatgttcaatacaatatgttatgagtaaaacaatatttgtcagactccagagaacaggttctagtcctgctctgagatttggtctaaatgtgcccttgggtcagtctcgtaacctctgggggcctccgagtacatgtgtataaaacatattggaacttgggaggctgaggcagaagaattgcttgaatctgggaggtggaggttgcagtgagccgagatcgcaccactgcactccagcctgggtgacagagtaagactccgtctcggagggaaacaaaaaaaggaaattattagtagtagtatcatctgctcactccatttcacttttgctatcagacacaaatttatagtaaacatttccagttaggaattaaagagaaagctagataccatctcccactctggtgtttcaagaggacaattagataccttaaagcccactctacaacttcttagagctctttcttctcttccacaatttagatcaaatacaggaaaaactatgaaaaatcaaaggacaaatttacctcaattgtggatactccagaacacctgcgtactacaaaagtcaacaaacaaatcagcgatatcctttataaattggaatacaacaaggccaaacccagaggctacaccacaatccacgacacacccatgttgctgcatgtccgcaaggttaaagatgaagtcagtgatctgaaatacaaagaagtataccaaagaaataaatccaactgcaccattgagccagatgctgttcatatcaaagcagccaaggacgcctacaaagtcaacaccaatctggactataagaaacagtacgaagccaacaaagcccactggaagtggactcctgaccgaccggacttcctccaggctgccaagtcatccctgcagcaaagcgattttgaatataagctggaccgggagttcctcaagggttgcaagctttctgtcactgatgacaaaaacacggtgctcgccctcaggaatactttaatagaaagtgatctgaaatacaaagagaaacatgtcaaggaaagaggaacctgccatgccgtacctgacacgcctcagatcctgctggcgaagactgtcagcaacctggtgtctgagaacaagtacaaggaccatgtcaagaagcacttggcacagggctcatacacaacactaccagagacccgggacactgttcacgtcaaggaagtgaccaagcatgtcagtgatacaaattacaaaaagaagtttgtcaaggagaaaggaaaatccaactactccatcatgctggagccaccagaggtgaaacatgctatggaagtggccaagaagcaaagtgatgtcgcttacagaaaagatgccaaagagaacctgcattacaccacagtggctgatcgaccagacatcaagaaggccacacaggcagccaaacaggccagtgaggtggagtacagagccaagcaccgcaaggaaggcagccatggcttaagcatgctcggtcgcccagacatagaaatggccaagaaggcagccaagctgagcagccaggttaaataccgagaaaatttcgataaagaaaagggcaagacaccaaaatacaatccaaaagacagccagctctacaaagtcatgaaagatgctaataatcttgcaagtgaggttaaatacaaggctgacctgaagaaacttcacaaacccgtgactgacatgaaggagtctctgatcatgaatcatgtcctgaatacaagccaacttgccagttcttaccagtacaagaagaagtatgagaagagtaaaggccactaccacaccatacccgataatctggagcagcttcacctaaaagaggccacagaattacagagtatagtgaaatacaaagaaaagtatgaaaaggaacgaggaaaacccatgctggactttgaaacaccaacgtacatcactgccaaagagtctcagcagatgcagagtgggaaagaatataggaaagattatgaagagtccattaaaggcagaaacctgactggcctggaggtcacgccagctttgttacatgtcaaatatgcaactaaaatagcaagcgagaaagagtacaggaaagatctagaggaaagcatccgtgggaagggcctcactgaaatggaagatacacctgacatgctaagagcaaagaatgccactcaaatcctcaatgagaaagaatataagcgagacctggaactggaagtcaaaggaagaggcctgaatgccatggccaatgaaactccggattttatgagggccaggaatgctactgatattgccagtcagattaagtataagcaatcagcagaaatggagaaagccaatttcacttctgtggttgatactccagagatcattcatgcccaacaagtcaagaatctttcaagccagaaaaagtacaaggaagatgctgagaagtccatgtcgtattatgagactgttttggacaccccagagatacagagagtccgggagaaccaaaagaacttcagccttctccaataccagtgtgaccttaaaaacagtaaaggaaaaattacagttgttcaagacacgccagaaatactgcgtgtaaaagaaaatcagaagaatttcagctcggttttatataaagaggatgtctcaccaggaacggctatcggaaagacacctgagatgatgagagtgaaacaaacacaggaccacattagctcggtgaagtataaggaagcaataggacaaggaactccaatccctgacctgcctgaagtgaaacgtgtgaaggagacgcagaagcacattagctcggttatgtacaaagaaaacttgggaacaggcattccaaccactgtgactccagagattgagagagtcaaacgcaatcaagagaactttagctcgatattgtacaaagagaacttgagcaaggggactcccctacctgtcactcctgagatggagcgagtcaaactcaatcaagaaaactttagctcggtgctatacaaagaaaacctggggacaggaattccaatccccatcactcctgagatgcagagagtcaaacacaatcaagaaaaccttagctcggtattttggaaagaaaggggaaaaaatgccacttaacttcagaattaaactgatctttacatttatttatttttgtttgaagcccatttcccttctttgcttctaatacatcttatattacaaaaggatatactttcccatttctataatacagttaatgtcaattttttacttcatctgatatttacaaacaaacatgttttaaaaataatgaatgtttccatttgtgtggataacaacaccgagttctaacagtctcaaatcctcatgtgattgtttaggaggcaccgtactcacaaaaatgaaaaaaaataacatggataactctgacagcccttcctcagcagctgaagtccctgcttctctagagggtgcagattccctatcccaacaacagcttccactaaagtagtcggtggcattttgtcagcatataacttctggctccttggatgactgtgttttttcctcatccttaaaaagtcccaagaaatgaaatgttactcatggttgtttttctggatgctttcttatcgcacaggtgttatacaaagaaaacatgggcaagggaacccctttacctgtcactcccgagatggaaagagtcaaacacaatcaagaaaatattagctcggtactttggcaagaaaagaaaaaaactacttatttaatgattttgaaaactttcatgatttaaaataatacgtattaatcctactttttaaagacaacttaaattttgtgaatttctttagcaaatttatccttttttcctttgggctacttctagcctaacaccattcccatttctataatacagttaatttcaattttttatttcatctggtattttcaatcttttttttaaaataatgagtttttcagtttgtgtggataacaccactgagttctaactgtctcaaatcctcatataattgtttaggaggcatggtactcacaaaaaaggaaaaaaaaaaataacatggataactctgacagcctttccccagcagctgaggtccctgcttctctagagggtgcagattccccatcccaacaacttccactaaagtaaagtagtcggtggcattttgtcagcatataacttctggctccttggacaactgtgttttgtcttaacaaggaagctgaccttacccttaaaacctttcaacaaatgaaatgttactcatggttgtttttctggttgctttcttatcgcacaggtgttatacaaagaaaacatgggcaagggaacccctctacctgtcactcctgagatggagagagtcaaacacaatcaagaaaatattagctcggtacttgggcaagaaaagaaaaaaactacttactgattttaaaaactatttcatgatttaaaataatacatattaatcctattttctaaagacaaattttgtgaacttctttctttagcaaatttatccttttttcctttgggctacttctagcctaacaccatttccataatacagttaattttgattttttatttcatctgatattttcaatcattttttaaaaatgagtttttccgtttgtgtggataacaacactgagttctaacagtctcaaatcctcatgtgattgtttaggaggcaccgtactcacaaaaatgaaaaaaaataacatggataactctgacagcctttccccagcagctgaggtccctgcttctctagagggtgcagattccccatcccaacaacagcttccactaaagtagctggtggcattttgtcagcatataacttctggctccttggacgactgtgttttcttaacaaggaagttgaccttacccttaaaacctctcaacaaatgaaatgttactcatggttgtttttctggatgctttctcatcgcacaggtgttatacaaagaaaacatgggcaagggaactcctttagctgtcactcccgagatggagcgagtcaaacacaatcaagaaaatattagctcggtacttggcgagaaaagaaaaaaactacttactgattttaaaaactacttttatgatttaaaataatacatattaatcctactttttaaagacaacttaaattttgtgaaatttctttagcaaatttacccttttttcctttgggctacttctagcctaaccccataataacaaggttgctttaatccataaagttctaatatcaagaagtaacagattttcctataaaacatccttttgcttctctctctccaaacttactctctatccactacccccaaggtctctttgttttagatatgcttgaaatttaggacgggtacgtgtggg

SEQ ID NO: 8490 - protein, 822 aa, Homo sapiens
MLLHVRKVKDEVSDLKYKEVYQRNKSNCTIEPDAVHIKAAKDAYKVNTNLDYKKQYEANKAHWKWTPDRPDFLQAAKSSLQQSDFEYKLDREFLKGCKLSVTDDKNTVLALRNTLIESDLKYKEKHVKERGTCHAVPDTPQILLAKTVSNLVSENKYKDHVKKHLAQGSYTTLPETRDTVHVKEVTKHVSDTNYKKKFVKEKGKSNYSIMLEPPEVKHAMEVAKKQSDVAYRKDAKENLHYTTVADRPDIKKATQAAKQASEVEYRAKHRKEGSHGLSMLGRPDIEMAKKAAKLSSQVKYRENFDKEKGKTPKYNPKDSQLYKVMKDANNLASEVKYKADLKKLHKPVTDMKESLIMNHVLNTSQLASSYQYKKKYEKSKGHYHTIPDNLEQLHLKEATELQSIVKYKEKYEKERGKPMLDFETPTYITAKESQQMQSGKEYRKDYEESIKGRNLTGLEVTPALLHVKYATKIASEKEYRKDLEESIRGKGLTEMEDTPDMLRAKNATQILNEKEYKRDLELEVKGRGLNAMANETPDFMRARNATDIASQIKYKQSAEMEKANFTSVVDTPEIIHAQQVKNLSSQKKYKEDAEKSMSYYETVLDTPEIQRVRENQKNFSLLQYQCDLKNSKGKITVVQDTPEILRVKENQKNFSSVLYKEDVSPGTAIGKTPEMMRVKQTQDHISSVKYKEAIGQGTPIPDLPEVKRVKETQKHISSVMYKENLGTGIPTTVTPEIERVKRNQENFSSILYKENLSKGTPLPVTPEMERVKLNQENFSSVLYKENLGTGIPIPITPEMQRVKHNQENLSSVFWKERGKNAT

SEQ ID NO: 8491 - DNA, 650 bp, Homo sapiens
ctctctccatctctggagtgataggtgttgggattcctttccccaaattttctttgtacaaaacctgtgagatacaagaaagtacccagaggacatttaaaacaggcacagagagtaaggaaggaaggaaatgggggaaggggttatatgtgaggaggcagttttttagtaagtaatatttagtaaggataatgtttttacttttttcacagttttaatgatgaactctacaatgctaattctggaaatgaaaaagtacaatggaaagcattaagttatataacgctgaggaatcttgttaattctacttatagtatttcaaatctagtcaagtcactgaaaatgttcaagtataatcggaaatgtgtctttccgatagccgttcctggtgagacatcctctttatataaaacctgggcattcagaatcaggacagtgttaacacagaagaaaagaaaacccagcagttcctggagaaagactaggacacatggcttttgtgaaaacaagacactagacgatgttcccaggtcacactggtattggagctatgaagaaagagtaaacatcttgttaagatttcaacattgctttgttttctttatttgtcctatattatgtgaagaaaattaaaatcctgtatctttaaa

SEQ ID NO: 8492 - protein, 96 aa, Homo sapiens
MFKYNRKCVFPIAVPGETSSLYKTWAFRIRTVLTQKKRKPSSSWRKTRTHGFCENKTLDDVPRSHWYWSYEERVNILLRFQHCFVFFICPILCEEN

SEQ ID NO: 8493 - DNA, 352 bp, Homo sapiens
caacaatgctggtgaatttgagggcctcaggctttatacgatacagcctttcattcaagagattctgggcattcttcactctcatcacttccacagaaccctctggcagccatccaatacccttcagccattccaggtctgacttgtacaagttatcgctctgcaggtcgtaggctttcttggcctggatcacatcgttctgatctggcagacacgtccactggtgcagataattgcgataatcaatgtcgctaaccaggacctggcatttcttggcttgaacaattgacatcatgtccaacggtgtgttgtgaattcctttagacttctcataagctttcttatattctct

SEQ ID NO: 8494 - protein, 55 aa, Homo sapiens
MLVNLRASGFIRYSLSFKRFWAFFTLITSTEPSGSHPIPFSHSRSDLYKLSLCRS

SEQ ID NO: 8495 - DNA, 353 bp, Homo sapiens
tttttttttttttgtagcgcttatatactgaagcctgggacaatgacaagaaaactattcatgtcatgcctgatacaccagaaatcatgttagccaaactcaaccgaataaactacagtgataaactctataaacttgctttggaagagtccaagaaggaaggctatgacttgcgtctggatgccattccaatccaagcagccaaggcttcaagagatattgctagtgatgtaagtggatgttttggaaaagccatttcttattcaaagatgttgacaaatagaagcttttagagtttttcttgctagaaatttagttacccctataagtctcaattccctttagtgattttc

SEQ ID NO: 8496 - protein, 75 aa, Homo sapiens
MPDTPEIMLAKLNRINYSDKLYKLALEESKKEGYDLRLDAIPIQAAKASRDIASDVSGCFGKAISYSKMLTNRSF

SEQ ID NO: 8497 - DNA, 392 bp, Homo sapiens
caggcaaagcctttctttttggaaagaattgcaaaacacagggttctgtatgtcagaagctacagaacagacgtgggagttttctcagggagcccagagggagccatccaatgcccttcatgaagtcagcatagtcagccttgtactgattctgcaaaagaggaaaaattaaattatgagaagaaactggaacttcccaagaatcctaagtgtgtgtttaacattctgtaacttccatttcatttgtaaattttctgtaacttttccacttcaatatttgcttgaatattggtatttaaccaatagcatgttgaacttcaaccatttcttccctaaacttttatcctttttatatttccttgcatgataaattaaaaataagcagaaatgtc

SEQ ID NO: 8498 - protein, 40 aa, Homo sapiens
MSEATEQTWEFSQGAQREPSNALHEVSIVSLVLILQKRKN

SEQ ID NO: 8499 - DNA, 428 bp, Homo sapiens
atgaagctctcagttcagagatcaagatgattgggggataagaagaagaaaaacattcctgcaggactggtctgggcagaagaggagttgtggtaactagatatgaggagaaagagaggaaggaggcacagagcagttggagcttgctgcctggaagaatgacgttttagagacaaggtctgactgtgttgcccaggctggacttcaactcctcagtacaagtgatcctcctgcctgagcctcctgaatagctgggactacaggcctgcaccaccataccctgctctagttacacaaatcttaaaatgatgctgttatgttaattcaattaagaaagtaaactagttctatgatccaagcacatagttgtgactcaattcatgttgttgtttttaatcctgaaatgatattgtaaaataagagctttg

SEQ ID NO: 8500 - protein, 43 aa, Homo sapiens
GEREEGGTEQLELAAWKNDVLETRSDCVAQAGLQLLSTSDPPA

SEQ ID NO: 8501 - DNA, 577 bp, Homo sapiens
cttgagcccaggagttcaaggctgcggcgagctgtgtttgcactccagcctaggtgtcagagtgagactatgtctttaaaaaaaaaaaaaagaagaaagaaatgtattataacattaggagttgtaggcggcaacattacaaccagtatttttctgattacgattttgtatgttacagatattctatattgagcgcattataccaataatcagaaaacattgctgaatcattttgtctttaaagaatcatctaatagggatgggaaggaatacaaaagttgtattaagtaaatgggatgaagctctcagttcagagatcaagatgattgggggataagaagaagaaaaacattcctgcaggactggtctgggcagaagaggagttgtggtaactagatatgaggagaaagagaggaaggaggcacagagcagttggagcttgctgcctggaagaatgacggtatgataaagagatgggatgatgtgaaataattcacattgttaattatgaagtgtgttttgaatcacctcagtgttacccagaaacgacactcggttatcatgttcagatagggga

SEQ ID NO: 8502 - protein, 40 aa, Homo sapiens
MSLKKKKRRKKCIITLGVVGGNITTSIFLITILYVTDILY

SEQ ID NO: 8503 - DNA, 2729 bp, Homo sapiens
ggagctgggggaggacggtggcccgcgaggctcgtcgcagacaacgcggcggcgatgtccgcgagccagagcacaaagttatcattgttgggctggataatgcagggaaaactaccattctttaccaattttctatgaatgaagttgtacatacatctcctacaataggaagtaatgtagaagagatagtgattaataatacacgtttcctaatgtgggatattggtggccaagaatctcttcgttcttcctggaacacttactatactaacacagagtttgtaatagttgttgtggacagtacagacagagagaggatttctgtaactagagaagaactctataaaatgttagcgcatgaggacctaagaaaagctggattgctgatttttgctaataaacaagatgttaaagaatgcatgactgtagcagaaatctcccagtttttgaagaccacttatttgaaaacaaagatgaagtctcaccttccagtttgctttctcattagttttttccaaagtaagttattgaagctgtgattgacatttttctcataatgaatcctctcaggacattgtgtagcctatggtaagtacaaagggagaggaagacattttgaattttaagagctttattatcagtttaaccctccctagttgaatgttattttcttcttgttccattaagtcagaatacaaatcagcacagatattcgaatgtttccaatattttaaaatgtaatgttacttatgaaaagtattttgcttaaggttgtgtgtgtattgtgtatatacctcaagttcaagttaatggcattgatttatgttccagacaaaaataacacaaataataatatccttcgttataaccacaatgagataagtattggcattagtgttcagtgccattttatactttctctctgtgttctctgtattgtactaaccaacctcccaaatcgctgagctgcttgtttaaaaaaaaaaaaaaggaaaaggaaaaagcatgacattgtgtatcgattttttgttgttgaccaaaatcacacacatggaaacatgtaattcaacagagtgggaaagctagcagattcttggcttagtattactaataggcaggattgtacaatgagcaactatcagattattcctttcagtggttcttatggcatctaaattactgaataaattattaatccattaatcagtgaatcaaattatgattacaattatcaaatgaatgctcagcattaattgaaaactgttttgtgaaacatgtctacccagaaaagtagcattctataaatactattaaacaacttagctatattatttttaagtattaaattatatgtcaagcagttaaagtgaatttcagagtaaaagtaaggcatgtttctgagcaacattgataatttcttaatttgcaaatttcttcttattttggtacttggaatatagtgtgagattttttatttctaaattttgttgtatcttctattacataaatgcattgacaattataaaatgcaagtgttttttgaatgattttaagaatttggcttaaaaattgattgatacaacgtattatttgtactaagaagtaacttgacccaaaacaccttttatgtttgcttagggtatattttttcagtgtctgaaagtcaaaggtattcctgtcacaactgtaaacaaacttatcctaaatgtgttaaaacatattcttgggtactctatttatgtatctttcatgccttgaaaatctgaaggttaatccaaactcacatgttttagcatatttgagaaaaaaaaactaccttcaatatcagccttttaaatttcatgaagattttggtgaggaataatagtatatagtttaagtattgacaaaactttgaaagtttctttctttaaaatgggaaatactcaatatctaaatccaggtcaggcatgggatatcagtatttaacattggatgttttatgttttatatttataatgttcaaaatgcaagcataacatttaatatttgtccacatggttttacaaaagtaaatcttaaattactaagcttttcccatatgttctcgtactttctcaaatccctataaagaattacttgttatctattaaaaatctcctttacccaaatctgtattatggtttcgccagacaaatattatgtgatgtagcccagaaaatccacaccttttgtcctttttatgttttaatttgaataatcatgtgcttagtcccttggattactgccacatcagtttaacacgatatcagcacattcccttgtcatcatcaaggtgttggctcagatttattcttaattggatgtttaaagcatgtactaccttgttacagttggtttagtgtagtggattattgacatgacatcatgagaagatgtgtaattttataccacatttataaaacatgattttgttttctacccttcaaggtaaacattaaaaataaggtggtacttgtgtacttgtacataaaaccaaaattatagttgggaaaaaaataaatttatatatgaaaatgtcaaaatcattttaaaagtattattttcaaataaaatggagaagctggtgaaaagtcatattggcaatttttatgtagtttaagtggaattaagcagagggagatgcttttgggtttttaatatgccacttctgagtgaaaacatctcgtggagtcattgtgttcagctct

SEQ ID NO: 8504 - protein, 134 aa, Homo sapiens
MNEVVHTSPTIGSNVEEIVINNTRFLMWDIGGQESLRSSWNTYYTNTEFVIVVVDSTDRERISVTREELYKMLAHEDLRKAGLLIFANKQDVKECMTVAEISQFLKTTYLKTKMKSHLPVCFLISFFQSKLLKL

SEQ ID NO: 8505 - DNA, 2989 bp, Homo sapiens
ccgcagccgcccgagaggagctgggggaggacggtggcccgcgaggctcgtcgcagacaacgcggcggcgatgtccgcgagccagagcacaaagttatcattgttgggctggataatgcagggaaaactaccattctttaccaattttctatgaatgaagttgtacatacatctcctacaataggaagtaatgtagaagagatagtgattaataatacacgtttcctaatgtgggatattggtggccaagaatctcttcgttcttcctggaacacttactatactaacacagagtttgtaatagttgttgtggacagtacagacagagagaggatttctgtaactagagaagaactctataaaatgttagcgcatgaggacctaagaaaagctggattgctgatttttgctaataaacaagatgttaaagaatgcatgactgtagcagaaatctcccagtttttgaagctaacttctattaaagatcaccagtggcatatccaggcatgctgtgctctaactggcgagggattgtgccaaggacttgaatggatgatgtcacgacttaagattagatgatctctactgacctcttctcatagattttgtataaatgaagtgctggactttacctgaaagctgcaaaaattaatggtttagatatatttataataaactgatttaaactttttctataagaagaaaaattaagaccacttatttgaaaacaaagatgaagtctcaccttccagtttgctttctcattagttttttccaaagtaagttattgaagctgtgattgacatttttctcataatgaatcctctcaggacattgtgtagcctatggtaagtacaaagggagaggaagacattttgaattttaagagctttattatcagtttaaccctccctagttgaatgttattttcttcttgttccattaagtcagaatacaaatcagcacagatattcgaatgtttccaatattttaaaatgtaatgttacttatgaaaagtattttgcttaaggttgtgtgtgtattgtgtatatacctcaagttcaagttaatggcattgatttatgttccagacaaaaataacacaaataataatatccttcgttataaccacaatgagataagtattggcattagtgttcagtgccattttatactttctctctgtgttctctgtattgtactaaccaacctcccaaatcgctgagctgcttgtttaaaaaaaaaaaaaaggaaaaggaaaaagcatgacattgtgtatcgattttttgttgttgaccaaaatcacacacatggaaacatgtaattcaacagagtgggaaagctagcagattcttggcttagtattactaataggcaggattgtacaatgagcaactatcagattattcctttcagtggttcttatggcatctaaattactgaataaattattaatccattaatcagtgaatcaaattatgattacaattatcaaatgaatgctcagcattaattgaaaactgttttgtgaaacatgtctacccagaaaagtagcattctataaatactattaaacaacttagctatattatttttaagtattaaattatatgtcaagcagttaaagtgaatttcagagtaaaagtaaggcatgtttctgagcaacattgataatttcttaatttgcaaatttcttcttattttggtacttggaatatagtgtgagattttttatttctaaattttgttgtatcttctattacataaatgcattgacaattataaaatgcaagtgttttttgaatgattttaagaatttggcttaaaaattgattgatacaacgtattatttgtactaagaagtaacttgacccaaaacaccttttatgtttgcttagggtatattttttcagtgtctgaaagtcaaaggtattcctgtcacaactgtaaacaaacttatcctaaatgtgttaaaacatattcttgggtactctatttatgtatctttcatgccttgaaaatctgaaggttaatccaaactcacatgttttagcatatttgagaaaaaaaaactaccttcaatatcagccttttaaatttcatgaagattttggtgaggaataatagtatatagtttaagtattgacaaaactttgaaagtttctttctttaaaatgggaaatactcaatatctaaatccaggtcaggcatgggatatcagtatttaacattggatgttttatgttttatatttataatgttcaaaatgcaagcataacatttaatatttgtccacatggttttacaaaagtaaatcttaaattactaagcttttcccatatgttctcgtactttctcaaatccctataaagaattacttgttatctattaaaaatctcctttacccaaatctgtattatggtttcgccagacaaatattatgtgatgtagcccagaaaatccacaccttttgtcctttttatgttttaatttgaataatcatgtgcttagtcccttggattactgccacatcagtttaacacgatatcagcacattcccttgtcatcatcaaggtgttggctcagatttattcttaattggatgtttaaagcatgtactaccttgttacagttggtttagtgtagtggattattgacatgacatcatgagaagatgtgtaattttataccacatttataaaacatgattttgttttctacccttcaaggtaaacattaaaaataaggtggtacttgtgtacttgtacataaaaccaaaattatagttgggaaaaaaataaatttatatatgaaaatgtcaaaatcattttaaaagtattattttcaaataaaatggagaagctggtgaaaagtcatattggcaatttttatgtagtttaagtggaattaagcagagggagatgcttttgggtttttaatatgccacttctgagtgaaaacatctcgtggagtcattgtgttcagctct

SEQ ID NO: 8506 - protein, 142 aa, Homo sapiens; identical to SEQ ID NO: 632

SEQ ID NO: 8507 - DNA, 3269 bp, Homo sapiens
cccgcccgcgtggtcgtcgccaccgcagccgcccgagaggagctgggggaggacggtggcccgcgaggctcgtcgcagacaacgcggcggcgatgtccgcgagccaggcgagtgccgcggcggcagcggcggggccttgcgcgcggcagggcggcctgggcttcggcctccctccggttccctggaagcgggcccgcgaccagcgcgggagcagcagcagaggcggaggctccagcgcgtctctctcctccccctcagcctgagccgggggaagccaggcggcccgggtgtctggagggggggggtccgctgcccgagaatgggaattctcttcactagaatatggagactgttcaatcaccaggagcacaaagttatcattgttgggctggataatgcagggaaaactaccattctttaccaattttctatgaatgaagttgtacatacatctcctacaataggaagtaatgtagaagagatagtgattaataatacacgtttcctaatgtgggatattggtggccaagaatctcttcgttcttcctggaacacttactatactaacacagagtttgtaatagttgttgtggacagtacagacagagagaggatttctgtaactagagaagaactctataaaatgttagcgcatgaggacctaagaaaagctggattgctgatttttgctaataaacaagatgttaaagaatgcatgactgtagcagaaatctcccagtttttgaagctaacttctattaaagatcaccagtggcatatccaggcatgctgtgctctaactggcgagggattgtgccaaggacttgaatggatgatgtcacgacttaagattagatgatctctactgacctcttctcatagattttgtataaatgaagtgctggactttacctgaaagctgcaaaaattaatggtttagatatatttataataaactgatttaaactttttctataagaagaaaaattaagaccacttatttgaaaacaaagatgaagtctcaccttccagtttgctttctcattagttttttccaaagtaagttattgaagctgtgattgacatttttctcataatgaatcctctcaggacattgtgtagcctatggtaagtacaaagggagaggaagacattttgaattttaagagctttattatcagtttaaccctccctagttgaatgttattttcttcttgttccattaagtcagaatacaaatcagcacagatattcgaatgtttccaatattttaaaatgtaatgttacttatgaaaagtattttgcttaaggttgtgtgtgtattgtgtatatacctcaagttcaagttaatggcattgatttatgttccagacaaaaataacacaaataataatatccttcgttataaccacaatgagataagtattggcattagtgttcagtgccattttatactttctctctgtgttctctgtattgtactaaccaacctcccaaatcgctgagctgcttgtttaaaaaaaaaaaaaaggaaaaggaaaaagcatgacattgtgtatcgattttttgttgttgaccaaaatcacacacatggaaacatgtaattcaacagagtgggaaagctagcagattcttggcttagtattactaataggcaggattgtacaatgagcaactatcagattattcctttcagtggttcttatggcatctaaattactgaataaattattaatccattaatcagtgaatcaaattatgattacaattatcaaatgaatgctcagcattaattgaaaactgttttgtgaaacatgtctacccagaaaagtagcattctataaatactattaaacaacttagctatattatttttaagtattaaattatatgtcaagcagttaaagtgaatttcagagtaaaagtaaggcatgtttctgagcaacattgataatttcttaatttgcaaatttcttcttattttggtacttggaatatagtgtgagattttttatttctaaattttgttgtatcttctattacataaatgcattgacaattataaaatgcaagtgttttttgaatgattttaagaatttggcttaaaaattgattgatacaacgtattatttgtactaagaagtaacttgacccaaaacaccttttatgtttgcttagggtatattttttcagtgtctgaaagtcaaaggtattcctgtcacaactgtaaacaaacttatcctaaatgtgttaaaacatattcttgggtactctatttatgtatctttcatgccttgaaaatctgaaggttaatccaaactcacatgttttagcatatttgagaaaaaaaaactaccttcaatatcagccttttaaatttcatgaagattttggtgaggaataatagtatatagtttaagtattgacaaaactttgaaagtttctttctttaaaatgggaaatactcaatatctaaatccaggtcaggcatgggatatcagtatttaacattggatgttttatgttttatatttataatgttcaaaatgcaagcataacatttaatatttgtccacatggttttacaaaagtaaatcttaaattactaagcttttcccatatgttctcgtactttctcaaatccctataaagaattacttgttatctattaaaaatctcctttacccaaatctgtattatggtttcgccagacaaatattatgtgatgtagcccagaaaatccacaccttttgtcctttttatgttttaatttgaataatcatgtgcttagtcccttggattactgccacatcagtttaacacgatatcagcacattcccttgtcatcatcaaggtgttggctcagatttattcttaattggatgtttaaagcatgtactaccttgttacagttggtttagtgtagtggattattgacatgacatcatgagaagatgtgtaattttataccacatttataaaacatgattttgttttctacccttcaaggtaaacattaaaaataaggtggtacttgtgtacttgtacataaaaccaaaattatagttgggaaaaaaataaatttatatatgaaaatgtcaaaatcattttaaaagtattattttcaaataaaatggagaagctggtgaaaagtcatattggcaatttttatgtagtttaagtggaattaagcagagggagatgcttttgggtttttaatatgccacttctgagtgaaaacatctcgtggagtcattgtgttcagctct

SEQ ID NO: 8508 - protein, 179 aa, Homo sapiens; identical to SEQ ID NO: 634

SEQ ID NO: 8509 - DNA, 2629 bp, Homo sapiens
ggagctgggggaggacggtggcccgcgaggctcgtcgcagacaacgcggcggcgatgtccgcgagccagagcacaaagttatcattgttgggctggataatgcagggaaaactaccattctttaccaattttctatgaatgaagttgtacatacatctcctacaataggaagtaatgtagaagagatagtgattaataatacacgtttcctaatgtgggatattggtggccaagaatctcttcgttcttcctggaacacttactatactaacacagagtttgtaatagttgttgtggacagtacagacagagagaggatttctgtaactagagaagaactctataaaatgttagcgcatgaggacctaagaaaagctggattgctgatttttgctaataaacaagatgttaaagaatgcatgactgtagcagaaatctcccagtttttgaagaccacttatttgaaaacaaagatgaagtctcaccttccagtttgctttctcattagttttttccaaagtaagttattgaagctgtgattgacatttttctcataatgaatcctctcaggacattgtgtagcctatggtaagtacaaagggagaggaagacattttgaattttaagagctttattatcagtttaaccctccctagttgaatgttattttcttcttgttccattaagtcagaatacaaatcagcacagatattcgaatgtttccaatattttaaaatgtaatgttacttatgaaaagtattttgcttaaggttgtgtgtgtattgtgtatatacctcaagttcaagttaatggcattgatttatgttccagacaaaaataacacaaataataatatccttcgttataaccacaatgagataagtattggcattagtgttcagtgccattttatactttctctctgtgttctctgtattgtactaaccaacctcccaaatcgctgagctgcttgtttaaaaaaaaaaaaaaggaaaaggaaaaagcatgacattgtgtatcgattttttgttgttgaccaaaatcacacacatggaaacatgtaattcaacagagtgggaaagctagcagattcttggcttagtattactaataggcaggattgtacaatgagcaactatcagattattcctttcagtggttcttatggcatctaaattactgaataaattattaatccattaatcagtgaatcaaattatgattacaattatcaaatgaatgctcagcattaattgaaaactgttttgtgaaacatgtctacccagaaaagtagcattctataaatactattaaacaacttagctatattatttttaagtattaaattatatgtcaagcagttaaagtgaatttcagagtaaaagtaaggcatgtttctgagcaacattgataatttcttaatttgcaaatttcttcttattttggtacttggaatatagtgtgagattttttatttctaaattttgttgtatcttctattacataaatgcattgacaattataaaatgcaagtgttttttgaatgattttaagaatttggcttaaaaattgattgatacaacgtattatttgtactaagaagtaacttgacccaaaacaccttttatgtttgcttagggtatattttttcagtgtctgaaagtcaaaggtattcctgtcacaactgtaaacaaacttatcctaaatgtgttaaaacatattcttgggtactctatttatgtatctttcatgccttgaaaatctgaaggttaatccaaactcacatgttttagcatatttgagaaaaaaaaactaccttcaatatcagccttttaaatttcatgaagattttggtgaggaataatagtatatagtttaagtattgacaaaactttgaaagtttctttctttaaaatgggaaatactcaatatctaaatccaggtcaggcatgggatatcagtatttaacattggatgttttatgttttatatttataatgttcaaaatgcaagcataacatttaatatttgtccacatggttttacaaaagtaaatcttaaattactaagcttttcccatatgttctcgtactttctcaaatccctataaagaattacttgttatctattaaaaatctcctttacccaaatctgtattatggtttcgccagacaaatattatgtgatgtagcccagaaaatccacaccttttgtcctttttatgttttaatttgaataatcatgtgcttagtcccttggattactgccacatcagtttaacacgatatcagcacattcccttgtcatcatcaaggtgttggctcagatttattcttaattggatgtttaaagcatgtactaccttgttacagttggtttagtgtagtggattattgacatgacatcatgagaagatgtgtaattttataccacatttataaaacatgattttgttttctacccttcaaggtaaacattaaaaataaggtggtacttgtgtacttgtacataaaaccaaaattatagttgggaaaaaaataaatttatatatgaaaatgtcaaaatcattttaaaagtattattttcaaataaaatggagaagctggtgaaaagtcatattggcaatttt

SEQ ID NO: 8510 - protein, 134 aa, Homo sapiens; identical to SEQ ID NO: 8504

SEQ ID NO: 8511 - DNA, 2889 bp, Homo sapiens
ccgcagccgcccgagaggagctgggggaggacggtggcccgcgaggctcgtcgcagacaacgcggcggcgatgtccgcgagccagagcacaaagttatcattgttgggctggataatgcagggaaaactaccattctttaccaattttctatgaatgaagttgtacatacatctcctacaataggaagtaatgtagaagagatagtgattaataatacacgtttcctaatgtgggatattggtggccaagaatctcttcgttcttcctggaacacttactatactaacacagagtttgtaatagttgttgtggacagtacagacagagagaggatttctgtaactagagaagaactctataaaatgttagcgcatgaggacctaagaaaagctggattgctgatttttgctaataaacaagatgttaaagaatgcatgactgtagcagaaatctcccagtttttgaagctaacttctattaaagatcaccagtggcatatccaggcatgctgtgctctaactggcgagggattgtgccaaggacttgaatggatgatgtcacgacttaagattagatgatctctactgacctcttctcatagattttgtataaatgaagtgctggactttacctgaaagctgcaaaaattaatggtttagatatatttataataaactgatttaaactttttctataagaagaaaaattaagaccacttatttgaaaacaaagatgaagtctcaccttccagtttgctttctcattagttttttccaaagtaagttattgaagctgtgattgacatttttctcataatgaatcctctcaggacattgtgtagcctatggtaagtacaaagggagaggaagacattttgaattttaagagctttattatcagtttaaccctccctagttgaatgttattttcttcttgttccattaagtcagaatacaaatcagcacagatattcgaatgtttccaatattttaaaatgtaatgttacttatgaaaagtattttgcttaaggttgtgtgtgtattgtgtatatacctcaagttcaagttaatggcattgatttatgttccagacaaaaataacacaaataataatatccttcgttataaccacaatgagataagtattggcattagtgttcagtgccattttatactttctctctgtgttctctgtattgtactaaccaacctcccaaatcgctgagctgcttgtttaaaaaaaaaaaaaaggaaaaggaaaaagcatgacattgtgtatcgattttttgttgttgaccaaaatcacacacatggaaacatgtaattcaacagagtgggaaagctagcagattcttggcttagtattactaataggcaggattgtacaatgagcaactatcagattattcctttcagtggttcttatggcatctaaattactgaataaattattaatccattaatcagtgaatcaaattatgattacaattatcaaatgaatgctcagcattaattgaaaactgttttgtgaaacatgtctacccagaaaagtagcattctataaatactattaaacaacttagctatattatttttaagtattaaattatatgtcaagcagttaaagtgaatttcagagtaaaagtaaggcatgtttctgagcaacattgataatttcttaatttgcaaatttcttcttattttggtacttggaatatagtgtgagattttttatttctaaattttgttgtatcttctattacataaatgcattgacaattataaaatgcaagtgttttttgaatgattttaagaatttggcttaaaaattgattgatacaacgtattatttgtactaagaagtaacttgacccaaaacaccttttatgtttgcttagggtatattttttcagtgtctgaaagtcaaaggtattcctgtcacaactgtaaacaaacttatcctaaatgtgttaaaacatattcttgggtactctatttatgtatctttcatgccttgaaaatctgaaggttaatccaaactcacatgttttagcatatttgagaaaaaaaaactaccttcaatatcagccttttaaatttcatgaagattttggtgaggaataatagtatatagtttaagtattgacaaaactttgaaagtttctttctttaaaatgggaaatactcaatatctaaatccaggtcaggcatgggatatcagtatttaacattggatgttttatgttttatatttataatgttcaaaatgcaagcataacatttaatatttgtccacatggttttacaaaagtaaatcttaaattactaagcttttcccatatgttctcgtactttctcaaatccctataaagaattacttgttatctattaaaaatctcctttacccaaatctgtattatggtttcgccagacaaatattatgtgatgtagcccagaaaatccacaccttttgtcctttttatgttttaatttgaataatcatgtgcttagtcccttggattactgccacatcagtttaacacgatatcagcacattcccttgtcatcatcaaggtgttggctcagatttattcttaattggatgtttaaagcatgtactaccttgttacagttggtttagtgtagtggattattgacatgacatcatgagaagatgtgtaattttataccacatttataaaacatgattttgttttctacccttcaaggtaaacattaaaaataaggtggtacttgtgtacttgtacataaaaccaaaattatagttgggaaaaaaataaatttatatatgaaaatgtcaaaatcattttaaaagtattattttcaaataaaatggagaagctggtgaaaagtcatattggcaatttt

SEQ ID NO: 8512 - protein, 142 aa, Homo sapiens; identical to SEQ ID NO: 632

SEQ ID NO: 8513 - DNA, 3169 bp, Homo sapiens; identical to SEQ ID NO: 633

SEQ ID NO: 8514 - protein, 179 aa, Homo sapiens; identical to SEQ ID NO: 634

SEQ ID NO: 8515 - DNA, 1008 bp, Homo sapiens
ggagctgggggaggacggtggcccgcgaggctcgtcgcagacaacgcggcggcgatgtccgcgagccagagcacaaagttatcattgttgggctggataatgcagggaaaactaccattctttaccaattttctatgaatgaagttgtacatacatctcctacaataggaagtaatgtagaagagatagtgattaataatacacgtttcctaatgtgggatattggtggccaagaatctcttcgttcttcctggaacacttactatactaacacagagtttgtaatagttgttgtggacagtacagacagagagaggatttctgtaactagagaagaactctataaaatgttagcgcatgaggacctaagaaaagctggattgctgatttttgctaataaacaagatgttaaagaatgcatgactgtagcagaaatctcccagtttttgaagaccacttatttgaaaacaaagatgaagtctcaccttccagtttgctttctcattagttttttccaaagtaagttattgaagctgtgattgacatttttctcataatgaatcctctcaggacattgtgtagcctatggtaagtacaaagggagaggaagacattttgaattttaagagctttattatcagtttaaccctccctagttgaatgttattttcttcttgttccattaagtcagaatacaaatcagcacagatattcgaatgtttccaatattttaaaatgtaatgttacttatgaaaagtattttgcttaaggttgtgtgtgtattgtgtatatacctcaagttcaagttaatggcattgatttatgttccagacaaaaataacacaaataataatatccttcgttataaccacaatgagataagtattggcattagtgttcagtgccattttatactttctctctgtgttctctgtattgtactaaccaacctcccaaatcgctgagctgcttgtttaaaaaaaaaaaaaaggaaaaggaaaaagcatg

SEQ ID NO: 8516 - protein, 134 aa, Homo sapiens; identical to SEQ ID NO: 8504

SEQ ID NO: 8517 - DNA, 1276 bp, Homo sapiens
cgtcgccaccgcagccgcccgagaggagctgggggaggacggtggcccgcgaggctcgtcgcagacaacgcggcggcgatgtccgcgagccagagcacaaagttatcattgttgggctggataatgcagggaaaactaccattctttaccaattttctatgaatgaagttgtacatacatctcctacaataggaagtaatgtagaagagatagtgattaataatacacgtttcctaatgtgggatattggtggccaagaatctcttcgttcttcctggaacacttactatactaacacagagtttgtaatagttgttgtggacagtacagacagagagaggatttctgtaactagagaagaactctataaaatgttagcgcatgaggacctaagaaaagctggattgctgatttttgctaataaacaagatgttaaagaatgcatgactgtagcagaaatctcccagtttttgaagctaacttctattaaagatcaccagtggcatatccaggcatgctgtgctctaactggcgagggattgtgccaaggacttgaatggatgatgtcacgacttaagattagatgatctctactgacctcttctcatagattttgtataaatgaagtgctggactttacctgaaagctgcaaaaattaatggtttagatatatttataataaactgatttaaactttttctataagaagaaaaattaagaccacttatttgaaaacaaagatgaagtctcaccttccagtttgctttctcattagttttttccaaagtaagttattgaagctgtgattgacatttttctcataatgaatcctctcaggacattgtgtagcctatggtaagtacaaagggagaggaagacattttgaattttaagagctttattatcagtttaaccctccctagttgaatgttattttcttcttgttccattaagtcagaatacaaatcagcacagatattcgaatgtttccaatattttaaaatgtaatgttacttatgaaaagtattttgcttaaggttgtgtgtgtattgtgtatatacctcaagttcaagttaatggcattgatttatgttccagacaaaaataacacaaataataatatccttcgttataaccacaatgagataagtattggcattagtgttcagtgccattttatactttctctctgtgttctctgtattgtactaaccaacctcccaaatcgctgagctgcttgtttaaaaaaaaaaaaaaggaaaaggaaaaagcatg

SEQ ID NO: 8518 - protein, 142 aa, Homo sapiens; identical to SEQ ID NO: 632

SEQ ID NO: 8519 - DNA, 1548 bp, Homo sapiens
cccgcccgcgtggtcgtcgccaccgcagccgcccgagaggagctgggggaggacggtggcccgcgaggctcgtcgcagacaacgcggcggcgatgtccgcgagccaggcgagtgccgcggcggcagcggcggggccttgcgcgcggcagggcggcctgggcttcggcctccctccggttccctggaagcgggcccgcgaccagcgcgggagcagcagcagaggcggaggctccagcgcgtctctctcctccccctcagcctgagccgggggaagccaggcggcccgggtgtctggagggggggggtccgctgcccgagaatgggaattctcttcactagaatatggagactgttcaatcaccaggagcacaaagttatcattgttgggctggataatgcagggaaaactaccattctttaccaattttctatgaatgaagttgtacatacatctcctacaataggaagtaatgtagaagagatagtgattaataatacacgtttcctaatgtgggatattggtggccaagaatctcttcgttcttcctggaacacttactatactaacacagagtttgtaatagttgttgtggacagtacagacagagagaggatttctgtaactagagaagaactctataaaatgttagcgcatgaggacctaagaaaagctggattgctgatttttgctaataaacaagatgttaaagaatgcatgactgtagcagaaatctcccagtttttgaagctaacttctattaaagatcaccagtggcatatccaggcatgctgtgctctaactggcgagggattgtgccaaggacttgaatggatgatgtcacgacttaagattagatgatctctactgacctcttctcatagattttgtataaatgaagtgctggactttacctgaaagctgcaaaaattaatggtttagatatatttataataaactgatttaaactttttctataagaagaaaaattaagaccacttatttgaaaacaaagatgaagtctcaccttccagtttgctttctcattagttttttccaaagtaagttattgaagctgtgattgacatttttctcataatgaatcctctcaggacattgtgtagcctatggtaagtacaaagggagaggaagacattttgaattttaagagctttattatcagtttaaccctccctagttgaatgttattttcttcttgttccattaagtcagaatacaaatcagcacagatattcgaatgtttccaatattttaaaatgtaatgttacttatgaaaagtattttgcttaaggttgtgtgtgtattgtgtatatacctcaagttcaagttaatggcattgatttatgttccagacaaaaataacacaaataataatatccttcgttataaccacaatgagataagtattggcattagtgttcagtgccattttatactttctctctgtgttctctgtattgtactaaccaacctcccaaatcgctgagctgcttgtttaaaaaaaaaaaaaaggaaaaggaaaaagcatg

SEQ ID NO: 8520 - protein, 179 aa, Homo sapiens; identical to SEQ ID NO: 634

SEQ ID NO: 8521 - DNA, 738 bp, Homo sapiens
cccgcccgcgtggtcgtcgccaccgcagccgcccgagaggagctgggggaggacggtggcccgcgaggctcgtcgcagacaacgcggcggcgatgtccgcgagccaggcgagtgccgcggcggcagcggcggggccttgcgcgcggcagggcggcctgggcttcggcctccctccggttccctggaagcgggcccgcgaccagcgcgggagcagcagcagaggcggaggctccagcgcgtctctctcctccccctcagcctgagccgggggaagccaggcggcccgggtgtctggagggggggggtccgctgcccgagaatgggaattctcttcactagaatatggagactgttcaatcaccaggagcacaaagttatcattgttgggctggataatgcagggaaaactaccattctttaccaattttctatgaatgaagttgtacatacatctcctacaataggaagtaatgtagaagagatagtgattaataatacacgtttcctaatgtgggatattggtggccaagaatctcttcgttcttcctggaacacttactatactaacacagagtttgtaatagttgttgtggacagtacagacagagagaggatttctgtaactagagaagaactctataaaatgttagcgcatgaggacctaagaaaagctggattgctgatttttgctaataaacaagatgttaaagaatgcatgactgtagcagaaatctccca

SEQ ID NO: 8522 - protein, 138 aa, Homo sapiens
MGILFTRIWRLFNHQEHKVIIVGLDNAGKTTILYQFSMNEVVHTSPTIGSNVEEIVINNTRFLMWDIGGQESLRSSWNTYYTNTEFVIVVVDSTDRERISVTREELYKMLAHEDLRKAGLLIFANKQDVKECMTVAEI

SEQ ID NO: 8523 - DNA, 582 bp, Homo sapiens
gcccgcgtggtcgtcgccaccgcagccgcccgagaggagctgggggaggacggtggcccgcgaggctcgtcgcagacaacgcggcggcgatgtccgcgagccagagcacaaagttatcattgttgggctggataatgcagggaaaactaccattctttaccaattttctatgaatgaagttgtacatacatctcctacaataggaagtaatgtagaagagatagtgattaataatacacgtttcctaatgtgggatattggtggccaagaatctcttcgttcttcctggaacacttactatactaacacagagtttgtaatagttgttgtggacagtacagacagagagaggatttctgtaactagagaagaactctataaaatgttagcgcatgagaagtaaaaagaagacctaagtagggcctagttggaaagtgaaaggagactgaatgaggagatgaccagagaagaaaggaattacagatgaagttgggagtttgagcaaggtactcagtagggtcaagaagagccaaacaggcaaaattctgcagagagacaaatggatcaaagagtgagaatgtg

SEQ ID NO: 8524 - protein, 77 aa, Homo sapiens
MNEVVHTSPTIGSNVEEIVINNTRFLMWDIGGQESLRSSWNTYYTNTEFVIVVVDSTDRERISVTREELYKMLAHEK

SEQ ID NO: 8525 - DNA, 620 bp, Homo sapiens
aggctcgtcgcagacaacgcggcggcgatgtccgcgagccaggcgagtgccgcggcggcagcggcggggccttgcgcgcggcagggcggcctgggcttcggcctccctccggttccctggaagcgggcccgcgaccagcgcgggagcagcagcagaggcggaggctccagcgcgtctctctcctccccctcagcctgagccgggggaagccaggcggcccgggtgtctggagggggggggtccgctgcccgagaatgggaattctcttcactagaatatggagactgttcaatcaccaggccctttctttgctcaccagttgtgtttggacaccacatagaagtgctggggtcttctggaatgaaggttatagattgctgccctaaccgcaccactgagcgaccgagggttgcagaatgcggaaaacgggaggaatcgctcgacttgtccattacacctctggtttatgagcctgccctccactgccacccgtctttgtgtgtgttgggggcagggggggttcttctgcctcctgaatagagatggacttctctccatttgttttacttattatatctgtgtttaaggttaagcttaaggtcatttttctactcgtgtgg

SEQ ID NO: 8526 - protein, 43 aa, Homo sapiens
MGILFTRIWRLFNHQALSLLTSCVWTPHRSAGVFWNEGYRLLP

SEQ ID NO: 8527 - DNA, 582 bp, Homo sapiens
gcccgagaggagctgggggaggacggtggcccgcgaggctcgtcgcagacaacgcggcggcgatgtccgcgagccaggcgagtgccgcggcggcagcggcggggccttgcgcgcggcagggcggcctgggcttcggcctccctccggttccctggaagcgggcccgcgaccagcgcgggagcagcagcagaggcggaggctccagcgcgtctctctcctccccctcagcctgagccgggggaagccaggcggcccgggtgtctggagggggggggtccgctgcccgagaatgggaattctcttcactagaatatggagactgttcaatcaccagggtccgacgtccctgagtagcacggcctggcctgtctttcagccctttctttgctcaccagttgtgtttggacaccacatagaagtgctggggtcttctggaatgaaggttatagattgctgccctaaccgcaccactgagcgaccgagggttgcagaatgcggaaaacgggaggaatcgctcgacttgtccattacacctctggtttatgagcctgccctccactgccacccgtctttgtgtgtgtt

SEQ ID NO: 8528 - protein, 96 aa, Homo sapiens
MGILFTRIWRLFNHQGPTSLSSTAWPVFQPFLCSPVVFGHHIEVLGSSGMKVIDCCPNRTTERPRVAECGKREESLDLSITPLVYEPALHCHPSLC

SEQ ID NO: 8529 - DNA, 3121 bp, Homo sapiens
agcccagcctcgggggccagccccctccgcccaccgcacacgggctggccatgcggcggctctgaacgatgtcctcctcctcctacgccaagaacgggaccgcggacgggccgcactcccccacctcgcaggtggcccgaggcaccacaacccggaggagcaggttgaaaagatccgatggcagcaccacttcgaccagcttcatcctcagacagggttcagcggattcctacacaagcaggccgtctgactccgatgtctctttggaagaggaccgggaagcaattcgacaggagagagaacagcaagcagctatccagcttgagagagcaaagtccaaacctgtagcatttgccgtgaagacaaatgtgagctactgcggcgccctggacgaggatgtgcctgttccaagcacagctatctcctttgatgctaaagactttctacatattaaagagaaatataacaatgattggtggataggaaggctggtgaaagagggctgtgaaattggcttcattccaagtccactcagattggagaacatacggatccagcaagaacaaaaaagaggacgttttcacggagggaaatcaagtggaaattcttcttcaagtcttggagaaatggtatctgggacattccgagcaactcccacatcaacagcaaaacagaagcaaaaagtgacggagcacattcctccttacgatgttgtaccgtcaatgcgtccggtggtgttagtggggccgtcactgaaaggttacgaggtaacagacatgatgcagaaagccctctttgatttcctgaagcacaggtttgatgggaggatttcaataacgagagtgacagctgacatttctcttgctaagaggtctgtcctaaataatcccagcaagagagcaataattgaacgttcgaacacccggtccagcttagcggaagtacaaagtgaaattgaaagaatctttgagttggcaagatctttgcaactggttgttcttgatgcagacaccatcaatcacccagcacaacttataaagacttccttagcaccaattattgttcatgtaaaagtctcatctccaaaggttttacagcggttgattaaatctagaggaaagtcacaaagtaaacacttgaatgttcaactggtggcagctgataaacttgcacaatgccccccagaaatgtttgatgttatattggatgaaaatcagcttgaggatgcatgtgaacatctaggggagtacctggaggcgtactggcgtgccacccacacaaccagtagcacacccatgaccccgctgctgggaaggaatttgggctccacggcactctcaccatatcccacagcaatttctgggttacagagtcagcgaatgaggcacagcaaccactccacagagaactctccaattgaaagacgaagtctaatgacctctgatgaaaattatcacaatgaaagggctcggaagagtaggaaccgcttgtcttccagttctcagcatagccgagatcattaccctcttgtggaagaagattaccctgactcataccaggacacttacaaaccccataggaaccgaggatcacctgggggatatagccatgactcccgacataggctttgagtctaatgaaacaaaaaatattcatctgttgacaatttgccatagcagtgctaggataaaccaatcatcttaacttggctaacatagcacagtatttactgtgctaatgggctgctgtcattttatgctaagtaaggggcaaaaaaaaaaattacattatgcccttgagtctagatggatattagatgcccgatcatatagatatttttaagtgcaacatttacatgataacagtacattttgttttcttcatagatttagacacatcaatttgtaatttagggtacttacaaggcacatataaaataatttcccatgctggaaattccaaatgaccagttccagttggaaccaatttataaaccaattcctgttggaatttgggtgaattgactagaaagtctacttgagcatgttgtaatcaactgaaaaatctggggggaaaaaaaaaaaactaataagaaaatcgaaataccaatagaagccaaatccagctttggtatttatttgctggaagctaaatttacacttaaagttggagtgtataaacattttaatatatgttaatgttgccagaatgacttttcagacttaccaaatgtattgatagtgccaaaaaaaaaatctcagaaatcttaatgcagaaattatatagtctcctcagattttaatatttttatttctttcctggcacagctgttgtattcaaagtgttttgctttttgtttggtcagtactgttagctcatttgaagttggcaaaaacaaatacaaacaagcaaaaaacctcaaatttttttcagcagtgagagagaatagtaaagagaggcccaagcatagctggttatgtgaaatataaaatggggtgttgttctccctttaatcaatctgagcacaactacatacatccaggaatctgaagtcagatagtaaggatgtggtaccaatcctcccgagtgcaatgctaaacacttccaggtgggaattcatctatttcacttaacacaaacgcagggtctgtatttcctgccaacaagattgagtatctttccattgcttctctcagtctctgtctttgaatatctgaatgttctggcccttcaacaaattctttaaatcatgctaaggaatttcgttttatgtggacacactcaactttgatattcaggagatgtttttacaaaatgactaattgaaaaaagttgaaacaaatgattttaaaagcttgcagtaaaaaataaactcatagattcagcaaatatttgttgactaaaattatagcatttttaatgcagaaaattataaagaatttggagattgagctgccttatttctaatgaacactcctcttcatcttattaagtcttcacagtttttccagtggctataattatggaattggtgacctatgttttatattatcaaggaagccttagattcactctgatctaagaaattattgaaattgaccctttttacacaaatgtcttt

SEQ ID NO: 8530 - protein, 520 aa, Homo sapiens; identical to SEQ ID NO: 638

SEQ ID NO: 8531 - DNA, 2032 bp, Homo sapiens
ctgtattgggaaggcagataaaatgccaggtctggactgcctctggggataacctcaccctgtgggatgtgaatgaatagcatcttgcctggtaaatccacaggaattgataaggcaggcgcagttctcccaaacaggccttttctctttaagctgtagctgtggtttctgcagcaattttgtttttgccttgaaagaggtgctctggattatcacacctccatgtatgacaatttgtacctgcatggaattgaagactcggaggctggttcagcggattcctacacaagcaggccgtctgactccgatgtctctttggaagaggaccgggaagcaattcgacaggagagagaacagcaagcagctatccagcttgagagagcaaagtccaaacctgtagcatttgccgtgaagacaaatgtgagctactgcggcgccctggacgaggatgtgcctgttccaagcacagctatctcctttgatgctaaagactttctacatattaaagagaaatataacaatgattggtggataggaaggctggtgaaagagggctgtgaaattggcttcattccaagtccactcagattggagaacatacggatccagcaagaacaaaaaagaggacgttttcacggagggaaatcaagtggaaattcttcttcaagtcttggagaaatggtatctgggacattccgagcaactcccacatcaacagcaaaacagaagcaaaaagtgacggagcacattcctccttacgatgttgtaccgtcaatgcgtccggtggtgttagtggggccgtcactgaaaggttacgaggtaacagacatgatgcagaaagccctctttgatttcctgaagcacaggtttgatgggaggatttcaataacgagagtgacagctgacatttctcttgctaagaggtctgtcctaaataatcccagcaagagagcaataattgaacgttcgaacacccggtccagcttagcggaagtacaaagtgaaattgaaagaatctttgagttggcaagatctttgcaactggttgttcttgatgcagacaccatcaatcacccagcacaacttataaagacttccttagcaccaattattgttcatgtaaaagtctcatctccaaaggttttacagcggttgattaaatctagaggaaagtcacaaagtaaacacttgaatgttcaactggtggcagctgataaacttgcacaatgccccccagaaatgtttgatgttatattggatgaaaatcagcttgaggatgcatgtgaacatctaggggagtacctggaggcgtactggcgtgccacccacacaaccagtagcacacccatgaccccgctgctgggaaggaatttgggctccacggcactctcaccatatcccacagcaatttctgggttacagagtcagcgaatgaggcacagcaaccactccacagagaactctccaattgaaagacgaagtctaatgacctctgatgaaaattatcacaatgaaagggctcggaagagtaggaaccgcttgtcttccagttctcagcatagccgagatcattaccctcttgtggaagaagattaccctgactcataccaggacacttacaaaccccataggaaccgaggatcacctgggggatatagccatgactcccgacataggctttgagtctaatgaaacaaaaaatattcatctgttgacaatttgccatagcagtgctaggataaaccaatcatcttaacttggctaacatagcacagtatttactgtgctaatgggctgctgtcattttatgctaagtaaggggcaaaaaaaaaaattacattatgcccttgagtctagatggatattagatgcccgatcatatagatatttttaagtgcaacatttacatgataacagtacattttgttttcttcatagatttagacacatcaatttgtaatttagggtacttacaaggcacatataaaataatttcccatgctggaaattccaaatgaccagttccagttgg

SEQ ID NO: 8532 - protein, 486 aa, Homo sapiens; identical to SEQ ID NO: 642

SEQ ID NO: 8533 - DNA, 5335 bp, Homo sapiens
cacctccatgtatgacaatttgtacctgcatggaattgaagactcggaggctggttcagcggattcctacacaagcaggccgtctgactccgatgtctctttggaagaggaccgggaagcaattcgacaggagagagaacagcaagcagctatccagcttgagagagcaaagtccaaacctgtagcatttgccgtgaagacaaatgtgagctactgcggcgccctggacgaggatgtgcctgttccaagcacagctatctcctttgatgctaaagactttctacatattaaagagaaatataacaatgattggtggataggaaggctggtgaaagagggctgtgaaattggcttcattccaagtccactcagattggagaacatacggatccagcaagaacaaaaaagaggacgttttcacggagggaaatcaagtggaaattcttcttcaagtcttggagaaatggtatctgggacattccgagcaactcccacatcaacagcaaaacagaagcaaaaagtgacggagcacattcctccttacgatgttgtaccgtcaatgcgtccggtggtgttagtggggccgtcactgaaaggttacgaggtacaaatatcatctgttactcttcagttcttgatcgagcacccaggagacagtcatgttgacgcttgctcctcaagggtctgtttccacgtgggtcctgatggaagccagtgctcagcatgggaaggcagggggtaccgtgtggggctcatgaggccctctgccctttctttcctctcttgcacacttctcatcttttatgtattacattgtttagaaatacctccctcaaaatattcacaatgggaagatctggtcaaagatttgctgtacattaaatgcaaagaaaaggactttatctgtcttgaccattctcattattattagaagtaatagagaatgaacagcacaagaggacaaacaatcaatcttccagcaaacccaaacctttaaagcccaaacagagttcaccctgctgggtttttaagatgatggcatatgccaccaaatccttctctgcttatttattttaaagggcacatgttttaaaagaccactaaaaacattagtgaactttggagattaaacaaaaccatgtgacaaggaaaagagtagagacttcgtttcagatgtttgttttgactttgtgctagcttggattaaaaaataggtagaacgtgacattaaactctgaaggtgagcagcctccagggcaccattcccatcgagctaggacaatgtgtggcacatagtaggcactcagtacacatttgctgaatgaattaatgaatcgctttcaggcagatctaagaatcctggctctatccccctctctttctctcttgtctttctcagagttggaaatgtcagagggatgagcaggagagtggtctacaaaaatccagccatgggcatggagaatttccgccaacatacacaaactagcaggaaggctgagtccagtgctggcctcagttctctagctgctcctcactggaggcaggcacaactcaggcgtgccaaggatacccggcacctgtgtacaaagccagcctgttgtctcctggcagcagttctatcccctaacgagggaagagggaagagggaagagggtctggtgaacactgctggtttattcctcaacaccctggaggagaaccaaggggggtggaaattagcaattgcacatggttaagcatgaaaaacaccttccatggtaacctccccctaggagacgaatggctacaataaggtcttggctcatagtacccttccctccctcctctctcccttttgacttctctctctctctctgcatgtgtttgcctcattctttttttctcacctctgcaaaggtaacagacatgatgcagaaagccctctttgatttcctgaagcacaggtttgatgggaggtgagaaatatagatgtttttgtatttttattttcctttaaccaaacttgtgtgataaattgaattgtagatctatgtttccagagatttcagaagttctctagttaaaagttaactcagtattcttgggaagaatataataaaagaactctgaaaatatgaagtataacattgagtccccagtgaagaaaggaccatgagaagaaaaataagccatttgttttatttaaatgtatatatctttattttctcagttattaataatttcataccaaaatgttttttatgaaaaaatattaattaaaatatataatatttctcatgagtatagtggcttgctggtcaaactaggcagtatttgggaattgtgtatgtgtgtgtgtgtgtgtgtgtgtgtgtgtgtgtcatatgaaagcataaatgtcaagtactgaatttcctcaaaagaagagagtgagaattattttaatcataagcctcccaaagtgatcattttgtagggaatagtacttatttggatatttattatagttgtgggttgtttttattagaaatgtccttgttattttattgatctttttttaatgtattttactatgatccatcaacaatatggctcaggcattagccattaaataattttatcatttaagttttgtgaaaaattctaaagaaagtttctctgttttgcagagaaatggtaaaaagcctgtattgactcaattctaaatattaagctctttcacagtgctgaatgcagtccatgtaaaaataaccacatgaaaaaacctgagatttatcagaaatgtaggaaatttaaatggggtgcatcaaaaagtatgggcaaatgcatccagtttattactgtaggattgaagaaaaacatcacattctttatttttgaaggcagtaattaagccattcactttctctttgctaaattatgagaatccactaaatgcacaaaataattttaaaatgtaaaaaaacttcagatagattttaataaattggtatattaagaataaaaacaagcatggtattgctttaaatataaattgtatgcatttgttaaaataaaagctttctggataattgggtaaaatattcattagtttctggaacaatatagaaagttagtaaacagattttagtttaagaaataagaatgcttctaggtacattagtatataggtcaggctgccttaataaatagaccccaaaatgtgtagtgattcaaacacaatggaagcttattattgctcacttaacagtctgaagcaggtgttccttggctgggagggaggatagagttgggggaggggagaattgggcagaaagtttgttccctctgtcatttggggcccttagcccaggtacgatgtctctagtcagcttgcccggcctggaggtagcgcaactgacatttcactggttagaacttggttatgtggtcatacttaattgcagcggaggcactcttgcagtccaggaggaagaggagatagaatttgttgaatcaataatagccttcgtcacattcatctactggacaaaggcttaataagaaagatgtatttgttccatttcactctctttaaaaaagaaataggcagataatgaagtagcttcaaagaaaataagttaaaagccctgaatcctagagcattggagttggaaggatacataaaatgtcttttagactcatcatttctccaataaccacaatcagatagacaacctgcttctgtttgaaacttttggttattgggattacactttctaaaaaagcattgcaaaaaaatagctgaactctgactttgtaacttaatagggctggtcttggtcttgctgtctgatgctctggccttaaccctaaccctcatgcaggtccctgtggattgaaggcagccagcatgccttggtcgcacgtgcatagttccttcagatatgtatggagtcacatggtttcaacctgtggagctgttacctaaggcagttctgagcagtgccgaatccactggccccataacagccctatctgaacaaatcccatcccataagacagtgttagattattttggtctataacatacttatacgcaacagtgctgttaaaggtttgccctcaagaatgaagaatctgatgttcttcctcaatcctgaggcccagaaaaagggaatttatttaattgtaacagcagagatttgtctcgaatcaagtagaattgtcgcatccattactgtacacatactactgaagttggttttaatagaaattgaatgcaaatttcaatctcaagtattcatggggtctgatgacatggcagagggtctggaggaagagcccagcagtagcaaaagtaatagctgaagagagagacttagccctggagaaatctgatatatttctccagcaggagaaagataggtagatattaaaggggtgaggggtgagagaatggacttgatttcaaatattaagaggccaggcagcagaatgaacaataaggagttccttggttgagtgtatgtggagactttgataagaaagaaattcgctggtagcgtcacactgactctgacatgtcttcttcgtggggaatatcgttaggttttgagctataacatcatgctgcattatgttttaccaattgatacaaggagagaaaaaaacaaatagtctttaattgaaaccagccaagagaacaatgacaaggaaggctttagcacagtgacacggcataaacaatatgttctaatggaaacctactctgtgtttcatgggctatgaatgcagtacgttagacaaaataggagaaagtcctattatttttcagaaagtacaaagaagggatctgttggctacgaggctttcttctttaatctgcttttcagatcttagtagaaaataattcaacaaattggatgaaagtccaacagtttgactattgcagaatcataaacttgggatttttttgataccttagaaattatttgagtcagtttagagctacttattatacaattttattgctgtagctgctattgtggggcctaactgtaatacatgtaagaaaaacagaatactaggctgggcgcagtggctcatgcctataatcccagcactttgggaggcccaggtgggcagatcacctgaggtcgggagttcgagaccagcctgaccaacatggagaaacctcatctctaataaaaatacaaaattagccaggcgtggtggcgcgtgcctgtaattccagccactcgggaggctgaggcaggaaaatcacttgaacctgggaggcagaggttgcggtgagccaagatcatgccattgcactccagcctgggcaataggagcaaaactctgtctcaat

SEQ ID NO: 8534 - protein, 307 aa, Homo sapiens
MYDNLYLHGIEDSEAGSADSYTSRPSDSDVSLEEDREAIRQEREQQAAIQLERAKSKPVAFAVKTNVSYCGALDEDVPVPSTAISFDAKDFLHIKEKYNNDWWIGRLVKEGCEIGFIPSPLRLENIRIQQEQKRGRFHGGKSSGNSSSSLGEMVSGTFRATPTSTAKQKQKVTEHIPPYDVVPSMRPVVLVGPSLKGYEVQISSVTLQFLIEHPGDSHVDACSSRVCFHVGPDGSQCSAWEGRGYRVGLMRPSALSFLSCTLLIFYVLHCLEIPPSKYSQWEDLVKDLLYIKCKEKDFICLDHSHYY

SEQ ID NO: 8535 - DNA, 4168 bp, Homo sapiens
agcggaggctttgctgtggcagctgctggagcggcggccgcctcgggagccggaggagaggcagccgcggagcgccgagctggcctcgccccgaggcccggccctgggtgtggggaaccgcgctgaggagctggaaactttcccggcaggagctgactgctgggcaggaacgtctctcaggagaaagagtggaagagaaaattgtgaactaaggccccctgcccccttttcctggtgcatgtgaagttatcaaaaacagaaacaagtgttgaaaatgttaaaggctgtgctgaagaagagccgagagggaggaaagggaggcaagaaggaagcaggaagtgactttggtccagagacttctccagtcctgcaccttgaccacagtgctgactctcctgtgagcagtcttcccacagcagaggacacctatagggtgagcttggccaaaggtgtctcgatgtctctgccttcctcacctttgctgcctcgacagtctcacttggtgcaatcaagagtgaacaaaaaatccccaggtcccgtcaggaagcccaagtatgtggaaagccccagagtgcctggagatgcagttataatgccattcagagaagtagccaagccaacagagcctgatgagcatgccacaattacaagttcatccgaaaatgatgaccggagtggctccagtttggaatggaataaagatggaaacctaagattaggggttcagaagggagtgcttcatgaccgcagggcagataactgctccccagtggcagaagaggagaccaccgggtcagcagagagcacgctgcccaaagcagaatcctcagctggagatggtccagtcccttattctcagggctccagctcactaataatgccacggcccaactcagttgcagcaacaagctcaaccaaattggaagatctgagttatttagacgggcagagaaatgctcctctacggacgtcaattagattaccatggcacaatacggccggaggtagggcacaggaagttaaagcacgatttgctccctacaagccacaagacattttgttgaaacccttgttgtttgaagtaccaagcataacaacagactctgtgtttgtgggaagggattggctctttcaccagatagaagaaaacttgaggaacacagaactggcagaaaacagaggcgcggtggtggttggcaatgtgggatttgggaagacggcaatcatttccaagttggtggccctgagctgccacggaagccgcatgaggcagattgcttccaacagcccgggttcatcacctaaaacctctgaccccactcaggatcttcatttcactccgttgctttcaccgagttcttccacaagtgcttccagcacagctaaaacacctcttgggtctatcagtgctgaaaaccagagaccaagagaggatgcagtgaaatatcttgcttctaaggtggtggcctaccactactgccaggctgacaacacgtacacttgcctggtgcccgagtttgtgcacagcatcgcagctttgctctgccggtcccatcagctggccgcctacagagaccttctgataaaggagccccaactacagagcatgctgagcctccgatcctgtgtgcaggacccggtggcagctttcaagaggggagtgctggagccactcacaaacctgagaaatgagcagaaaattcctgaagaagaatacattattttgatagatggcttaaatgaagctgagtttcataaacctgattatggagatacgctttcttcatttattaccaaaattatttctaaatttcctgcctggttgaagttgattgtgactgtaagagcaaattttcaggaaatcataagtgcgctgccatttgtcaagctttccttagatgacttcccagacaacaaagacatccacagtgacctgcacgcctacccagcagcataaagatgtcaagttcaaccagtagtttgacttcgagcagcagtttttcagatggcttcaaggtccaaggaccagatactagaattaaagacaaggttgtaacccacgttcagagcggtacagctgagcacagaccccgcaacacgccgttcatgggcatcatggataagactgcgaggttccaacagcagagcaatcctccaagccgcagctggcactgtccggcaccagaggggctgctgacaaacacgtcttctgcagctggcctgcagtctgctaacactgagaagccctctctcatgcaagtgggaggatataataaccaagccaaaacctgttctgtttctaccctgagtgcaagtgtccacaatggggcacaagtgaaggagctagaagaaagcaagtgccaaattccagtccactctcaagagaacaggataactaagactgtttctcatctgtaccaggaaagtatctccaaacagcagcctcatattagtaatgaagcccacaggagccacctcactgcagccaaaccaaagcgatcatttatagagtcaaatgtgtgaaccttaagaaatccccatttgtggaatttggaaacgtgtgttgactcctggtggtaaattaaatagtttttttcatcagaaaaattattttttagccattttttttctttggggtggatctgatgccattgatatatctaaaatgtgggataaaacttctttaatagctagaaatcaccataaataagaatgctaaacagaattgaaaattatatcaacttaaaattttaagacagcccagaagacattaatgactctcacttatgaaattgtttggcttttgccactttcttccttgcctttgctatatggtagaatcacagaacttacttagagaataaatatgtctattgttcaagagtaacaggtttaactcatgaccaagtgatgtacatccaagtgatgtattctggaaacgatggaattttacagttacagttccattgagtcaaatcccattttatatatacataaaaattaagttctgagtgagttctagctaaatataagtgcgactgtaaacgcagccaatttttttaagcagaatatgagaacacctaagtattctcttcatagcagttcctataaagggattaaacacttatttctgtgttatggttcttattcatatatttttatagcacttttggaacctatatttgtgcttgaaggtgtttttgatatttggaaacagtataagccatttggagtcatgattggtggtcaagtggattcaagctaaaatactaagaccagcattcttagtggcgcttataaattagctctcacctggtttccaaactgcttttaacaatggtagtgctcctggaacaatccttccaagctcctctaaggacaatatttaattcagatactaaaggtaagactggttgttacttttgttttgttgtacaattagtactttatagtcacatgttgtatatattaaatagcccagttttattcagacttgtaaatagaactatttcaatgtagttaatctaaaaacaaaaaagaaaaccccagtcacgatttgcatgttctctgtaagcttcatccatgctggttattgcactgaatgatatattattagggcatgttaacagtataccagtaacagcactttatctcatttatatgaacacctttgaggtgctacttaagtccaagctctgatgtattattcatttgtaaagataaggtacaggaatgaaccttggtttaaaggtatttttatatgaaaatggtgtgttattggaagatgttaaaatgctaatttgagagaagtaggagtgtatctgttttatatgttgggatgtgaaatttattttctaaaattgaggagaaggaagttatatatttgcagaatgttttaaagtgaattgttgtaatgaagttcctgtgaacatcattatggttttgtacaaataggaacctctgatgtcattcttcaacgtttgttcctgtgtgtacaattgtactttgtatgaacagctttatcatttttataggctttccatgagttttgctgtaactactatggcttatttattttctttaatatttgtgaaagtcttactcctttgttagttttgtttctgcacaactactgtacttttccatatggaataaagactattaatag

SEQ ID NO: 8536 - protein, 560 aa, Homo sapiens
MLKAVLKKSREGGKGGKKEAGSDFGPETSPVLHLDHSADSPVSSLPTAEDTYRVSLAKGVSMSLPSSPLLPRQSHLVQSRVNKKSPGPVRKPKYVESPRVPGDAVIMPFREVAKPTEPDEHATITSSSENDDRSGSSLEWNKDGNLRLGVQKGVLHDRRADNCSPVAEEETTGSAESTLPKAESSAGDGPVPYSQGSSSLIMPRPNSVAATSSTKLEDLSYLDGQRNAPLRTSIRLPWHNTAGGRAQEVKARFAPYKPQDILLKPLLFEVPSITTDSVFVGRDWLFHQIEENLRNTELAENRGAVVVGNVGFGKTAIISKLVALSCHGSRMRQIASNSPGSSPKTSDPTQDLHFTPLLSPSSSTSASSTAKTPLGSISAENQRPREDAVKYLASKVVAYHYCQADNTYTCLVPEFVHSIAALLCRSHQLAAYRDLLIKEPQLQSMLSLRSCVQDPVAAFKRGVLEPLTNLRNEQKIPEEEYIILIDGLNEAEFHKPDYGDTLSSFITKIISKFPAWLKLIVTVRANFQEIISALPFVKLSLDDFPDNKDIHSDLHAYPAA

SEQ ID NO: 8537 - DNA, 5382 bp, Homo sapiens
gctgtggcagctgctggagcggcggccgcctcgggagccggaggagaggcagccgcggagcgccgagctggcctcgccccgaggcccggccctgggtgtggggaaccgcgctgaggagctggaaactttcccggcaggagctgactgctgggcaggaacgtctctcaggagaaagagtggaagagaaaattgtgaactaaggccccctgcccccttttcctggtgcatgtgaagttatcaaaaacagaaacaagtgttgaaaatgttaaaggctgtgctgaagaagagccgagagggaggaaagggaggcaagaaggaagcaggaagtgactttggtccagagacttctccagtcctgcaccttgaccacagtgctgactctcctgtgagcagtcttcccacagcagaggacacctatagggtgagcttggccaaaggtgtctcgatgtctctgccttcctcacctttgctgcctcgacagtctcacttggtgcaatcaagagtgaacaaaaaatccccaggtcccgtcaggaagcccaagtatgtggaaagccccagagtgcctggagatgcagttataatgccattcagagaagtagccaagccaacagagcctgatgagcatgaagcaaaggccgataatgaaccgagctgttcgccggcagctcaagaactgttgacaaggctgggatttttactgggagaagggatcccaagtgccacacacataaccattgaagacaaaaatgaaaccatgtgcacagctctgagtcaaggcatcagtccttgctccacactaacaagcagcaccgcatctcctagcaccgatagcccctgctcaaccttgaatagctgtgtcagcaagacggcagccaacaaaagtccctgtgagaccattagcagccctagttccaccctggaaagcaaggacagtggaattatagccacaattacaagttcatccgaaaatgatgaccggagtggctccagtttggaatggaataaagatggagaaggaacatgaagtagaagtcaatggcaccgacacattgtggggagaaacagccctgactgccgccgcaggaagagggaagctggaggtctgtgagctgctgctggggcatggagctgctgtgtcgcggacaaacaggagaggggttccacctttgttttgtgcagcacgccaggggcattggcagattgttagactgctgttggaacgcggctgtgatgtgaacctaagtgacaagcaaggccggacgcccctcatggtggctgcttgtgaagggcacttgagcaccgtggaattcctcctttcaaaaggtagcagcgtgatgccctcaaaggtttcttttggacggacacagagagaacttcagcagacccattcagtgctttctgattcaaattctaagttttctgttaatggaaattttctaataaacagtagagagaataggcaacacagccacatgcctggtattcctcttcagcagcgatgaccattctgccagcccatccggccagtgtcacccttcacagtgcttgactgacacttggttcaggccgggtgttccgcaggtgtgaaacaatttgctttctggctttgtcatctcataatgttcatgttctgtgaatgggctttcctttcaggtgcagccctttcttctctagacaaagagggtctgtcagcattaagctgggcttgtctgaaaggtcacagggcagtggtccagtatctggttgaagaaggagctgcaatagaccagacagacaagaatggccgcacacccttggacctggctgccttctatggcgatgccgagactgtgctgtacctggtggagaagggagccgtgatcgagcatgtggaccacagcgggatgcggcccttggacagagccatcggctgccggaacacatctgtagtggtggcgctactcagaaagggagccaagttaggaaatgctgcttgggcgatggccacttccaaacctgatatcttgattatacttttacagaaattaatggaggaaggaaatgtgatgtacaaaaaagggaaaatgaaagaggcagcccagaggtaccagtatgccttaagaaagtttcctcgagaaggattcggagaggacatgagacccttcaatgaattaagggtttccctctatctcaatttgtcgcgatgccgaagaaaaacaaatgactttggcatggcagaggaatttgcttccaaggctctcgaattgaagcccaagtcctatgaagccttttatgccagagcaagagcgaagagaaatagcaggcaattcgtggcagctctggctgacctgcaagaggctgtgaaactctgtcccaccaatcaggaagtcaagaggcttctggcccgcgtagaagaggagtgcaaacaactccagaggagtcaacagcaaaaacagcagggcccgctaccagctccactcaacgactccgagaacgaagaggacaccccaacccctggcttaagtgaccactttcactctgaggagactgaagaggaagaaacttctccccaggaagaatctgtttccccaactcccaggtcccagccatcctcatctgtcccttcctcatacatccgaaaccttcaagaagggttacagtccaaaggaaggccggtatcgccacagagcagggcaggaatcggcaagtccctgagagagcctgtggcccagccagggctgctcctgcagccctccaagcaggcccagatcgtgaaaaccagccagcacctgggctctggccagtcggcagtgagaaatggcagtatgaaagttcagatctcttctcagaaccctcctccaagtcccatgccagggagaatcgctgccactcctgctgggagcagaacccagcatttagagggaacaggtactttcactacaagagctggttgtggccactttggggatcggctgggccccagccagaatgtccgcctgcagtgtggtgagaatggccctgcacaccctttaccaagtaagacgaaaaccacagagaggcttctgtctcattcctccgtggctgtggacgcagcccctccaaaccaaggtgggctggcgacctgcagcgacgtgcgacacccagcttccctcaccagctcaggctcttctggttctccatccagcagcataaagatgtcaagttcaaccagtagtttgacttcgagcagcagtttttcagatggcttcaaggtccaaggaccagatactagaattaaagacaaggttgtaacccacgttcagagcggtacagctgagcacagaccccgcaacacgccgttcatgggcatcatggataagactgcgaggttccaacagcagagcaatcctccaagccgcagctggcactgtccggcaccagaggggctgctgacaaacacgtcttctgcagctggcctgcagtctgctaacactgagaagccctctctcatgcaagtgggaggatataataaccaagccaaaacctgttctgtttctaccctgagtgcaagtgtccacaatggggcacaagtgaaggagctagaagaaagcaagtgccaaattccagtccactctcaagagaacaggataactaagactgtttctcatctgtaccaggaaagtatctccaaacagcagcctcatattagtaatgaagcccacaggagccacctcactgcagccaaaccaaagcgatcatttatagagtcaaatgtgtgaaccttaagaaatccccatttgtggaatttggaaacgtgtgttgactcctggtggtaaattaaatagtttttttcatcagaaaaattattttttagccattttttttctttggggtggatctgatgccattgatatatctaaaatgtgggataaaacttctttaatagctagaaatcaccataaataagaatgctaaacagaattgaaaattatatcaacttaaaattttaagacagcccagaagacattaatgactctcacttatgaaattgtttggcttttgccactttcttccttgcctttgctatatggtagaatcacagaacttacttagagaataaatatgtctattgttcaagagtaacaggtttaactcatgaccaagtgatgtacatccaagtgatgtattctggaaacgatggaattttacagttacagttccattgagtcaaatcccattttatatatacataaaaattaagttctgagtgagttctagctaaatataagtgcgactgtaaacgcagccaatttttttaagcagaatatgagaacacctaagtattctcttcatagcagttcctataaagggattaaacacttatttctgtgttatggttcttattcatatatttttatagcacttttggaacctatatttgtgcttgaaggtgtttttgatatttggaaacagtataagccatttggagtcatgattggtggtcaagtggattcaagctaaaatactaagaccagcattcttagtggcgcttataaattagctctcacctggtttccaaactgcttttaacaatggtagtgctcctggaacaatccttccaagctcctctaaggacaatatttaattcagatactaaaggtaagactggttgttacttttgttttgttgtacaattagtactttatagtcacatgttgtatatattaaatagcccagttttattcagacttgtaaatagaactatttcaatgtagttaatctaaaaacaaaaaagaaaaccccagtcacgatttgcatgttctctgtaagcttcatccatgctggttattgcactgaatgatatattattagggcatgttaacagtataccagtaacagcactttatctcatttatatgaacacctttgaggtgctacttaagtccaagctctgatgtattattcatttgtaaagataaggtacaggaatgaaccttggtttaaaggtatttttatatgaaaatggtgtgttattggaagatgttaaaatgctaatttgagagaagtaggagtgtatctgttttatatgttgggatgtgaaatttattttctaaaattgaggagaaggaagttatatatttgcagaatgttttaaagtgaattgttgtaatgaagttcctgtgaacatcattatggttttgtacaaataggaacctctgatgtcattcttcaacgtttgttcctgtgtgtacaattgtactttgtatgaacagctttatcatttttataggctttccatgagttttgctgtaactactatggcttatttattttctttaatatttgtgaaagtcttactcctttgttagttttgtttctgcacaactactgtacttttccatatggaataaagactattaatag

SEQ ID NO: 8538 - protein, 705 aa, Homo sapiens
MFMFCEWAFLSGAALSSLDKEGLSALSWACLKGHRAVVQYLVEEGAAIDQTDKNGRTPLDLAAFYGDAETVLYLVEKGAVIEHVDHSGMRPLDRAIGCRNTSVVVALLRKGAKLGNAAWAMATSKPDILIILLQKLMEEGNVMYKKGKMKEAAQRYQYALRKFPREGFGEDMRPFNELRVSLYLNLSRCRRKTNDFGMAEEFASKALELKPKSYEAFYARARAKRNSRQFVAALADLQEAVKLCPTNQEVKRLLARVEEECKQLQRSQQQKQQGPLPAPLNDSENEEDTPTPGLSDHFHSEETEEEETSPQEESVSPTPRSQPSSSVPSSYIRNLQEGLQSKGRPVSPQSRAGIGKSLREPVAQPGLLLQPSKQAQIVKTSQHLGSGQSAVRNGSMKVQISSQNPPPSPMPGRIAATPAGSRTQHLEGTGTFTTRAGCGHFGDRLGPSQNVRLQCGENGPAHPLPSKTKTTERLLSHSSVAVDAAPPNQGGLATCSDVRHPASLTSSGSSGSPSSSIKMSSSTSSLTSSSSFSDGFKVQGPDTRIKDKVVTHVQSGTAEHRPRNTPFMGIMDKTARFQQQSNPPSRSWHCPAPEGLLTNTSSAAGLQSANTEKPSLMQVGGYNNQAKTCSVSTLSASVHNGAQVKELEESKCQIPVHSQENRITKTVSHLYQESISKQQPHISNEAHRSHLTAAKPKRSFIESNV

SEQ ID NO: 8539 - DNA, 5575 bp, Homo sapiens
gctgtggcagctgctggagcggcggccgcctcgggagccggaggagaggcagccgcggagcgccgagctggcctcgccccgaggcccggccctgggtgtggggaaccgcgctgaggagctggaaactttcccggcaggagctgactgctgggcaggaacgtctctcaggagaaagagtggaagagaaaattgtgaactaaggccccctgcccccttttcctggtgcatgtgaagttatcaaaaacagaaacaagtgttgaaaatgttaaaggctgtgctgaagaagagccgagagggaggaaagggaggcaagaaggaagcaggaagtgactttggtccagagacttctccagtcctgcaccttgaccacagtgctgactctcctgtgagcagtcttcccacagcagaggacacctatagggtgagcttggccaaaggtgtctcgatgtctctgccttcctcacctttgctgcctcgacagtctcacttggtgcaatcaagagtgaacaaaaaatccccaggtcccgtcaggaagcccaagtatgtggaaagccccagagtgcctggagatgcagttataatgccattcagagaagtagccaagccaacagagcctgatgagcatgaagcaaaggccgataatgaaccgagctgttcgccggcagctcaagaactgttgacaaggctgggatttttactgggagaagggatcccaagtgccacacacataaccattgaagacaaaaatgaaaccatgtgcacagctctgagtcaaggcatcagtccttgctccacactaacaagcagcaccgcatctcctagcaccgatagcccctgctcaaccttgaatagctgtgtcagcaagacggcagccaacaaaagtccctgtgagaccattagcagccctagttccaccctggaaagcaaggacagtggaattatagccacaattacaagttcatccgaaaatgatgaccggagtggctccagtttggaatggaataaagatggagaaggaacatgaagtagaagtcaatggcaccgacacattgtggggagaaacagccctgactgccgccgcaggaagagggaagctggaggtctgtgagctgctgctggggcatggagctgctgtgtcgcggacaaacaggagaggggttccacctttgttttgtgcagcacgccaggggcattggcagattgttagactgctgttggaacgcggctgtgatgtgaacctaagtgacaagcaaggccggacgcccctcatggtggctgcttgtgaagggcacttgagcaccgtggaattcctcctttcaaaaggtagcagcgtgatgccctcaaaggtttcttttggacggacacagagagaacttcagcagacccattcagtgctttctgattcaaattctaagttttctgttaatggaaattttctaataaacagtagagagaataggcaacacagccacatgcctggtattcctcttcagcagcgatgaccattctgccagcccatccggccagtgtcacccttcacagtgcttgactgacacttggttcaggccgggtgttccgcaggtgtgaaacaatttgctttctggctttgtcatctcataatgttcatgttctgtgaatgggctttcctttcaggtgcagccctttcttctctagacaaagagggtctgtcagcattaagctgggcttgtctgaaaggtcacagggcagtggtccagtatctggttgaagaaggagctgcaatagaccagacagacaagaatggccgcacacccttggacctggctgccttctatggcgatgccgagactgtgctgtacctggtggagaagggagccgtgatcgagcatgtggaccacagcgggatgcggcccttggacagagccatcggctgccggaacacatctgtagtggtggcgctactcagaaagggagccaagttaggaaatgctgcttgggcgatggccacttccaaacctgatatcttgattatacttttacagaaattaatggaggaaggaaatgtgatgtacaaaaaagggaaaatgaaagaggcagcccagaggtaccagtatgccttaagaaagtttcctcgagaaggattcggagaggacatgagacccttcaatgaattaagggtttccctctatctcaatttgtcgcgatgccgaagaaaaacaaatgactttggcatggcagaggaatttgcttccaaggctctcgaattgaagcccaagtcctatgaagccttttatgccagagcaagagcgaagagaaatagcaggcaattcgtggcagctctggctgacctgcaagaggctgtgaaactctgtcccaccaatcaggaagtcaagaggcttctggcccgcgtagaagaggagtgcaaacaactccagaggagtcaacagcaaaaacagcagggcccgctaccagctccactcaacgactccgagaacgaagaggacaccccaacccctggcttaagtgaccactttcactctgaggagactgaagaggaagaaacttctccccaggaagaatctgtttccccaactcccaggtcccagccatcctcatctgtcccttcctcatacatccgaaaccttcaagaagggttacagtccaaaggaaggccggtatcgccacagagcagggcaggaatcggcaagtccctgagagagcctgtggcccagccagggctgctcctgcagccctccaagcaggcccagatcgtgaaaaccagccagcacctgggctctggccagtcggcagtgagaaatggcagtatgaaagttcagatctcttctcagaaccctcctccaagtcccatgccagggagaatcgctgccactcctgctgggagcagaacccagcatttagagggaacaggtactttcactacaagagctggttgtggccactttggggatcggctgggccccagccagaatgtccgcctgcagtgtggtgagaatggccctgcacaccctttaccaagtaagacgaaaaccacagagaggcttctgtctcattcctccgtggctgtggacgcagcccctccaaaccaaggtgggctggcgacctgcagcgacgtgcgacacccagcttccctcaccagctcaggctcttctggttctccatccagcagcataaagatgtcaagttcaaccagtagtttgacttcgagcagcagtttttcagatggcttcaaggtccaaggaccagatactagaattaaagacaaggttgtaacccacgttcagagcggtacagctgagcacagaccccgcaacacgccgttcatgggcatcatggataagactgcgaggttccaacagcagagcaatcctccaagccgcagctggcactgtccggcaccagaggggctgctgacaaacacgtcttctgcagctggcctgcagtctgctaacactgagaagccctctctcatgcaagtgggaggatataataaccaagccaaaacctgttctgtttctaccctgagtgcaagtgtccacaatggggcacaagtgaaggagctagaagaaagcaagtgccaaattccagtccactctcaagagaacaggataactaagactgtttctcatctgtaccaggaaagtatctccaaacagcagcctcatattagtaatgaagcccacaggagccacctcactgcagccaaaccaaagcgatcatttatagagtcaaatgtgtgaaccttaagaaatccccatttgtggaatttggaaacgtgtgttgactcctggtggtaaattaaatagtttttttcatcagaaaaattattttttagccattttttttctttggggtggatctgatgccattgatatatctaaaatgtgggataaaacttctttaatagctagaaatcaccataaataagaatgctaaacagaattgaaaattatatcaacttaaaattttaagacagcccagaagacattaatgactctcacttatgaaattgtttggcttttgccactttcttccttgcctttgctatatggtagaatcacagaacttacttagagaataaatatgtctattgttcaagagtaacaggtttaactcatgaccaagtgatgtacatccaagtgatgtattctggaaacgatggaattttacagttacagttccattgagtcaaatcccattttatatatacataaaaattaagttctgagtgagttctagctaaatataagtgcgactgtaaacgcagccaatttttttaagcagaatatgagaacacctaagtattctcttcatagcagttcctataaagggattaaacacttatttctgtgttatggttcttattcatatatttttatagcacttttggaacctatatttgtgcttgaaggtgtttttgatatttggaaacagtataagccatttggagtcatgattggtggtcaagtggattcaagctaaaatactaagaccagcattcttagtggcgcttataaattagctctcacctggtttccaaactgcttttaacaatggtagtgctcctggaacaatccttccaagctcctctaaggacaatatttaattcagatactaaaggtaagactggttgttacttttgttttgttgtacaattagtactttatagtcacatgttgtatatattaaatagcccagttttattcagacttgtaaatagaactatttcaatgtagttaatctaaaaacaaaaaagaaaaccccagtcacgatttgcatgttctctgtaagcttcatccatgctggttattgcactgaatgatatattattagggcatgttaacagtataccagtaacagcactttatctcatttatatgaacacctttgaggtgctacttaagtccaagctctgatgtattattcatttgtaaagataaggtacaggaatgaaccttggtttaaaggtatttttatatgaaaatggtgtgttattggaagatgttaaaatgctaatttgagagaagtaggagtgtatctgttttatatgttgggatgtgaaatttattttctaaaattgaggagaaggaagttatatatttgcagaatgttttaaagtgaattgttgtaatgaagttcctgtgaacatcattatggttttgtacaaataggaacctctgatgtcattcttcaacgtttgttcctgtgtgtacaattgtactttgtatgaacagctttatcatttttataggctttccatgagttttgctgtaactactatggcttatttattttctttaatatttgtgaaagtcttactcctttgttagttttgtttctgcacaactactgtacttttccatatggaataaagactattaatagaatgtgttttgcactaaatgagtcaatggataagtagagaacagcctgatgacagctatctctgttgcttttaatctttgttaccctagagggaatagtgaaaagcatattttatattaacactacaaaatgcttatttaatttcgttttataatttcagaataagggtgacagctgctagaaattccacaat

SEQ ID NO: 8540 - protein, 705 aa, Homo sapiens; identical to SEQ ID NO: 8538

SEQ ID NO: 8541 - DNA, 7462 bp, Homo sapiens
gacagaaacagggaaaatacttgtaagtaggagtcatggaaggcaagaggataagtgagaagcaggtcatggatagatagaggcagaggattaatgtcaaaccaagggcctgtctcatttagcagactagattcacaagtgctatcttggacacttggtattaagtcaacttcgaggtcacatggtgataggtcacatgatagtgaactgacgaatgtcgtcagcaatactcagtgttctttagagtctgaggaggacgagaatggaggaaagacttctctatggagtgataatacttggtgatcactagggacctgcgctcctcccctggctttaaacaagagagaatgattggaatggaaaatgaaagcagtaaggtgcaggccaaattgggatggtttgaagcaaaggccgataatgaaccgagctgttcgccggcagctcaagaactgttgacaaggctgggatttttactgggagaagggatcccaagtgccacacacataaccattgaagacaaaaatgaaaccatgtgcacagctctgagtcaaggcatcagtccttgctccacactaacaagcagcaccgcatctcctagcaccgatagcccctgctcaaccttgaatagctgtgtcagcaagacggcagccaacaaaagtccctgtgagaccattagcagccctagttccaccctggaaagcaaggacagtggaattatagccacaattacaagttcatccgaaaatgatgaccggagtggctccagtttggaatggaataaagatggaaacctaagattaggggttcagaagggagtgcttcatgaccgcagggcagataactgctccccagtggcagaagaggagaccaccgggtcagcagagagcacgctgcccaaagcagaatcctcagctggagatggtccagtcccttattctcagggctccagctcactaataatgccacggcccaactcagttgcagcaacaagctcaaccaaattggaagatctgagttatttagacgggcagagaaatgctcctctacggacgtcaattagattaccatggcacaatacggccggaggtagggcacaggaagttaaagcacgatttgctccctacaagccacaagacattttgttgaaacccttgttgtttgaagtaccaagcataacaacagactctgtgtttgtgggaagggattggctctttcaccagatagaagaaaacttgaggaacacagaactggcagaaaacagaggcgcggtggtggttggcaatgtgggatttgggaagacggcaatcatttccaagttggtggccctgagctgccacggaagccgcatgaggcagattgcttccaacagcccgggttcatcacctaaaacctctgaccccactcaggatcttcatttcactccgttgctttcaccgagttcttccacaagtgcttccagcacagctaaaacacctcttgggtctatcagtgctgaaaaccagagaccaagagaggatgcagtgaaatatcttgcttctaaggtggtggcctaccactactgccaggctgacaacacgtacacttgcctggtgcccgagtttgtgcacagcatcgcagctttgctctgccggtcccatcagctggccgcctacagagaccttctgataaaggagccccaactacagagcatgctgagcctccgatcctgtgtgcaggacccggtggcagctttcaagaggggagtgctggagccactcacaaacctgagaaatgagcagaaaattcctgaagaagaatacattattttgatagatggcttaaatgaagctgagtttcataaacctgattatggagatacgctttcttcatttattaccaaaattatttctaaatttcctgcctggttgaagttgattgtgactgtaagagcaaattttcaggaaatcataagtgcgctgccatttgtcaagctttccttagatgacttcccagacaacaaagacatccacagtgacctgcacgcctacgtccagcacagggtgcacagcagccaggacatcctcagcaacatctccctgaatggcaaggccgatgccacactcattggaaaagtgagcagccacctggtgctgcggagcctcggctcctacctgtacctcaagctcaccctggaccttttccagaggggccacttggtcattaagagtgccagctacaaggtggtgcccgtgtctctctctgagctctatttgcttcagtgcaacatgaagttcatgacccagtccgcctttgagagggcacttccgattctcaacgtggccctcgcatccctccaccccatgacagacgagcagatctttcaggctattaatgctggccacatccagggggagcagggatgggaagactttcagcagaggatggacgccctctcctgcttcctcattaagaggcgagacaaaacccgcatgttctgccacccgtccttcagggagtggcttgtatggagagcagacggggaaaacacggccttcctgtgtgagcccaggaacgggcacgcgctcttggcattcatgttctcgcgtcaggagggcaagttgaaccgccagcagaccatggagcttggccaccacatcctgaaggcgcacattttcaagggcctcagtaagaagacgggaatttcttcaagccatctccaagccctgtggatcggctacagcaccgaggggctgtccgccgccctggcctctctcaggaatctctatactcccaacgtgaaggtgagccgtctcctgattttgggaggggccaacgtgaactacaggacagaagtgttaaataatgccccaatcctgtgcgtccagtctcaccttggccacgaggaagttgtcactctgctcctggaatttggtgcctgcctggacggaacgtcagagaacggcatgactgccctctgttacgcagcagctgctggccacatgaagctggtgtgtctgctgaccaagaagggagtgagagtggaccacttggataagaagggccagtgtgcgcttgtccacagtgccctacggggccacggtgacattctccagtacctgctgacttgtgagtggtcgccgggtcctccccagccaggcaccctgaggaagagccacgccctgcagcaggcgctgaccgcggcggccagcatgggccacagctcggtggtccagtgcttgctggggatggagaaggaacatgaagtagaagtcaatggcaccgacacattgtggggagaaacagccctgactgccgccgcaggaagagggaagctggaggtctgtgagctgctgctggggcatggagctgctgtgtcgcggacaaacaggagaggggttccacctttgttttgtgcagcacgccaggggcattggcagattgttagactgctgttggaacgcggctgtgatgtgaacctaagtgacaagcaaggccggacgcccctcatggtggctgcttgtgaagggcacttgagcaccgtggaattcctcctttcaaaaggtgcagccctttcttctctagacaaagagggtctgtcagcattaagctgggcttgtctgaaaggtcacagggcagtggtccagtatctggttgaagaaggagctgcaatagaccagacagacaagaatggccgcacacccttggacctggctgccttctatggcgatgccgagactgtgctgtacctggtggagaagggagccgtgatcgagcatgtggaccacagcgggatgcggcccttggacagagccatcggctgccggaacacatctgtagtggtggcgctactcagaaagggagccaagttaggaaatgctgcttgggcgatggccacttccaaacctgatatcttgattatacttttacagaaattaatggaggaaggaaatgtgatgtacaaaaaagggaaaatgaaagaggcagcccagaggtaccagtatgccttaagaaagtttcctcgagaaggattcggagaggacatgagacccttcaatgaattaagggtttccctctatctcaatttgtcgcgatgccgaagaaaaacaaatgactttggcatggcagaggaatttgcttccaaggctctcgaattgaagcccaagtcctatgaagccttttatgccagagcaagagcgaagagaaatagcaggcaattcgtggcagctctggctgacctgcaagaggctgtgaaactctgtcccaccaatcaggaagtcaagaggcttctggcccgcgtagaagaggagtgcaaacaactccagaggagtcaacagcaaaaacagcagggcccgctaccagctccactcaacgactccgagaacgaagaggacaccccaacccctggcttaagtgaccactttcactctgaggagactgaagaggaagaaacttctccccaggaagaatctgtttccccaactcccaggtcccagccatcctcatctgtcccttcctcatacatccgaaaccttcaagaagggttacagtccaaaggaaggccggtatcgccacagagcagggcaggaatcggcaagtccctgagagagcctgtggcccagccagggctgctcctgcagccctccaagcaggcccagatcgtgaaaaccagccagcacctgggctctggccagtcggcagtgagaaatggcagtatgaaagttcagatctcttctcagaaccctcctccaagtcccatgccagggagaatcgctgccactcctgctgggagcagaacccagcatttagagggaacaggtactttcactacaagagctggttgtggccactttggggatcggctgggccccagccagaatgtccgcctgcagtgtggtgagaatggccctgcacaccctttaccaagtaagacgaaaaccacagagaggcttctgtctcattcctccgtggctgtggacgcagcccctccaaaccaaggtgggctggcgacctgcagcgacgtgcgacacccagcttccctcaccagctcaggctcttctggttctccatccagcagcataaagatgtcaagttcaaccagtagtttgacttcgagcagcagtttttcagatggcttcaaggtccaaggaccagatactagaattaaagacaaggttgtaacccacgttcagagcggtacagctgagcacagaccccgcaacacgccgttcatgggcatcatggataagactgcgaggttccaacagcagagcaatcctccaagccgcagctggcactgtccggcaccagaggggctgctgacaaacacgtcttctgcagctggcctgcagtctgctaacactgagaagccctctctcatgcaagtgggaggatataataaccaagccaaaacctgttctgtttctaccctgagtgcaagtgtccacaatggggcacaagtgaaggagctagaagaaagcaagtgccaaattccagtccactctcaagagaacaggataactaagactgtttctcatctgtaccaggaaagtatctccaaacagcagcctcatattagtaatgaagcccacaggagccacctcactgcagccaaaccaaagcgatcatttatagagtcaaatgtgtgaaccttaagaaatccccatttgtggaatttggaaacgtgtgttgactcctggtggtaaattaaatagtttttttcatcagaaaaattattttttagccattttttttctttggggtggatctgatgccattgatatatctaaaatgtgggataaaacttctttaatagctagaaatcaccataaataagaatgctaaacagaattgaaaattatatcaacttaaaattttaagacagcccagaagacattaatgactctcacttatgaaattgtttggcttttgccactttcttccttgcctttgctatatggtagaatcacagaacttacttagagaataaatatgtctattgttcaagagtaacaggtttaactcatgaccaagtgatgtacatccaagtgatgtattctggaaacgatggaattttacagttacagttccattgagtcaaatcccattttatatatacataaaaattaagttctgagtgagttctagctaaatataagtgcgactgtaaacgcagccaatttttttaagcagaatatgagaacacctaagtattctcttcatagcagttcctataaagggattaaacacttatttctgtgttatggttcttattcatatatttttatagcacttttggaacctatatttgtgcttgaaggtgtttttgatatttggaaacagtataagccatttggagtcatgattggtggtcaagtggattcaagctaaaatactaagaccagcattcttagtggcgcttataaattagctctcacctggtttccaaactgcttttaacaatggtagtgctcctggaacaatccttccaagctcctctaaggacaatatttaattcagatactaaaggtaagactggttgttacttttgttttgttgtacaattagtactttatagtcacatgttgtatatattaaatagcccagttttattcagacttgtaaatagaactatttcaatgtagttaatctaaaaacaaaaaagaaaaccccagtcacgatttgcatgttctctgtaagcttcatccatgctggttattgcactgaatgatatattattagggcatgttaacagtataccagtaacagcactttatctcatttatatgaacacctttgaggtgctacttaagtccaagctctgatgtattattcatttgtaaagataaggtacaggaatgaaccttggtttaaaggtatttttatatgaaaatggtgtgttattggaagatgttaaaatgctaatttgagagaagtaggagtgtatctgttttatatgttgggatgtgaaatttattttctaaaattgaggagaaggaagttatatatttgcagaatgttttaaagtgaattgttgtaatgaagttcctgtgaacatcattatggttttgtacaaataggaacctctgatgtcattcttcaacgtttgttcctgtgtgtacaattgtactttgtatgaacagctttatcatttttataggctttccatgagttttgctgtaactactatggcttatttattttctttaatatttgtgaaagtcttactcctttgttagttttgtttctgcacaactactgtacttttccatatggaataaagactattaatagaatgtgttttgcactaaatgagtcaatggataagtagagaacagcctgatgacagctatctctgttgcttttaatctttgttaccctagagggaatagtgaaaagcatattttatattaacactacaaaatgcttatttaatttcgttttataatttcagaataagggtgacagctgctagaaattccacaat

SEQ ID NO: 8542 - protein, 1758 aa, Homo sapiens
MIGMENESSKVQAKLGWFEAKADNEPSCSPAAQELLTRLGFLLGEGIPSATHITIEDKNETMCTALSQGISPCSTLTSSTASPSTDSPCSTLNSCVSKTAANKSPCETISSPSSTLESKDSGIIATITSSSENDDRSGSSLEWNKDGNLRLGVQKGVLHDRRADNCSPVAEEETTGSAESTLPKAESSAGDGPVPYSQGSSSLIMPRPNSVAATSSTKLEDLSYLDGQRNAPLRTSIRLPWHNTAGGRAQEVKARFAPYKPQDILLKPLLFEVPSITTDSVFVGRDWLFHQIEENLRNTELAENRGAVVVGNVGFGKTAIISKLVALSCHGSRMRQIASNSPGSSPKTSDPTQDLHFTPLLSPSSSTSASSTAKTPLGSISAENQRPREDAVKYLASKVVAYHYCQADNTYTCLVPEFVHSIAALLCRSHQLAAYRDLLIKEPQLQSMLSLRSCVQDPVAAFKRGVLEPLTNLRNEQKIPEEEYIILIDGLNEAEFHKPDYGDTLSSFITKIISKFPAWLKLIVTVRANFQEIISALPFVKLSLDDFPDNKDIHSDLHAYVQHRVHSSQDILSNISLNGKADATLIGKVSSHLVLRSLGSYLYLKLTLDLFQRGHLVIKSASYKVVPVSLSELYLLQCNMKFMTQSAFERALPILNVALASLHPMTDEQIFQAINAGHIQGEQGWEDFQQRMDALSCFLIKRRDKTRMFCHPSFREWLVWRADGENTAFLCEPRNGHALLAFMFSRQEGKLNRQQTMELGHHILKAHIFKGLSKKTGISSSHLQALWIGYSTEGLSAALASLRNLYTPNVKVSRLLILGGANVNYRTEVLNNAPILCVQSHLGHEEVVTLLLEFGACLDGTSENGMTALCYAAAAGHMKLVCLLTKKGVRVDHLDKKGQCALVHSALRGHGDILQYLLTCEWSPGPPQPGTLRKSHALQQALTAAASMGHSSVVQCLLGMEKEHEVEVNGTDTLWGETALTAAAGRGKLEVCELLLGHGAAVSRTNRRGVPPLFCAARQGHWQIVRLLLERGCDVNLSDKQGRTPLMVAACEGHLSTVEFLLSKGAALSSLDKEGLSALSWACLKGHRAVVQYLVEEGAAIDQTDKNGRTPLDLAAFYGDAETVLYLVEKGAVIEHVDHSGMRPLDRAIGCRNTSVVVALLRKGAKLGNAAWAMATSKPDILIILLQKLMEEGNVMYKKGKMKEAAQRYQYALRKFPREGFGEDMRPFNELRVSLYLNLSRCRRKTNDFGMAEEFASKALELKPKSYEAFYARARAKRNSRQFVAALADLQEAVKLCPTNQEVKRLLARVEEECKQLQRSQQQKQQGPLPAPLNDSENEEDTPTPGLSDHFHSEETEEEETSPQEESVSPTPRSQPSSSVPSSYIRNLQEGLQSKGRPVSPQSRAGIGKSLREPVAQPGLLLQPSKQAQIVKTSQHLGSGQSAVRNGSMKVQISSQNPPPSPMPGRIAATPAGSRTQHLEGTGTFTTRAGCGHFGDRLGPSQNVRLQCGENGPAHPLPSKTKTTERLLSHSSVAVDAAPPNQGGLATCSDVRHPASLTSSGSSGSPSSSIKMSSSTSSLTSSSSFSDGFKVQGPDTRIKDKVVTHVQSGTAEHRPRNTPFMGIMDKTARFQQQSNPPSRSWHCPAPEGLLTNTSSAAGLQSANTEKPSLMQVGGYNNQAKTCSVSTLSASVHNGAQVKELEESKCQIPVHSQENRITKTVSHLYQESISKQQPHISNEAHRSHLTAAKPKRSFIESNV

SEQ ID NO: 8543 - DNA, 2141 bp, Homo sapiens
caaaatgtgctttgaggtaggaagggacctcctgtagagcggctttggcatgaggtcgacccgccctggggtggctccttttccctgtgttggcttggggccactgccccttcatgtttggctcacatggtccagaagcatcagggctcttttaacccagaatagtcaagccttggtttccttacccctgcagttttccagagcagctaaaaaacatccaagctggcaaaccattcttcctactccaaacattaggagcttttaccagtaagcaaggggtgggaagcttttcctttcttgaagatgctgccagcgtagtttcccttgtagctgccatcctgggtgcatgacttgcaaaactgatatgtgagtgacaataagccagatggcctttgcaaaagctctgcttattttgatttttgtggttccttacaaaaggcgaagtgagcattgatctttgttggtgctgttgtagctcaacggcaacatcactgtgttgtttcctcattttatttttcctaaaacctttacccattatctgcagattttcacatctaagcaaaataggttcatatgagtccagttacctagacaattaataaaaaagagcaaaatgttgagtgactatgtcataggttacttattgttaagttacagctttgtaagcagcttgctttgtaaatttttcatcccctgatggatgctgattttagaaggtgagagacgtgttagaaggatgtgaatatcgttttatttattggccataattaagtgcctttgggctttttgggtacagggttaaactacagctcaacatttaaatcaaatccaaccataaaattctcttaagtacaaaaaaaccagatgaccaacctcagggagaacccaagaaaaggtgggctttcccagcattgctgtgcagcattctgagaatacagcttgatttttctacatctttgcatgggcaacagtggtactgggtcctgtctcttgggacaagtttcactgtgattttaaatttttgtttcaacttggattcttcacgattgaccgtcaagttgaaatcctggttttgactttcactactgtgggatgtgcacaggaagttttccaccaaattttccacgtcgttcccctggcttgtttaatgagagcttggatttcagttttactccaacacctaaatagcctgggtctctaccagcatgccactagggttttacttcatttcagcctcctgtgggcattggacacccggcactctgtgagggtaacatgaaagataggcccttttcttacccaagctgatgtctgaagtacccgttttcacatgactcggaattaggaattgccgtcagataacactgggctcttctcactcaccctttgcacttggagtttttgttttactgtttccttaacctgtcacagtcccttaattagaatgtattgctagaggacagggtgcgttgtccaactttgtgcgcattttatagaaacacacaaaatcaccagacaaagcagctgtagtgtgaactcatccagatgcgatactgaaattccccagaggggcatcttcattgttttctttctttgttccagaagcaaaggccgataatgaaccgagctgttcgccggcagctcaagaactgttgacaaggctgggatttttactgggagaagggatcccaagtgccacacacataaccattgaagacaaaaatgaaaccatgtgcacagctctgagtcaaggcatcagtccttgctccacactaacaagcagcaccgcatctcctagcaccgatagcccctgctcaaccttgaatagctgtgtcagcaagacggcagccaacaaaagtccctgtgagaccattagcagccctagttccaccctggaaagcaaggacagtggaattataggtaagaagcacactgctcggtaacataatggctcgaatctcatcaaccagagcattcaccaggcacttcctcagagggttttagcatggtctgtgaaggtcagtctgccagcgcctgctctgttctttgcaggcagcactgactccatgtgtagctgagagagtggagcattggcttttacattccttgatgtttactttataacagtcagctcatttgtt

SEQ ID NO: 8544 - protein, 70 aa, Homo sapiens
MCTALSQGISPCSTLTSSTASPSTDSPCSTLNSCVSKTAANKSPCETISSPSSTLESKDSGIIGKKHTAR

SEQ ID NO: 8545 - DNA, 411 bp, Homo sapiens
tgtttggaattcccaacttattaattaaatgggcagattctatgtgtacaattccacagcaccgagaacactaaaagttggctcagtagtaatagtataatcatattcctaagcttcaaatatatgtgtagacttatatacacattctatatcataccgcattttttggtgttttttattataaaaataagttatgtttacctctgaccaagtcagtaagactcatatcacctaagtatttgttataaagcattaaagagcagggtgcagtggctcacgcctgtaatcacaggactttgggaggctggggcgggtggatcgcttgaggtcaggagttcaagaccagcccaccttggcctcctaaagtgctaggatccaactttaccccttgccttctgaaggttctatgtt

SEQ ID NO: 8546 - protein, 50 aa, Homo sapiens [sequence omitted]

SEQ ID NO: 8547 - DNA, 7584 bp, Homo sapiens
gaggagcggtgagctcccgattgtagaagcctagacagcacagagagtgacctgctcccaggttaggaagtaagatgtcagatgtttgcagatctctgtctcagtctcacttaatcaccattatacacaatgtgtaagtagctcacggtgtttctgcggggagggtgtggaaagcagaggctggtgttgaaggacagtctggagtggtatcagtggccaggaaccacgccagagaggaaccacagcctcttgctgtggggtggggccgggtagtgctgctgaaagctcccccaggtgactctgagcagcagcggaggctgagccactgttctagagccaccagtcagctgtgtggggaaatggccaccacagcaagtttctgtgaagaagtagtagtatgatttcatggagacaaactaggacgatacttgaggattgtgtgggggaccctgagtagggaaagccctttccacgtggctggctttgacacaaacacaccattccagatgtggggagggtcactattttggtttgatgtatggagcccttggtcaggagcagctctgggtagggcactgtgatgaaaatgctattcactaatactgtcaagcagtgaatagtgccaggaactatccaagcagtttcgccctctgccttaatccctaccacagccctgaaagtctcagtgacaatcccatgattttacagatgaggaaaccaaggcaccgagcagctaaatggcttcccccaggactgccttgtggtactcgccgtggggacctagcagctggctccagggctgtgctcttcagcactcctcccacagtgtcccgagagctcaggcaggggttagagaggttgtggccgagctgtagggtaggagagagaagccatgacatctcggagtacagcagatgacacagcacagggactgcgtgctgagaacacatgcctgcacggtggccgctgcaggaactgaggaggttatgctaaggcctcatttaattaattttccccacatcccacccggaagggaggaatgagttttcgctgctcggatgccttcgtttctcattacttttttcagtaaaataacaaggacagatttgagtgcccaggtcagtgggaaaggattagcaacagcctcgccggcgtcctgctccctccctcatcgtgctgtggtccttgcagctgggctcctgctggtgctgacctccagccgtggggccacggaggaattgggatcctttccgcagggcctctgaagtgcctctgaatgcgtgtttgttttgcaggaaatgctgcttgggcgatggccacttccaaacctgatatcttgattatacttttacagaaattaatggaggaaggaaatgtgatgtacaaagtaagtggttccgcccttttctttgccattgaaactgcctgggagcaccctcttaattgggtacataatggctacagctgtgctactgcacagtctccatgtaatagaagtgcaaaaagtggctgggtggggtggctcacgcctgtaactccagcacttttggaggccgaggtgggcagatcacttgaggccaggaattccagaccaacctggccaatatggcaaaaccccatctttactaaaaatacaaaaatcagccaggtgcctgtaatcccagctactcgggaggctgaggcaggagaattgtttcaatctgggaggcagaggttgcagtgagctgagattgcaccactgcactccagcctcagcaacagagtgagactcagtctcagaagaaaaaaaaaaaaagtgccaagaggtgctgacctggcctcatgcccgttgttggcttaatatctttccggcagaatcttaaaggtagaaagcacctctctttgtgtctgagagccattatttctgagctaatccttgaggttgtagtggtgacttcctgtctgaagccatggcgtgaagctgagtcacctctaggtcaactgaacatcatagagaaggttcctcagcccttcacattctgagttcagaacaccatgctgaggcacagtcatgagacgtgggagaggaacacccagcagacatttctagaagaaaagggttattctgtctcctaagcctttcctaatttttaatatctattaatttctagaatttgaaagtgttgttagagatttttacttaatacagtcaagtaatacctcagttactcagaagactgaattaattttttccattttcccttggaaatggaaatatgatttacagatcaataaacttcactttaaatttttccaaataagacatcagtttaggtcagaggtcagcaaactttttttgtaaagggccagacagtaaatgttttaggctttgcagactgtgtggcctctgtcacaactccccagttctgatgtgggggcacagatagcacagagtgaatgaacacagctgtgtcccaataaaactttatttgtaaacacaggtggctggccagacttagtatccaagctatagtttgccaacccctggtttagatagatatgcaggccatttgcataggtcactattctttgcagctctgtgattagacagaattaaaagattataggggaaaaactagattatgaccatgttaatcctttttactgttaggcagctgtatttggtatgttgtagattttttccttctcattttttaaaatagtaacaaataaataggcaatatagcatgacccagcagggttcctggcttggaatcagcttgaaattgagttgagtgtattgttgtggctttgaagtgcttttaatatggattggtaggcaattatgtcagaaataggaagccattttcaacaggcttcatacctgctgtgcaatgggactgactgagcaaatggatttttttagctttgaaaatgatgtgtggtgctgttctgatttttaaagcccatgttttaattcctcttagaagaaaaattattattctgcagcaagctctctaggtttatctacaagatgctacttgtcctaggaataggatcagtttttcatctgatttctattacacttagcattcaaatagatttgagatcattcttgaaataattttcaaaaatacataccagaaggtaatctgattcattaagtttggtaattatcaatctagcagtttacagacaccttattgtaaaaccagcttctttctcactgtgtaaccacaggatgcgggtgcatgtgaggacagtgaagccctcatgtgccagcccagttagtgaactagctcccaccttgacacttgtttggatgctttcaatgttctgtcgtgggtttgcaggggggagtaaactccccacggtgttccaggtgtgggagttattcattttagaacctctgaaaaaggacaaatgtttgtgatttttgaatcctagaaagggaaaatgaaagaggcagcccagaggtaccagtatgccttaagaaagtttcctcgagaaggattcggagaggacatgagacccttcaatgaattaagggtttccctctatctcaatttgtcgcgatgccgaagaaaaacaaatgtaagctgtgcccctttattccaacccagtcttccagcaacagagcccttctccagcagtgaaggccagcccttctccagaccagatcctgggccctcctgtccaatttgcttgcacatttacatgaacctggcatgtgggaaacagctcctatccgtgactatcgtttggtcacggctgctacgctcctcgcatgatgttgaaggaatgcacttgggtttcgtttccttggcctcagtaatgagaagcaaatgcagtctgctcctctgcagcttcccaacactgttgctgctggcactgccgtccccggattcaggagagtccaacccaagcctattgtggtgggcctgccttctgtgttaggtttgctcagagggtctgccagtaactaatttgtaaccggtcgtggggaactcatagtcgatttgtaactagtagatctgtttcagtagtacttcctaccttttttttaactgtgtcctcctgccccagtctgttgagctgcttgcttctgtgccctgctgccggaatagatgcagtgtctgcgctcctctctgaggctgcccctccaccgggctgtgaggttccaccatctggccttcttggggcactgttactaccactgttttcatagtggattcttctcctaatgatattaatcaaccatcattatctcctcactttaaaacaagatagaaaacggaactttcccttcctccctctctggctgtgcctcagagcgctgctaccctttagaacaaaactagacgggcttcccacaatcgtgtgtccaggctgcttctgactcctgtatttcttgtcgacaccaggactttggcatggcagaggaatttgcttccaaggctctcgaattgaagcccaagtcctatgaagccttttatgccagagcaagagcgaagagaaatagcaggcaattcgtggcagctctggctgacctgcaagaggctgtgaaactctgtcccaccaatcaggaagtcaagaggcttctggcccgcgtagaagaggagtgcaaacaactccagaggagtcaacagcaaaaacagcagggcccgctaccagctccactcaacgactccgagaacgaagaggacaccccaacccctggcttaagtgaccactttcactctgaggagactgaagaggaagaaacttctccccaggaagaatctgtttccccaactcccaggtcccagccatcctcatctgtcccttcctcatacatccgaaaccttcaagaagggttacagtccaaaggaaggccggtatcgccacagagcagggcaggaatcggcaagtccctgagagagcctgtggcccagccagggctgctcctgcagccctccaagcaggcccagatcgtgaaaaccagccagcacctgggctctggccagtcggcagtgagaaatggcagtatgaaagttcagatctcttctcagaaccctcctccaagtcccatgccagggagaatcgctgccactcctgctgggagcagaacccagcatttagagggaacaggtactttcactacaagagctggttgtggccactttggggatcggctgggccccagccagaatgtccgcctgcagtgtggtgagaatggccctgcacaccctttaccaagtaagacgaaaaccacagagaggcttctgtctcattcctccgtggctgtggacgcagcccctccaaaccaaggtgggctggcgacctgcagcgacgtgcgacacccagcttccctcaccagctcaggctcttctggttctccatccagcagcataaagatgtcaagttcaaccagtagtttgacttcgagcagcagtttttcagatggcttcaaggtccaaggaccagatactagaattaaagacaaggttgtaacccacgttcagagcggtacagctgagcacagaccccgcaacacgccgttcatgggcatcatggataagactgcgaggttccaacagcagagcaatcctccaagccgcagctggcactgtccggcaccagaggggctgctgacaaacacgtcttctgcagctggcctgcagtctgctaacactgagaagccctctctcatgcaagtgggaggatataataaccaagccaaaacctgttctgtttctaccctgagtgcaagtgtccacaatggggcacaagtgaaggagctagaagaaagcaagtgccaaattccagtccactctcaagagaacaggataactaagactgtttctcatctgtaccaggaaagtatctccaaacagcagcctcatattagtaatgaagcccacaggagccacctcactgcagccaaaccaaagcgatcatttatagagtcaaatgtgtgaaccttaagaaatccccatttgtggaatttggaaacgtgtgttgactcctggtggtaaattaaatagtttttttcatcagaaaaattattttttagccattttttttctttggggtggatctgatgccattgatatatctaaaatgtgggataaaacttctttaatagctagaaatcaccataaataagaatgctaaacagaattgaaaattatatcaacttaaaattttaagacagcccagaagacattaatgactctcacttatgaaattgtttggcttttgccactttcttccttgcctttgctatatggtagaatcacagaacttacttagagaataaatatgtctattgttcaagagtaacaggtttaactcatgaccaagtgatgtacatccaagtgatgtattctggaaacgatggaattttacagttacagttccattgagtcaaatcccattttatatatacataaaaattaagttctgagtgagttctagctaaatataagtgcgactgtaaacgcagccaatttttttaagcagaatatgagaacacctaagtattctcttcatagcagttcctataaagggattaaacacttatttctgtgttatggttcttattcatatatttttatagcacttttggaacctatatttgtgcttgaaggtgtttttgatatttggaaacagtataagccatttggagtcatgattggtggtcaagtggattcaagctaaaatactaagaccagcattcttagtggcgcttataaattagctctcacctggtttccaaactgcttttaacaatggtagtgctcctggaacaatccttccaagctcctctaaggacaatatttaattcagatactaaaggtaagactggttgttacttttgttttgttgtacaattagtactttatagtcacatgttgtatatattaaatagcccagttttattcagacttgtaaatagaactatttcaatgtagttaatctaaaaacaaaaaagaaaaccccagtcacgatttgcatgttctctgtaagcttcatccatgctggttattgcactgaatgatatattattagggcatgttaacagtataccagtaacagcactttatctcatttatatgaacacctttgaggtgctacttaagtccaagctctgatgtattattcatttgtaaagataaggtacaggaatgaaccttggtttaaaggtatttttatatgaaaatggtgtgttattggaagatgttaaaatgctaatttgagagaagtaggagtgtatctgttttatatgttgggatgtgaaatttattttctaaaattgaggagaaggaagttatatatttgcagaatgttttaaagtgaattgttgtaatgaagttcctgtgaacatcattatggttttgtacaaataggaacctctgatgtcattcttcaacgtttgttcctgtgtgtacaattgtactttgtatgaacagctttatcatttttataggctttccatgagttttgctgtaactactatggcttatttattttctttaatatttgtgaaagtcttactcctttgttagttttgtttctgcacaactactgtacttttccatatggaataaagactattaatag

SEQ ID NO: 8548 - protein, 508 aa, Homo sapiens [sequence omitted]

SEQ ID NO: 8549 - DNA, 3525 bp, Homo sapiens
actttaaaacaagatagaaaacggaactttcccttcctccctctctggctgtgcctcagagcgctgctaccctttagaacaaaactagacgggcttcccacaatcgtgtgtccaggctgcttctgactcctgtatttcttgtcgacaccaggactttggcatggcagaggaatttgcttccaaggctctcgaattgaagcccaagtcctatgaagccttttatgccagagcaagagcgaagagaaatagcaggcaattcgtggcagctctggctgacctgcaagaggctgtgaaactctgtcccaccaatcaggaagtcaagaggcttctggcccgcgtagaagaggagtgcaaacaactccagaggagtcaacagcaaaaacagcagggcccgctaccagctccactcaacgactccgagaacgaagaggacaccccaacccctggcttaagtgaccactttcactctgaggagactgaagaggaagaaacttctccccaggaagaatctgtttccccaactcccaggtcccagccatcctcatctgtcccttcctcatacatccgaaaccttcaagaagggttacagtccaaaggaaggccggtatcgccacagagcagggcaggaatcggcaagtccctgagagagcctgtggcccagccagggctgctcctgcagccctccaagcaggcccagatcgtgaaaaccagccagcacctgggctctggccagtcggcagtgagaaatggcagtatgaaagttcagatctcttctcagaaccctcctccaagtcccatgccagggagaatcgctgccactcctgctgggagcagaacccagcatttagagggaacaggtactttcactacaagagctggttgtggccactttggggatcggctgggccccagccagaatgtccgcctgcagtgtggtgagaatggccctgcacaccctttaccaagtaagacgaaaaccacagagaggcttctgtctcattcctccgtggctgtggacgcagcccctccaaaccaaggtgggctggcgacctgcagcgacgtgcgacacccagcttccctcaccagctcaggctcttctggttctccatccagcagcataaagatgtcaagttcaaccagtagtttgacttcgagcagcagtttttcagatggcttcaaggtccaaggaccagatactagaattaaagacaaggttgtaacccacgttcagagcggtacagctgagcacagaccccgcaacacgccgttcatgggcatcatggataagactgcgaggttccaacagcagagcaatcctccaagccgcagctggcactgtccggcaccagaggggctgctgacaaacacgtcttctgcagctggcctgcagtctgctaacactgagaagccctctctcatgcaagtgggaggatataataaccaagccaaaacctgttctgtttctaccctgagtgcaagtgtccacaatggggcacaagtgaaggagctagaagaaagcaagtgccaaattccagtccactctcaagagaacaggataactaagactgtttctcatctgtaccaggaaagtatctccaaacagcagcctcatattagtaatgaagcccacaggagccacctcactgcagccaaaccaaagcgatcatttatagagtcaaatgtgtgaaccttaagaaatccccatttgtggaatttggaaacgtgtgttgactcctggtggtaaattaaatagtttttttcatcagaaaaattattttttagccattttttttctttggggtggatctgatgccattgatatatctaaaatgtgggataaaacttctttaatagctagaaatcaccataaataagaatgctaaacagaattgaaaattatatcaacttaaaattttaagacagcccagaagacattaatgactctcacttatgaaattgtttggcttttgccactttcttccttgcctttgctatatggtagaatcacagaacttacttagagaataaatatgtctattgttcaagagtaacaggtttaactcatgaccaagtgatgtacatccaagtgatgtattctggaaacgatggaattttacagttacagttccattgagtcaaatcccattttatatatacataaaaattaagttctgagtgagttctagctaaatataagtgcgactgtaaacgcagccaatttttttaagcagaatatgagaacacctaagtattctcttcatagcagttcctataaagggattaaacacttatttctgtgttatggttcttattcatatatttttatagcacttttggaacctatatttgtgcttgaaggtgtttttgatatttggaaacagtataagccatttggagtcatgattggtggtcaagtggattcaagctaaaatactaagaccagcattcttagtggcgcttataaattagctctcacctggtttccaaactgcttttaacaatggtagtgctcctggaacaatccttccaagctcctctaaggacaatatttaattcagatactaaaggtaagactggttgttacttttgttttgttgtacaattagtactttatagtcacatgttgtatatattaaatagcccagttttattcagacttgtaaatagaactatttcaatgtagttaatctaaaaacaaaaaagaaaaccccagtcacgatttgcatgttctctgtaagcttcatccatgctggttattgcactgaatgatatattattagggcatgttaacagtataccagtaacagcactttatctcatttatatgaacacctttgaggtgctacttaagtccaagctctgatgtattattcatttgtaaagataaggtacaggaatgaaccttggtttaaaggtatttttatatgaaaatggtgtgttattggaagatgttaaaatgctaatttgagagaagtaggagtgtatctgttttatatgttgggatgtgaaatttattttctaaaattgaggagaaggaagttatatatttgcagaatgttttaaagtgaattgttgtaatgaagttcctgtgaacatcattatggttttgtacaaataggaacctctgatgtcattcttcaacgtttgttcctgtgtgtacaattgtactttgtatgaacagctttatcatttttataggctttccatgagttttgctgtaactactatggcttatttattttctttaatatttgtgaaagtcttactcctttgttagttttgtttctgcacaactactgtacttttccatatggaataaagactattaatagaatgtgttttgcactaaatgagtcaatggataagtagagaacagcctgatgacagctatctctgttgcttttaatctttgttaccctagagggaatagtgaaaagcatattttatattaacactacaaaatgcttatttaatttcgttttataatttcagaataagggtgacagctgctagaaattccacaat

SEQ ID NO: 8550 - protein, 508 aa, Homo sapiens [sequence omitted]

SEQ ID NO: 8551 - DNA, 1819 bp, Homo sapiens
agcggcggtggcggcaggtggggaagcgcggctgggcctgctcgcgcggggcgtctgagccctccatttcccggttctaaccgcgcagcagggcccaaccgggaccttgagtgcggcgaggcgtggctgtttttcttcaaataaagaacatggtgaaactgattcacacattagctgatcatggtgacgatgtcaactgctgtgccttctccttttccctcttggctacttgctccttggacaaaacaattcgcctgtactcgttacgtgactttactgaactgccacattctccattgaagtttcatacctatgctgtccactgctgctgtttctccccttcaggacatattttggcatcgtgttcaacagatggtaccactgtcctatggaatactgaaaatggacagatgctggcagtgatggaacagcctagtggcagccctgtgagggtttgccagttttccccagactccacgtgtttggcatcaggggcagctgatggaactgtggttttgtggaatgcacagtcatacaaattatatagatgtggtagtgttaaagatggctccttggcggcatgtgcattttctcctaatggaagcttctttgtcactggctcctcatgtggtgatttaacagtgtgggatgataaaatgaggtgtccgcatagtgaaaaagcacatgatcttggaattacctgctgcgatttttcttcacagccagtttctgatggagaacaaggtcttcagttttttcgactggcatcatgtggtcaggattgccaagtcaaaatttggattgtttcttttacccatatcttaggttttgaattaaaatataaaagtacactgagtgggcactgtgctcctgttctggcttgtgctttttcccatgatgggcagatgctagtctcagggtcagtggataagtctgtcatagtatatgatactaatactgagaatatacttcacacattgactcagcacaccaggtatgtcacaacttgtgcttttgcacctaatacccttttacttgctactggttcaatggacaaaacagtgaacatctggcaatttgacctggaaacactttgccaagcaaggcgcacagaacatcagctgaagcaatttaccgaagattggtcagaggaggatgtctcaacatggctttgtgcacaagatttaaaagatcttgttggtattttcaagatgaataacattgatggaaaagaactgttgaatcttacaaaagaaagtctggctgatgatttgaaaattgaatctctaggactgcgtagtaaagtgctgaggaaaattgaagagctcaggaccaaggttaaatccctttcttcaggaattcctgatgaatttatatgtccaataactagagaacttatgaaagatccggtcatcgcatcagatggctattcatatgaaaaggaagcaatggaaaattggatcagcaaaaagaaacgtacaagtcccatgacaaatcttgttcttccttcagcggtacttacaccaaataggactctgaaaatggccatcaatagatggctggagacacaccaaaagtaaaattgttgatattgtattatttatattttcagtgatctcatttgaatgatttataggtaaatactaatcagacattattaaaagcaaaacaggaaaaaggtaaacttcttaaatttagttacctataaaaattgtcaattttcattctttaaaaaacacatggacttactataaaagcctttttgtactagtgaaaagaatcttcagctatatagaaataaagttatactttaaattgc

SEQ ID NO: 8552 - protein, 476 aa, Homo sapiens
MVKLIHTLADHGDDVNCCAFSFSLLATCSLDKTIRLYSLRDFTELPHSPLKFHTYAVHCCCFSPSGHILASCSTDGTTVLWNTENGQMLAVMEQPSGSPVRVCQFSPDSTCLASGAADGTVVLWNAQSYKLYRCGSVKDGSLAACAFSPNGSFFVTGSSCGDLTVWDDKMRCPHSEKAHDLGITCCDFSSQPVSDGEQGLQFFRLASCGQDCQVKIWIVSFTHILGFELKYKSTLSGHCAPVLACAFSHDGQMLVSGSVDKSVIVYDTNTENILHTLTQHTRYVTTCAFAPNTLLLATGSMDKTVNIWQFDLETLCQARRTEHQLKQFTEDWSEEDVSTWLCAQDLKDLVGIFKMNNIDGKELLNLTKESLADDLKIESLGLRSKVLRKIEELRTKVKSLSSGIPDEFICPITRELMKDPVIASDGYSYEKEAMENWISKKKRTSPMTNLVLPSAVLTPNRTLKMAINRWLETHQK

SEQ ID NO: 8553 - DNA, 1927 bp, Homo sapiens
gctcctgcaggtgagagcggccgcgcccacgggccggctcagcggcggtggcggcaggtggggaagcgcggctgggcctgctcgcgcggggcgtctgagccctccatttcccggttctaaccgcgcagcagggcccaaccgggaccttgagtgcggcgaggcgtggttcgtgcacccttggcccggggctagggcgggcgtgtcggcgtcgggtggaaggaagccccttgcgggctgtttttcttcaaataaagaacatggtgaaactgattcacacattagctgatcatggtgacgatgtcaactgctgtgccttctccttttccctcttggctacttgctccttggacaaaacaattcgcctgtactcgttacgtgactttactgaactgccacattctccattgaagtttcatacctatgctgtccactgctgctgtttctccccttcaggacatattttggcatcgtgttcaacagatggtaccactgtcctatggaatactgaaaatggacagatgctggcagtgatggaacagcctagtggcagccctgtgagggtttgccagttttccccagactccacgtgtttggcatcaggggcagctgatggaactgtggttttgtggaatgcacagtcatacaaattatatagatgtggtagtgttaaagatggctccttggcggcatgtgcattttctcctaatggaagcttctttgtcactggctcctcatgtggtgatttaacagtgtgggatgataaaatgaggtgtccgcatagtgaaaaagcacatgatcttggaattacctgctgcgatttttcttcacagccagtttctgatggagaacaaggtcttcagttttttcgactggcatcatgtggtcaggattgccaagtcaaaatttggattgtttcttttacccatatcttaggttttgaattaaaatataaaagtacactgagtgggcactgtgctcctgttctggcttgtgctttttcccatgatgggcagatgctagtctcagggtcagtggataagtctgtcatagtatatgatactaatactgagaatatacttcacacattgactcagcacaccaggtatgtcacaacttgtgcttttgcacctaatacccttttacttgctactggttcaatggacaaaacagtgaacatctggcaatttgacctggaaacactttgccaagcaaggcgcacagaacatcagctgaagcaatttaccgaagattggtcagaggaggatgtctcaacatggctttgtgcacaagatttaaaagatcttgttggtattttcaagatgaataacattgatggaaaagaactgttgaatcttacaaaagaaagtctggctgatgatttgaaaattgaatctctaggactgcgtagtaaagtgctgaggaaaattgaagagctcaggaccaaggttaaatccctttcttcaggaattcctgatgaatttatatgtccaataactagagaacttatgaaagatccggtcatcgcatcagatggctattcatatgaaaaggaagcaatggaaaattggatcagcaaaaagaaacgtacaagtcccatgacaaatcttgttcttccttcagcggtacttacaccaaataggactctgaaaatggccatcaatagatggctggagacacaccaaaagtaaaattgttgatattgtattatttatattttcagtgatctcatttgaatgatttataggtaaatactaatcagacattattaaaagcaaaacaggaaaaaggtaaacttcttaaatttagttacctataaaaattgtcaattttcattctttaaaaaacacatggacttactataaaagcctttttgtactagtgaaaagaatcttcagctatatagaaataaagttatactttaaattgc

SEQ ID NO: 8554 - protein, 476 aa, Homo sapiens; identical to SEQ ID NO: 8552

SEQ ID NO: 8555 - DNA, 1560 bp, Homo sapiens
gcgggcgttcgggggcggggcctgttccctctgctctgggtctccgccggcgcccgccccgccagcctcacctgcgcggcacgtgacccgcaccgcccgtgggcaccttgaaggcggatcccgcgcgcccccgctcctgcaggctgtttttcttcaaataaagaacatggtgaaactgattcacacattagctgatcatggtgacgatgtcaactgctgtgccttctccttttccctcttggctacttgctccttggacaaaacaattcgcctgtactcgttacgtgactttactgaactgccacattctccattgaagtttcatacctatgctgtccactgctgctgtttctccccttcaggacatattttggcatcgtgttcaacagatggtaccactgtcctatggaatactgaaaatggacagatgctggcagtgatggaacagcctagtggcagccctgtgagggtttgccagttttccccagactccacgtgtttggcatcaggggcagctgatggaactgtggttttgtggaatgcacagtcatacaaattatatagatgtggtagtgttaaagatggctccttggcggcatgtgcattttctcctaatggaagcttctttgtcactggctcctcatgtggtgatttaacagtgtgggatgataaaatgaggtgtccgcatagtgaaaaagcacatgatcttggaattacctgctgcgatttttcttcacagccagtttctgatggagaacaaggtcttcagttttttcgactggcatcatgtggtcaggattgccaagtcaaaatttggattgtttcttttacccatatcttagcaaggcgcacagaacatcagctgaagcaatttaccgaagattggtcagaggaggatgtctcaacatggctttgtgcacaagatttaaaagatcttgttggtattttcaagatgaataacattgatggaaaagaactgttgaatcttacaaaagaaagtctggctgatgatttgaaaattgaatctctaggactgcgtagtaaagtgctgaggaaaattgaagagctcaggaccaaggttaaatccctttcttcaggaattcctgatgaatttatatgtccaataactagagaacttatgaaagatccggtcatcgcatcagatggctattcatatgaaaaggaagcaatggaaaattggatcagcaaaaagaaacgtacaagtcccatgacaaatcttgttcttccttcagcggtacttacaccaaataggactctgaaaatggccatcaatagatggctggagacacaccaaaagtaaaattgttgatattgtattatttatattttcagtgatctcatttgaatgatttataggtaaatactaatcagacattattaaaagcaaaacaggaaaaaggtaaacttcttaaatttagttacctataaaaattgtcaattttcattctttaaaaaacacatggacttactataaaagcctttttgtactagtgaaaagaatcttcagctatatagaaataaagttatactttaaattgc

SEQ ID NO: 8556 - protein, 384 aa, Homo sapiens
MVKLIHTLADHGDDVNCCAFSFSLLATCSLDKTIRLYSLRDFTELPHSPLKFHTYAVHCCCFSPSGHILASCSTDGTTVLWNTENGQMLAVMEQPSGSPVRVCQFSPDSTCLASGAADGTVVLWNAQSYKLYRCGSVKDGSLAACAFSPNGSFFVTGSSCGDLTVWDDKMRCPHSEKAHDLGITCCDFSSQPVSDGEQGLQFFRLASCGQDCQVKIWIVSFTHILARRTEHQLKQFTEDWSEEDVSTWLCAQDLKDLVGIFKMNNIDGKELLNLTKESLADDLKIESLGLRSKVLRKIEELRTKVKSLSSGIPDEFICPITRELMKDPVIASDGYSYEKEAMENWISKKKRTSPMTNLVLPSAVLTPNRTLKMAINRWLETHQK

SEQ ID NO: 8557 - DNA, 682 bp, Homo sapiens
tgaatgtttaccctagggtttttggtgaatatggttgaaagtgacctaccattcttagagtcctggctggatttagggagaggcataagaaaggataggttatcatggacttggaaaatgggagttttttatgcacccggccaagggactaatttctactcactggtcctgcaatgtatacaagtcaaatgccatagtcaaaaatatgaattatttcaggtaatagatgtttaggttactattagtaggttcaaacagatgagcaaatgccaagggtctactgtactaaaaatttctaaggaggtggctagcagacaataatgccgataattgacaaaaagtgaagtaagtacctgagaatgctgttacagatgctgtttctgctattcattgagtaaagtttcaacttatgttagttactaataaatattaatatatccacttagtatacaacccatttatgtcaaatgagtcttcatcagtaactttactcttacttgagtaaatttaaagctgtttttattgtttttcagaatactgagaatatacttcacacattgactcagcacaccaggtatgtcacaacttgtgcttttgcacctaatacccttttacttgctactggttcaatggacaaaacagtgaacatctggcaatttgacctggaaacactttgccaagg

SEQ ID NO: 8558 - protein, 76 aa, Homo sapiens
MFTLGFLVNMVESDLPFLESWLDLGRGIRKDRLSWTWKMGVFYAPGQGTNFYSLVLQCIQVKCHSQKYELFQVIDV

SEQ ID NO: 8559 - DNA, 8058 bp, Homo sapiens
gaagccttgttggttgacgtcacttggttcatgaagccttcgcctagaagtgaagctgctgaacaaaccttgagaagaatcatctcctgcttcaatctgctgctggataggaactaatcagagagagagaggcggaagacggagaaggagggagtcgaaggctttcccgatcacaaatctcacctccactacaactctctttatacttttcttgcagaaataataatagaaataaggaggtggtggggtttccaaaaatcttaaccttcaaccatctggggaaaaggcaaaaatcccatctaccgcaactctcagttcgagagtaaaggtttcccaacagtgatgtcacaagattgaccacattgatcacaatatggagtctggagaacggttaccatcctcagcagcctcctctactacaccaacttcatcttcgacaccttctgtggcttcagtagtttcaaaaggtggcctttccactggagttgcttcacttagctctacaatcaacccatgtggacatttattcagaacagctggggatcaaccgtttaacctgtccacagtgtcgagtgccttcccaatggtcagccacccagtctttggtctacattcagccagctcagggcattcagaatttggtggtttggggacacttggtacacccacagccttagccgcacatccccaactagcatcttttccagaatggtggcgaacaactgatgctcatactcgtacaggagcaaccttctttccaccattactgggaattccaccactatttgctcccccagcccagaatcatgattcttcttcattccattcaaggacttcgggaaaaagtaatcgaaatggtcccgaaaaaggtgtaaatgggtcaataaatggaagtaatacatcatctgtaattggtatcaacacatctgtactatccactactgcttcaagttccatgggacaaactaaaagtacaagctcaggtggaggaaatcgaaaatgtaatcaggaacaaagcaaaaaccagcctttggatgctagagttgacaaaatcaaagataagaaaccaaggaagaaagcaatggaaagttctagcaacagtgatagtgattcaggcacatcatcagacacctcaagtgaaggcattagtagcagtgattcagatgatctagaagaagatgaagaagaagaagatcaaagtattgaagaaagtgaagatgatgattctgattcagagagtgaagcacaacataaaagtaacaaccaggtgctattacatggtatttcagacccaaaagcagatggacagaaagcaactgaaaaagcccaggaaaaaagaatacaccagccattacctcttgcgtctgaatcccagactcactcattccaatcccagcagaagcagcctcaggttttgtcacagcagcttccatttattttccaaagctctcaggcaaaggaggaatctgtgaacaaacacaccagtgtaatacagtctacgggattggtgtccaatgtgaaacctttatctttggtaaatcaagccaaaaaggaaacttacatgaaactcatagttccttctcctgatgttcttaaagcagggaataaaaatacctctgaagaatctagtttattgaccagtgaattgagatccaaacgggaacaatataaacaggcattcccatcacagttaaagaaacaagagtcatcgaagagcctgaagaaggttattgcagctttgtcaaatccaaaagcaacctctagttcaccagcacatccaaaacaaacattagaaaacaaccacccaaatccattcttgacaaatgcacttttaggtaatcaccaaccaaatggagttattcaaagtgtcattcaagaagctcctctagcacttactaccaaaactaaaatgcagagcaagattaatgaaaacattgctgctgcaagtagcacccctttttcctcacctgtaaatctgagtacaagtgggagaagaacccctggcaatcagacacctgtaatgccctctgcctctcccatcctgcatagtcaagggaaggaaaaagcagttagcaataatgtaaacccagtaaaaacacagcatcactcccatcctgcaaaatctttagtggaacaattcagaggaacagattcagacattcccagtagtaaagattctgaagattcaaatgaggatgaagaggaagatgatgaagaagaagatgaggaagatgatgaagatgatgaatctgatgacagccaatcagaatcagatagtaattcagaatcagatacagaaggatcagaagaagaagatgatgatgataaagaccaagatgaatcagatagtgatactgaaggagagaaaacttcaatgaaactgaataaaacaacttcctctgtcaaaagcccttccatgagtctcacaggtcactcaacacctcgtaacctccacatagcaaaagccccaggctctgctcctgctgccttatgttctgaatcccagtcacctgcttttcttggtacatcttcttccacacttacttcaagcccacactctggcacttccaaaagaagaagagtaacagatgaacgtgaactgcgtattccattggaatatggctggcagagagagacaagaataagaaactttggagggcgccttcaaggagaagtagcatattatgctccatgtggaaagaaacttaggcagtaccctgaagtaataaagggaatgcagtggtgtcttttgaaagaagaggatgtcattcctcgtatcagggcaatggaaggtcgtagaggaagaccaccaaatccagatagacaacgagcaagagaggaatccaggatgagacgtcggaaaggtcgacctccaaatgttggcaatgctgaattcctagataacgcagatgcaaagttgctaagaaaactgcaagctcaagaaatagccaggcaagcagcacaaataaagcttttgagaaaacttcaaaagcaggaacaggctcgggttgctaaagaagccaaaaaacaacaagcaataatggctgctgaggagaagcggaagcaaaaagaacagataaagattatgaaacagcaggaaaaaattaagagaatacagcaaatcagaatggaaaaagaacttcgagctcagcaaattctagaggctaaaaagaaaaagaaggaagaagcggcaaatgccaaattattggaggccgagaaacgaataaaggaaaaagaaatgagaagacaacaagctgttcttctgaaacatcaggaacgagagcgaaggcgacaacacatgatgcttatgaaagctatggaagctcgtaaaaaagcagaagaaaaagagcggttgaaacaagaaaaacgtgatgagaaaagattaaataaagagcgtaaactagagcagcgaagattagaattagaaatggcaaaggaactaaagaagcctaatgaagacatgtgcttagcagaccaaaagcctttgccagagttgcctcgtattccaggacttgttctctctggaagtacattttcagactgtctcatggtggtgcagttcttacgaaactttggtaaagttttgggctttgatgtgaatattgatgttccaaacctgagtgttcttcaagagggattgctaaatataggggacagcatgggtgaagtacaagacttgcttgtgaggctcctctcagctgctgtatgtgatccaggtctaataacaggatacaaggctaaaacagctcttggagaacatttgctgaatgttggtgtgaatcgagacaatgtttccgagattttacagatatttatggaagcccactgtggacaaactgagcttactgaaagtctgaagaccaaagcttttcaggctcacactccagcacagaaagcttcagtcctggctttcctgatcaatgaactggcatgcagcaagagtgtggtcagtgaaatcgacaagaacattgattatatgtcaaacttgaggagagataaatgggtggtagaaggtaaactccgcaagctcagaatcattcatgctaagaaaacaggcaaaagagacacttcaggtggcattgatctgggagaagagcagcatcccttgggcacacccactccaggacgcaagcgaagaaggaagggaggagacagtgattatgacgatgatgatgacgatgacagtgatgaccaaggggatgaagatgatgaggatgaagaagataaagaagacaaaaaaggaaaaaagactgatatctgtgaagatgaggatgaaggtgaccaagcagcaagtgttgaagagctggaaaaacagattgaaaaactgagtaaacaacagagtcagtacagaaggaagctctttgatgcgtctcactcattgcgttcagtgatgtttggccaagatcgttacagacgccggtactggattcttccccaatgtggggggatttttgtagaaggcatggagagtggtgaaggactagaagaaattgcaaaagaaagagaaaaactgaaaaaggcagaaagtgtccagatcaaagaagaaatgtttgagacttctggggacagtttaaattgttcaaatacagatcactgtgaacaaaaggaagatcttaaagaaaaagataacacaaatctattccttcagaaacctggctctttttccaaattaagcaagcttttggaagtagctaagatgcctcctgagtcagaggttatgacccccaaaccaaatgctggtgcaaatgggtgcacgttgtcttatcagaacagtggaaaacattcactgggcagcgttcagtcaacagcaacgcaaagcaatgtggaaaaggcagactctaataatctgtttaatactggttcaagtggtccagggaagttctacagtcctctccccaatgaccagttactaaaaacgctgactgaaaagaatagacaatggtttagtcttttgccacgaacaccctgtgatgacacttcacttactcatgccgatatgtcaactgcttctttggtgactcctcagtctcagccaccatctaagtcaccttcacctaccccagctcctcttggatcttctgctcagaatcctgttggcttaaatccatttgctttatcacctcttcaggtgaaaggtggagtatctatgatgggacttcagttttgtggatggcccactggtgtggttacttctaatattccatttacatcatctgtacctagtctaggatcggggttagggttatcagaaggaaatggtaattcattcttgacttccaatgttgcttcaagtaaaagtgaatctccagtaccacagaatgaaaaggccacttcagctcaacctgcagctgttgaagtagcaaaaccagtagattttcctagtccaaaacctattccagaagaaatgcagtttggttggtggagaattattgacccagaggacctaaaagctttgctcaaagtgctgcatctcagaggaataagagaaaaggcattacaaaaacaaattcagaaacatttggattatattactcaagcctgcctcaagaataaggatgttgctattattgaactgaatgaaaatgaagaaaaccaagtaactcgagatattgtggagaactggtcagtagaagaacaagcaatggaaatggatttgagtgtccttcaacaggtagaagatctagaaaggagagttgcatcagcaagtttgcaagtgaagggttggatgtgtccagagcctgcatcagaaagggaggacttggtatattttgaacataaatcatttactaaattgtgcaaggagcatgatggagaatttactggcgaagacgaaagcagtgcacatgcactagaacggaagagtgacaaccccctagatatagctgtaaccaggctggctgatttggagcggaacattgaaagaagaattgaagaggatattgctccagggctcagggtatggagaagggcattatcagaagctcgcagtgctgcacaggtagctctgtgcattcagcaattacagaaatcaatagcatgggaaaaatcaattatgaaagtttactgccaaatctgtcgaaagggagataatgaagaactgcttcttctttgtgatggctgtgacaaaggctgtcatacctactgccatagacccaagattacaacaatcccagatggagactggttttgtccagcttgcattgctaaggcaagtggtcaaactctaaaaatcaaaaaacttcatgtcaaaggaaaaaagactaatgagtcaaagaaaggcaagaaggtaactttaacaggagatactgaagatgaagactctgcatctacaagtagttcactaaaaagaggaaacaaagacctcaagaaaagaaaaatggaggaaaacacttctattaacttgtcaaaacaagaaagttttacttcagttaagaaacctaaaagagatgactccaaggacctagctctttgcagtatgattctgactgaaatggaaactcatgaggatgcatggccttttctacttcctgtaaacttgaaacttgttcctggttataagaaagttattaagaagcctatggatttttccacaattagagagaaactaagtagtggacagtatccaaaccttgaaacctttgctctagatgtcaggcttgtttttgacaactgtgaaacatttaatgaagatgattctgatataggcagagctggccacaatatgaggaagtattttgaaaaaaagtggacagatactttcaaagtgagctgaagttataataatctctttatttttttccttctaaacaaggacaaatgagaccagcaatgtgaactgtatttacataaacgtgcaaggcacatacataatgactttctttttccttaagtataaaaaaaaagtatcagaagaatgataccatttttaaaggcttcattcctacaacaaccaaggccctcggttattggtttgtgtgatttatcagctaatttaggtagaacagggaagcacacccaaagaattttcaaaggaaagggtgttatagtgcaatagcaattaaaatatatcaaatcgcactgaatactcaacaccagagctctaatgtgggaaatggttctcctttccctctcaataaatatctatttttcatttttttactttgtagtttattttttagtgaatgtatttaattttatgaattatttatgattaaaccacatccagaatcttcgttttctgtgaaaaggaagaactagaaaattgctttaaatcttgaaaatacaaggaatgttttaaaatataaaacaaagccaagttaaactgtttacactgatgtgctataaaagcaccaaaaagaaactttactgtagagttacaagtacatttatatatatatgttgctgcatcacttgtgtagttaaattgtatttcaaaacagtgaaaaaattgacatgtatatactgttcattcttgtttatattaagtcttgttttaaatatgtattatgtgtatatattgtttgcagacattattgttcatgccttagaggattgtagcattttattttcgtctgaaggtaatgatagctatacagtctgtacagtaattatcctctaccaacactgtggcgtctccttaatcttggtagtgcctgcctttgaaacagggtgtaggggatattagttttccatttttctattttgttatataattttaagccaccagggcctaaattaaagtataatcatttgtatccatgtggaataaaattgtgacaatttcctacgcacacagtattttttcatagaaacatttccctcccatttgccttgcctcagaaataaatttaaaagacgtttgtaaccactgtgttttatctactgtgtgttgtggtggcctgttggaggcaaatagatcagattttttttgtacctacgtaagagtacttgaagttttatttaaaataaaatgttgtggaaaaggtagcattctttttttaggagtgttatttttcactatgtgtggcacggatacaataaaagacttttacaaactaa

SEQ ID NO: 8560 - protein, 2132 aa, Homo sapiens
MESGERLPSSAASSTTPTSSSTPSVASVVSKGGLSTGVASLSSTINPCGHLFRTAGDQPFNLSTVSSAFPMVSHPVFGLHSASSGHSEFGGLGTLGTPTALAAHPQLASFPEWWRTTDAHTRTGATFFPPLLGIPPLFAPPAQNHDSSSFHSRTSGKSNRNGPEKGVNGSINGSNTSSVIGINTSVLSTTASSSMGQTKSTSSGGGNRKCNQEQSKNQPLDARVDKIKDKKPRKKAMESSSNSDSDSGTSSDTSSEGISSSDSDDLEEDEEEEDQSIEESEDDDSDSESEAQHKSNNQVLLHGISDPKADGQKATEKAQEKRIHQPLPLASESQTHSFQSQQKQPQVLSQQLPFIFQSSQAKEESVNKHTSVIQSTGLVSNVKPLSLVNQAKKETYMKLIVPSPDVLKAGNKNTSEESSLLTSELRSKREQYKQAFPSQLKKQESSKSLKKVIAALSNPKATSSSPAHPKQTLENNHPNPFLTNALLGNHQPNGVIQSVIQEAPLALTTKTKMQSKINENIAAASSTPFSSPVNLSTSGRRTPGNQTPVMPSASPILHSQGKEKAVSNNVNPVKTQHHSHPAKSLVEQFRGTDSDIPSSKDSEDSNEDEEEDDEEEDEEDDEDDESDDSQSESDSNSESDTEGSEEEDDDDKDQDESDSDTEGEKTSMKLNKTTSSVKSPSMSLTGHSTPRNLHIAKAPGSAPAALCSESQSPAFLGTSSSTLTSSPHSGTSKRRRVTDERELRIPLEYGWQRETRIRNFGGRLQGEVAYYAPCGKKLRQYPEVIKGMQWCLLKEEDVIPRIRAMEGRRGRPPNPDRQRAREESRMRRRKGRPPNVGNAEFLDNADAKLLRKLQAQEIARQAAQIKLLRKLQKQEQARVAKEAKKQQAIMAAEEKRKQKEQIKIMKQQEKIKRIQQIRMEKELRAQQILEAKKKKKEEAANAKLLEAEKRIKEKEMRRQQAVLLKHQERERRRQHMMLMKAMEARKKAEEKERLKQEKRDEKRLNKERKLEQRRLELEMAKELKKPNEDMCLADQKPLPELPRIPGLVLSGSTFSDCLMVVQFLRNFGKVLGFDVNIDVPNLSVLQEGLLNIGDSMGEVQDLLVRLLSAAVCDPGLITGYKAKTALGEHLLNVGVNRDNVSEILQIFMEAHCGQTELTESLKTKAFQAHTPAQKASVLAFLINELACSKSVVSEIDKNIDYMSNLRRDKWVVEGKLRKLRIIHAKKTGKRDTSGGIDLGEEQHPLGTPTPGRKRRRKGGDSDYDDDDDDDSDDQGDEDDEDEEDKEDKKGKKTDICEDEDEGDQAASVEELEKQIEKLSKQQSQYRRKLFDASHSLRSVMFGQDRYRRRYWILPQCGGIFVEGMESGEGLEEIAKEREKLKKAESVQIKEEMFETSGDSLNCSNTDHCEQKEDLKEKDNTNLFLQKPGSFSKLSKLLEVAKMPPESEVMTPKPNAGANGCTLSYQNSGKHSLGSVQSTATQSNVEKADSNNLFNTGSSGPGKFYSPLPNDQLLKTLTEKNRQWFSLLPRTPCDDTSLTHADMSTASLVTPQSQPPSKSPSPTPAPLGSSAQNPVGLNPFALSPLQVKGGVSMMGLQFCGWPTGVVTSNIPFTSSVPSLGSGLGLSEGNGNSFLTSNVASSKSESPVPQNEKATSAQPAAVEVAKPVDFPSPKPIPEEMQFGWWRIIDPEDLKALLKVLHLRGIREKALQKQIQKHLDYITQACLKNKDVAIIELNENEENQVTRDIVENWSVEEQAMEMDLSVLQQVEDLERRVASASLQVKGWMCPEPASEREDLVYFEHKSFTKLCKEHDGEFTGEDESSAHALERKSDNPLDIAVTRLADLERNIERRIEEDIAPGLRVWRRALSEARSAAQVALCIQQLQKSIAWEKSIMKVYCQICRKGDNEELLLLCDGCDKGCHTYCHRPKITTIPDGDWFCPACIAKASGQTLKIKKLHVKGKKTNESKKGKKVTLTGDTEDEDSASTSSSLKRGNKDLKKRKMEENTSINLSKQESFTSVKKPKRDDSKDLALCSMILTEMETHEDAWPFLLPVNLKLVPGYKKVIKKPMDFSTIREKLSSGQYPNLETFALDVRLVFDNCETFNEDDSDIGRAGHNMRKYFEKKWTDTFKVS

SEQ ID NO: 8561 - DNA, 2015 bp, Homo sapiens
ctatgatttatattcaatttagaagagttaaatagaacttataatgatcagcatccctcacatatatcaactgatttactagattgaccaaatgacaaatttatttctttggaggatgaaataacagccgtccaaaggtttatgtctgttttgttttattattttttaattacagaagggacctgcctaagttaaggaagcgtttaaatgattgattggtactgattggttccaatatgcaaacactgttacctagatatggactagttcttttgtttgttctttttttttttttttgagagagtttcacttttgttgcccaagctggagtgcagtggtgcatctcggctcactgcaatctctgcctcccgggttcaagtgattctcctgcctcagctactcagggatgaggcacaagaatcacttgaaactggaggtgcaggttgcagtgagttacctcgccactgcactccagcctgggcaacagagtgagattgtctcaaaaaaaaaaaaaaaagctacaaaatcagagctcctttgaaaaatgagtcccagtgaatggaggaagtcacaggggaagagaaagagagaaggaaacagtctgtgtattcctgtttgtgatgccaggtgtgtgggaagcaaaatttcagtggattcaagctcctcgaactctccactttgagttgtttgattaaacccaaattaatgagttggaaccaaaactcacaaaccatatttcaaatttttaaactagaaatttttagaatagagggaggggcctacttacatgaatttttctgagttccattagctgccccatcccataaaggaaggacacacatatgagttgtatacttttttcacctagaatctcacctagaattctctcctggactccactctccctaatgttaatcattaaccttttcttagggtaaggaacaaaggcagaagtagttctcaaatcaactttaaaatattttgtaaaaatcattcccacacagattgtatgattccatttagatgaagtatctggaatagataaatccatagagacagatagaagattggtggttgccaggtactgggaagagggaggaatggggaataactgtttaatgagtatgatgtttcctttcagggtgatgacagtgttttagaagtgacgataatacagtgttgtgacttaaatgccactgaactgtccaccttaatatggttaattttatgtgaatttcttaacctcagtaaaaataagcaagtaattcctaggaaaatggatgaggttacataagggctgacttaactctgtgagcacattacgcatagagaaatatttctttcattatcgcacagaagaagcgagtgaaaggtcatacaagatatttcaccaaagaaatagaattccactttgacaagatctcacagcgtcagtgcctcatagggtatttctctttttttaatttttattttaatttttgcaggtacacagtaggtgtatatatttatggactacatgagatacaggcatgcaatgcataataatcacatcatggaaaattgggtattcatcacctcaagcatttatcctttgtgttacagataatccacttctactcttttacttattttaaagtgtacaattaaactatgattgactatagtctccttgttgtgctgtcacatactaggtcttattcattccttctatttttttgtacccattaactatccccacctccccactgcagttcccagcctctggtaaccatccttctactctgtttccatgagctcaattgttttgatttttagatcccacaaataagtgagaacacgtgatgtttgtgtttctgtgcctggcttatttcacttaatataatgacctccagtttgatccacgttgtttcaaatgacaaaatctcattctttttttatggctgaatggtgcgccattgtgtttaagtaccatgttttctttatccattcgtctgttgatggacacttagattgct

SEQ ID NO: 8562 - protein, 45 aa, Homo sapiens
MSPSEWRKSQGKRKREGNSLCIPVCDARCVGSKISVDSSSSNSPL

SEQ ID NO: 8563 - DNA, 1045 bp, Homo sapiens
ctaatgtcatgttaattatttcatatgttaatgtgtacatgcttctgaagtgtgtgcaaggcattctgcctctagctttgttctttgcagtgtacttgaaatgtgcatttaccccaatagaactgctcacccgtcatgtggtccatatctgtgtaacgaaagatacatagatgtgtatggctactgtatatttgtaagcaagcggaatgttcattactaatataaattaggaattatggtgtgtttaacatcccaataactattattcatggcagagcgttaattttaaatgatttttcatgtattatagtactgccaaatctgtcgaaagggagataatgaagaactgcttcttctttgtgatggctgtgacaaaggctgtcatacctactgccatagacccaagattacaacaatcccagatggagactggttttgtccagcttgcattgctaaggcaagtggtcaaactctaaaaatcaaaaaacttcatgtcaaaggaaaaaagactaatgagtcaaagaaaggcaagaaggtaactttaacaggagatactgaagatgaagactctgcatctacaagtagttcactaaaaagaggaaacaaagacctcaagaaaagaaaaatggaggaaaacacttctattaacttgtcaaaacaagaaagttttacttcagttaagaaacctaaaagagatgactccaaggacctagctctttgcagtatgattctgactgaaatggaaactcatgaggatgcatggccttttctacttcctgtaaacttgaaacttgttcctggttataagaaagttattaagaagcctatggatttttccacaattagagagaaactaagtagtggacagtacacagtaggtgtatatatttatggactacatgagatacaggcatgcaatgcataataatcacatcatggaaaattgggtattcatcacctcaagcatttatcctttgtgttacagataatccacttctactcttttacttattttaaagtgtacaattaaactatgattgactat

SEQ ID NO: 8564 - protein, 99 aa, Homo sapiens
MEENTSINLSKQESFTSVKKPKRDDSKDLALCSMILTEMETHEDAWPFLLPVNLKLVPGYKKVIKKPMDFSTIREKLSSGQYTVGVYIYGLHEIQACNA

SEQ ID NO: 8565 - DNA, 470 bp, Homo sapiens
tgtttccctgaagaaaagaattgattcttaaataacttagagttctttctttcgtctttacctttatgcttagactactcaaggccttattaattccacacaaataaattacgtttcttctatggtttttcactgcttcctaaaacatctatgaatctgcagtttcataatgtgctggaatacagggtctttctcaattcagattggaatttactataattttttttttttttttttttgagacagagtctctgttgcccaggctggagtgcagtagcagaatctcagctcactacaacctcaatctcctgggttcaagcagttctcctgccctcagctactccagaggccaaggcaggatcatttgagcccaagagttcgaggctgtagtgtgctgtgattacacttgagaacagccactgcactatagcctgggcaacataatgagaccttgtctgtaaataaaactg

SEQ ID NO: 8566 - protein, 65 aa, Homo sapiens [sequence omitted]

SEQ ID NO: 8567 - DNA, 528 bp, Homo sapiens
ggtgtgattagggcttactgcaacctcgacctaccaagctcaagtgattctcccaactcagcctccaaattagttgggaggctgaggtggaaggatcgcttgagcccaggagtttgagtccagcatgggcaacatagtgagatcctgtctctaaagaaaataaaagaaggtgctcaataaatattccttgataacgaaataaaaggatgaatttaattctttcactaacagtattccttagagaactttccaaaacatgtaactgtagctcatctgtagttcatttttgtgatcagctgcacaattttgttatataggtatatcataatttatccaaccagtcctttattaatgtttgacatagccctcatatccttctcttcaaattagtttctagttgaaattaaatccctatacatcagatttatacttctgaccaatatagagtaacagggactagattaccttcttgtatgaaacaaccagaaacagataaaatacatgaaacaacagtttgcaggaaactga

SEQ ID NO: 8568 - protein, 36 aa, Homo sapiens
MNLILSLTVFLRELSKTCNCSSSVVHFCDQLHNFVI

SEQ ID NO: 8569 - DNA, 556 bp, Homo sapiens
gacctggatcacatacagcagctgagaggagcctcacaagcaagtcttgtacttcacccatgctgtcccctatatttagcaatccctcttgaagaacactcagcctcactgtatgacacacctgtgtggagaagacagcatagcccctttgaagttactgcttggatgattaatgacgatgaagcaacaacaaagccaagacgggcatgtacactagcctgtgcatgcaaaacaggtctcaaagtcatgcaacagcaccactacaacttgcaaataatgtcagacttgaaatgaagctacatgtctcacaagtggcaacttttaagtaatcctgaaagcattaagaagcaatgaaggcaaatcttattttgtataacttgaatttaattttctactaatattttacatgtttaagaaaaacaagcttttattaaaatttgaacattcgagcaatatacttcattgactgatacattaatttaaaaattctgaaaattgttcaagatatcaacttatacaaagtctaccaggatattaaagtacttacacaaattta

SEQ ID NO: 8570 - protein, 42 aa, Homo sapiens
MINDDEATTKPRRACTLACACKTGLKVMQQHHYNLQIMSDLK

SEQ ID NO: 8571 - DNA, 283 bp, Homo sapiens
tgggctcacaggtggaatcttaaaggcacagtatgaaaataagcagtggcaacttttaagtaatcctgaaagcattaagaagcaatgaaggcaaatcttattttgtataacttgaatttaattttctactaatattttacatgtttaagaaaaacaagcttttattaaaatttgaacattcgagcaatatacttcattgactgatacattaatttaaaaattctgaaaattgttcaagatatcaacttatacaaagtctaccaggatattaaagtacttacac

SEQ ID NO: 8572 - DNA, 6500 bp, Homo sapiens
cggcggggaccgagagctgcgggcgggctggaggtaccccaccgcggggtggtgctctgactgcgggaaccgttgaagagctgcccccggggagtcagcgaggcgccactggtctcttagacatcttctcaagattatgctaagagaaatgactgcacccttttcctgagctatggcagtcagacctggcagtggtaactactctacagaactcccaaacctggcaaggatggtgcagattttggcagattatggctttgtccccacccagcactgatgatattataaaacctatactacaagaaatgataatggaagttcttcaactgagcaagaaatgatattaacagaaaacttggatcttcagaagcaaatgaagaacatcagaaatgcaactttcattgttagagagaggagagagagagaagccttgttggttgacgtcacttggttcatgaagccttcgcctagaagtgaagctgctgaacaaaccttgagaagaatcatctcctgcttcaatctgctgctggataggaactaatcagagagagagaggcggaagacggagaaggagggagtcgaaggctttcccgatcacaaatctcacctccactacaactctctttatacttttcttgcagaaataataatagaaataaggaggtggtggggtttccaaaaatcttaaccttcaaccatctggggaaaaggcaaaaatcccatctaccgcaactctcagttcgagagtaaaggtttcccaacagtgatgtcacaagattgaccacattgatcacaatatggagtctggagaacggttaccatcctcagcagcctcctctactacaccaacttcatcttcgacaccttctgtggcttcagtagtttcaaaaggtggcctttccactggagttgcttcacttagctctacaatcaacccatgtggacatttattcagaacagctggggatcaaccgtttaacctgtccacagtgtcgagtgccttcccaatggtcagccacccagtctttggtctacattcagccagctcagggcattcagaatttggtggtttggggacacttggtacacccacagccttagccgcacatccccaactagcatcttttccagaatggtggcgaacaactgatgctcatactcgtacaggagcaaccttctttccaccattactgggaattccaccactatttgctcccccagcccagaatcatgattcttcttcattccattcaaggacttcgggaaaaagtaatcgaaatggtcccgaaaaaggtgtaaatgggtcaataaatggaagtaatacatcatctgtaattggtatcaacacatctgtactatccactactgcttcaagttccatgggacaaactaaaagtacaagctcaggtggaggaaatcgaaaatgtaatcaggaacaaagcaaaaaccagcctttggatgctagagttgacaaaatcaaagataagaaaccaaggaagaaagcaatggaaagttctagcaacagtgatagtgattcaggcacatcatcagacacctcaagtgaaggcattagtagcagtgattcagatgatctagaagaagatgaagaagaagaagatcaaagtattgaagaaagtgaagatgatgattctgattcagagagtgaagcacaacataaaagtaacaaccaggtgctattacatggtatttcagacccaaaagcagatggacagaaagcaactgaaaaagcccaggaaaaaagaatacaccagccattacctcttgcgtctgaatcccagactcactcattccaatcccagcagaagcagcctcaggttttgtcacagcagcttccatttattttccaaagctctcaggcaaaggaggaatctgtgaacaaacacaccagtgtaatacagtctacgggattggtgtccaatgtgaaacctttatctttggtaaatcaagccaaaaaggaaacttacatgaaactcatagttccttctcctgatgttcttaaagcagggaataaaaatacctctgaagaatctagtttattgaccagtgaattgagatccaaacgggtgagttacaaattatttatacaagaattttactattagagaaagatagagcttctatattgtcttacaatacacaagtttaagttaaattctaccttcatttttatactttcttagtctccaggaatagaatatgtacagcagaaaactaaatttctctgattttatattcatatatgtatctgtttaatgtatttttggcaatgcaatcatgtcattccagctccctgaaaccccatctttactaaaaatataaatattagctgggcgtggtggggtgtgcctgtagttgcagctactcaggaggctgaggcaggagaatcgtttgagcccaggaggtggaggttgcagtgagccaagatcgcgccactgcactccagcctggcaacagagtgagactctgtctcaaaaaaaaaactaaaaaaaacaaaaacattagccaggtatggtggcacgtgcccatagtctcagctactcaggaatctgaggcaggcttgaacccgggaggtgggggttgctgcgagccaagatcgtgccactgcactccagcctgggtgacagagtccaaaaaaataataataataaaatatttataagtattttatataacattccatcagcatttacacttgtgaaatctccatcacaaatctttgctgattttagtgttaggagcccaggtctgatgctgacaacactactgattttaatttcaaggcaatcattttcaatgcagaattttaccttagattaagaaattcagctccttctgttaactcaaaggattttaataattctgctgctgttaatttttatgtaatattttaattatagtagcttaataaaattcatgattgtgttgttttcaaggggattctaatagttaaataagtttttgtttatagacataaattttatggcttaatagtttataatcttttccaagaaaattgtatttttctaaattgtttactcgggaatattactgtgcaaaggcacactaaagtagatcccacagaatgttgaatgtccatttccaccagcttagtatcttaaatctttgcttcaaagaagttcttgctcaggaagttattcattcagcaacctaaaattgttttttgagtacatatcaagcacagggttctgagcaatgtcttaggaagaccataaaggtgaataaatgagtgtttctaccctgaggaatttatcaaagatgttaagttatctccttagaggtataagtcatataggcatattctatgtatactaaaggtggtatggcataagagtacatatagtcaccaacttagaattgtttgacttggccgggcgcagtggctcacgcctgtaatcccagcactttgggaggccaaggcaggtggatcacgaggtcaagagatcgagactatcctggccaacatggtgcaaccccatctccactaaaaatacaaaaattacctaggcatggtggtgcatgcctgtagtcccagctacttgggaggctgaggcaggagaatcacttgaacccaggaggcagaggttgcagtgagccgagatcgcgccactgcactccagcctggtgacagagcaagactccatctcaaaaaataataataataataataataattctttgacttatgatctttcaacttcacaatggagcgaatgctatacacattcagtagaaattggtacaataatcccttgatgctgagcagcagcagtgagccacagctcctggtcagccgcatgataacaagggcagacaactgatactctacagtttactgtgttgataggttattttgctcaactttaggctaatgtaagtgttttcagtacatttaaggtagtttagactaagctatgatgtttggtaggttaggtgtattgtatctatttttgacttaatgatattttcaactttcgatgagtttatggggaagtcaccccatggcaagctgaggagcatctatataaagaggtaaaagagctcaaaggaaagaggcaaagaatgcttctggctgggaaatttggaaagcttcttggtttggatcttgaagaataaacagtattttgtcagcttgaaatttctaagaggaggctatttcatgcaaagaaaatggttttaagtttggattattgtgaaaatggaagcaacagtaaagaggggaggctagtcaaaaggcatataatttttaatggggaaaaactaaataaattttaataaattagagccaaaatgtagcaaccaactagtcatagctgttgctacttttacagcatttgtatatcatgatttaaatttatatatgatataatagctataatttgttttcagatattgaaagcaaataaaagcaatctttgttttgtggtacattttgttgtgttttttaacttatgtttcaacaggaacaatataaacaggcattcccatcacagttaaagaaacaagagtcatcgaagagcctgaagaaggttattgcagctttgtcaaatccaaaagcaacctctagttcaccagcacatccaaaacaaacattagaaaacaaccacccaaatccattcttgacaaatgcacttttaggtaatcaccaaccaaatggagttattcaaagtgtcattcaagaagctcctctagcacttactaccaaaactaaaatgcagagcaagattaatgaaaacattgctgctgcaagtagcacccctttttcctcacctgtaaatctgagtacaagtgggagaagaacccctggcaatcagacacctgtaatgccctctgcctctcccatcctgcatagtcaagggaaggaaaaagcagttagcaataatgtaaacccagtaaaaacacagcatcactcccatcctgcaaaatctttagtggaacaattcagaggaacagattcagacattcccagtagtaaagattctgaagattcaaatgaggatgaagaggaagatgatgaagaagaagatgaggaagatgatgaagatgatgaatctgatgacagccaatcagaatcagatagtaattcagaatcagatacagaaggatcagaagaagaagatgatgatgataaagaccaagatgaatcagatagtgatactgaaggagagaaaacttcaatgaaactgaataaaacaacttcctctgtcaaaagcccttccatgagtctcacaggtcactcaacacctcgtaacctccacatagcaaaagccccaggctctgctcctgctgccttatgttctgaatcccagtcacctgcttttcttggtacatcttcttccacacttacttcaagcccacactctggcacttccaaaagaagaagagtaacagatgaacgtgaactgcgtattccattggaatatggctggcagagagagacaagaataagaaactttggagggcgccttcaaggagaagtagcatattatgctccatgtggaaagaaacttaggcagtaccctgaagtaataaagtatctcagcagaaatggaataatggatatctcaagggacaatttcagcttcagtgcaaaaataagagtgggtgacttctatgaagccagagatggaccgcagggaatgcagtggtgtcttttgaaagaagaggatgtcattcctcgtatcagggcaatggaaggtcgtagaggaagaccaccaaatccagatagacaacgagcaagagaggaatccaggatgagacgtcggaaaggtcgacctccaaatgttggcaatgctgaattcctagataacgcagatgcaaagttgctaagaaaactgcaagctcaagaaatagccaggcaagcagcacaaataaagcttttgagaaaacttcaaaagcaggaacaggctcgggttgctaaagaagccaaaaaacaacaagcaataatggctgctgaggagaagcggaagcaaaaagaacagataaagattatgaaacagcaggtatgtgtatacattggaagtgacttttaaaatatgggacttattttgaggatttgttagtaatgtacattatttttgatttcttaaataactatatttcacattaatatttgtgtcttatttagaaagttgctatcttctattaattaaaattttacctttttaataaagtcttctacttccaagtgtttaaagaaatgattaccaaacagtaaatttgtgtaagtactttaatatcctggtagactttgtataagttgatatcttgaacaattttcagaatttttaaattaatgtatcagtcaatgaagtatattgctcgaatgttcaaattttaataaaagcttgtttttcttaaacatgtaaaatattagtagaaaattaaattcaagttatacaaaataagatttgccttcattgcttcttaatgctttcaggattacttaaaagttgccactg

SEQ ID NO: 8573 - protein, 526 aa, Homo sapiens [sequence omitted]

SEQ ID NO: 8574 - DNA, 598 bp, Homo sapiens
gatctcactggaatcaagattaaagttagattttaggttggctaaggaaggtgagcctgtattttcaaaggatatgactcattacctggtcttttttttccccccgagtttccagtttaaggatctgattgatgatagttcctttggttttgaacctttctgcttttgtgttcagtttgtgcttctagaatatagaatttaattgacagttggatgtactttataaaaaagctcacttggttacttaagatgctatctgcccaatatatagccagtgtcttttctattagagagtagcattcttattccattaacgtgccatgtccttttttttcccatttgactttttataaattcctagaggtcttcattaaacatttatacacttaatattccacaactactctcagttctcattcaatgtctaagaaaatatagatgtatatagtaaaatattttgttgttttacttatttcactctcctcttgtcagtttctagctttactttcatttaccacataccaatatgatagcctactaattttagatgaacttatttgtgtttgtgaaacttgatctcggtcttagaaaattttta

SEQ ID NO: 8575 - protein, 45 aa, Homo sapiens
MYIVKYFVVLLISLSSCQFLALLSFTTYQYDSLLILDELICVCET

SEQ ID NO: 8576 - DNA, 467 bp, Homo sapiens
gagtaactgagagagagagaggttgtgttaggtagattttaggtgtttcaacaaatagagcattgtaaatgcttacttggattatgttttcatgatagcttttgataaaagacatatgctgacccttggggtcagcaaagctaggacacaatagtaggtattctttcatgccttttaactgaaaaatatcacggcttgttgttttggagtgctgtcactgctctgaatcgaaaggataatggctacttcctgattaaacccactctccacaatatggagtctggagaacggttaccatcctcagcagcctcctctactacaccaacttcatcttcgacaccttctgtggcttcagtagtttcaaaaggtggcctttccactggagttgcttcacttagctctacaatcaacccatgtggtgcagaatggtggcgaacaactgatgctcatactcgtacaggagcaac

SEQ ID NO: 8577 - protein, 63 aa, Homo sapiens
MESGERLPSSAASSTTPTSSSTPSVASVVSKGGLSTGVASLSSTINPCGAEWWRTTDAHTRTG

SEQ ID NO: 8578 - DNA, 6818 bp, Homo sapiens
agagagagagaggcggaagacggagaaggagggagtcgaaggctttcccgatcacaaatctcacctccactacaactctctttatacttttcttgcagaaataataatagaaataaggaggtggtggggtttccaaaaatcttaaccttcaaccatctggggaaaaggcaaaaatcccatctaccgcaactctcagttcgagagtaaaggtttcccaacagtgatgtcacaagattgaccacattgatcacaatatggagtctggagaacggttaccatcctcagcagcctcctctactacaccaacttcatcttcgacaccttctgtggcttcagtagtttcaaaaggtggcctttccactggagttgcttcacttagctctacaatcaacccatgtgatccaacaaaaattatcacagaagaggaactgtccttatcttttaagaatagtcatttgcctgagtattggtgcatcatttcttgaacaaagcttattcggcatgtttgatgttattaaatggcagcttttcttcccaaagctaccgcggctcccagtgacttgttttctaataaaaatgccttttgaagagaaaatggtagttttacagtggcgagtcctggcagataccagcttaaccaagtgatcgaagttaatgtcaccagaactacatagcaacattatgggccctagataaattgctctgagaagggcacattgaccatcttttctaataatgcatcacctcttctaatcatgagaacacatcagacaaactcaaccagagggacattttacagaatacctctgaccagtacacttcagtgtattaaagtcataacaaacaagactgaggaaataacacgactgtacaaaactagggagacacaacacctaaatgtaatatgagatcctggattggatcttgggacagagaagtgacattggtgggaaaactaattaaatctgaataaattctttattttaattagttaatcaaggttaatttcttagtttggaaagttgttctttagtcatgtaagatgataacataaggagaagtaaggttgggtagacagtatataggaactctgtgtactatttttgcaactcttgtgagtcaaaataatctcaaaataactacttaaaaataaaaataggctgggcgcagtggctcacacttgtaatcccagcactttgggaggctgaggtgggcagatcacaaagtcaggagtttgagaccgaactggccaacatggtgaaaccccatctctactaaaaaatacaaaaattagctgggtgtggtgatgggcgcctgtaatcccaactactcaggaggctgaggcaggagaattgtttgaaactgggaggtggaggttgcagtgagcggagatcgcaccattacactccagcctgggcaacagggcaagactctgtctcaaaaaataataataataaaacccaatctgaatagacttttctcaagaaacatataagtggccagcagatatatgaaaaaatgctcaacatcactaatcattagggagatgcaaattaaaatcacaatgagctatcatctcacacctgtcagattggcttttctcaactagacaaaagacaagtattggcaaggatgtggagaaaagggaacgcttgtacactgttaatggggatgtaaattagtacagcctttatagaaaatagtatggaggttcctcaaaaaactaaaaatagaattaccatataatccagccatcctgtttgtgggatttacccaaaggacttgtaaacagtttgtctaagagatgtctgcactcccatgttcattgcagaacgattaacaatagacacgttaaggaatcgtcttttttaagtgtcaaaatataaatgttgagaacagcccaagatggccaacttcaatgattgtgtgttggataaggagaaggtatgcatagctgctaaattcatcactcatgcacccgcaggagaatttaatgaagtattcagtgatattcggctactatgtaataatgacagtctcctcagggaaagggcagcacgtgcatttgcccattataacatggatcagttcacacccgtgaagatggaaggatgtgaagatcaggtcataattacagagcatgggggacctgggtaatagcagagttttagatccaagaaacaaaatttcctttacatttgatcacttatagaaaaaagcaagtgacccccagccaaaacaagtagatggaggtctgaagtcttggagagaatcctgtgacagtgctttaagagcctatgtgaaagaccattattccaacggcttctgtactgtttatgctaaaaactatcgatgggcaacagactattattgcatgtattgaaagccatgagtgtcagcctaaaaacttctggaatggtcgttggagatcagagtggaagtttaccatcacaccacctacagcccaggtggttggagtgcttaagattcaggttcactattacgaagatggcagtgttcagttggttagtcataaagatgtacaggattcgctaactgtttcgaatgacgcacaaactgccaaggagtttattaaaatcatagagaatgcagaaaatgaatatcagacagcaattagtgaaaactgtcaaacaatgtcagataccacattcaaggtcttgcgccggcagcttccggttacccgcaccaaaattgactggaacaagattactcagctacaacattagcaaagaaatgcagaatgcctaaaggctgaatgtaggattcttcagtatgtggaaagacaaggattcaacatgtggtcatatgataaataagtgatttataaacaagagtgatattttgctagagctttcaaagttaaccagttttctaacctcatggaatactgttgaacctatagcattgtctgattcttttgtgttctctgctttgtaattttctgttattgctatatccaagtgtaagtcttttttttttaattctgccacatttaatgttggagagagagatctatcctagagacattttactgtttaaaaaagtttcctagccatgaagcgctgctactgatttagacaaggtatatggtcattactttctacccctatccttccaagcacttctgatactgcagtggtttttactgatccaccagcacctaaagaggctgtactacagtctatagctaagtggaaggcacattcatccttctccctctgactgctttgatcatcatttattgcatcgcagaactgtaattttccaaagtttggattgggacttttcaggtcctttttggagggcaaaggaagtgtcagcttctctggggaacttgtttttaaatccaaagacttgaaccacattccctgcacttgaacacgtttgctttcatcccttctctcattgtctccttcccatcttagtaccattgtagttatagacatctgcatttttagaagagttttagccatttatttttttaaacagtcaagaactgctgacatactgtggatatagagtataaaacttgaaaaatgcagatgttgaaggaataacaggtatcttgtgctttaatactttatggcaggattgtactataagcaaatgaattaaacagctatgtaaatcataaacaaaaactgaaaatgaaccaaaatgaaaaggataacttccaggcagtatctttctattgtaacctgttatttaaggaaatactaacgatttcttctaaataggatgtaaaacttatttcagattactcttcctcagtcctgcctgccaagaactcaagtgtaactgtgataaaataacctgtcccaggtatattggcaggtatgtgtgtaatctcagaatacacaggtgacatagatataatataacaactggtaatggtggattcatttacattgcttacagttctatgaccaggccttaagggaaggtcagtttaaaaaaaaaacaagtaatgtcttcctgcctatctccacatacatgtaaaaaaaaaacgtgtttgtgcttcagttctgtttttgctcagtaatatagtcaaggaacagtttgtttccaagtacccattgagctgtgtatgcatttttgtttatttcaaataaaatatatttgtattatttgtcatccatactatccatccataccacactatcttctgtatgagatagtctaatagaaatatacctgttttgttctaaaattatatataaaggttaactggctcaaagcatttttagaatgcaagagtgaaatgagaattacttggagagaaatgttttgtcaccagtaactgtagacttctttctgttcttaatcaaagttcaagtttacagaatttggacattttgagttcagaaatatttaaacattaatatacttaagaattttaatatgtgagccagtaatttgaatattgctttgatttacagtaattttgatgatgttctttttgctattacactaagttattactgatattaattaaagtcctcataacaactttatttgaatataccaccatttttaatgaatagccatactttgcaagatgtacattagatcctgatttttaatgttgcaaatttatgcttaccattttgaacaactggagacaaaatttgaagacatgatataacaattttgtgtagcattgaaagattaaaagacacttttagcacacagaaaaacgtgaagttatgtcatggtaagcaattttcttgacttttaaaaagattgagtgctttaacatacttagttcttacaattattttgttttatttgctttctggacttttccttagtgatgggagattttgttcactggtagtttagagtcaaggcattagttcagtacaatttcattctgatagggggaaaaccttgttgaattattctttaatattaataaaggcatttgtagttaccatgccttgttactgacacacaccagcatttgtgtactgattttaatcacttttatatgtagtgatttgatttggctagtagaatttgaaaagctttgctgaaaaatattcagctcattgtaatttgagaacataggcattgcagatgtgtattaatttttattatgtaaaatgtatacagttacctatcttaaaatagaaactaaaataatatttacattaataatattgaaactatgtttgaatgttaatatctgcaaaaaattgtggtcttctaaaaatattattttatggtataattcatcagcttgcaaatgttttctctgagcagaactcaaaagttttcatcaagacaggttttgtgagcaatacatctgttgatattaagtatattaatgtaagaaacattttcttttctaaaagtgaaacattctactatccaggtaattttgttttgtacttataaggttaatagagcctatttgacttgagctgtatttcattttgtgaaagtatctttctgcttttttattaatactgaatatgctttgttttaaatgtaattataggattgactgagccatcatcagtctatgatcaaaattttcctagtgaacagtagtttgaaatgttaagatagttgaagactaaaggcattgtcctggcaatggagccaagggtgtaaacaaaacagcaatccctgctgtataaaaagattaaagccacaaagtgacatcattctaaatacctagtgagcttttactaaccttgtgagtgacttttgcaattggagcaaagtgacatgttatattttaatcatttaaagaataatttccggttattctagccttttaaaagaagagtgaaacaaagaattgaaaagtactgttttgaagatgcctatagcaggtattatgaagtgttgcctctgccaactgataacagtttgctttgtgcaatgttttgtaaagagtaaaaatggctgtttccttcataacttttataccctagtaatggtctgataaaggacaaattgccaataatctatcatgaacaatgaaaagaggccccaaatataactgtctggagattcaggaatacttcttgagcaataggttcttgaaatagttagtaaagaatataattataaagggcagaaatcaaagagcatgttatataggctttggaggttctcaagtggaagaaataatgtgaccaaaaatacagcagtgagaaacaatttattaaattcttattgtgtttcagattattggaaatcctgagctaaataagatgcagtttttgcctcaaagatctaaaatcctggcttataattcatttgcatagaggtgatagtttaaacagtataagcatgtgaaatactgaaggagaaagcataagagaaggaaagagatagctggacaaaatctttaggaatcttttacatttagggggaaaaaagcaaaagaaaatccaataaaggagatagtattattgaaagatgtatagttaagaagaggatcaagagggttccacgacctagatcttaaggatgataatgggttttgaaaagaaaggaccaggccaggcgcggtggctcacacctgtaatcccagcactttgggaggctgaggcgggcagatcatgaggttaggagatcaagaccatcctggctaacacggtgaaaccccgtctctactaaaaatacaaaaaattagccgggcatggtggtgggtgcctgtagtcccagctacttgggaggctgaggcaggagaatggcgtgaacccgggaggcggaggttgcagtgagccgagatcgcaccactgccctccagcctgagcaatagagcgagactccgtctc

SEQ ID NO: 8579 - protein, 76 aa, Homo sapiens
MESGERLPSSAASSTTPTSSSTPSVASVVSKGGLSTGVASLSSTINPCDPTKIITEEELSLSFKNSHLPEYWCIIS

SEQ ID NO: 8580 - DNA, 666 bp, Homo sapiens
gcagagagcagaccaacccagtagtaaggaagatatgatttgctacaacctatttacctgacatgaaaaccagaatgcatcattgttacattttattagtgttcaggctggatattataccatggtagcatgtcgtttgacatcactggtagatcttgttttttcttgtataataaaataagagataggacatttcctttgtatcagttttgctgtctttcctctgcaccagtaacaaaaagtaaatgttctaaaagtatgcaaatatgaatctaaattgatgcaaactgaatgtgaagacagagtcacatttatctactacggttagaaataccaaactggggaggattaaacatcatcatagattggactcccagctgttgtaatgggcaggatcatagaaggaagatcaccaacgaaaagaggaactcatttcagttaaaaagaaaggtcccttggccagtctcagctactgtagttgggattacagtcatgcctcaccatgcccggctaattttgtgtttttagtagagatggggtttctccatgttggtcaggctggtctcgaactcccgacctcaggtgatccgcccaccttggcctccaaagtgctgggattaaggcatgagccaccgtggctggctttttttttttttttttcctgca

SEQ ID NO: 8581 - protein, 46 aa, Homo sapiens
MSFDITGRSCFFLYNKIRDRTFPLYQFCCLSSAPVTKSKCSKSMQI

SEQ ID NO: 8582 - DNA, 741 bp, Homo sapiens
tttccactcacagtccaattatgctcacaattcagccagcaaggaggaagggggcgaaaaagaggatgtgcacccattcctttaaggatacatcctgaaagttgcacacactacttctgcctatatatctcttgccaaaatttagccagattactatacctagctgcaagggagactggggaaatgatgtttttattctaggtagtgatataccggaaaaaaaattagaagagggggaaaaccagtattagggacaactatcaatcatgccatacttggttatatcttctctgtggtaggtacctgacattttaaatttactagctaacaccagtatttctgacagtatgtacactataaagttatacagcaattccttctacatctcaattattaagtattactattgggagaggtgtatctctacaaaatttaagtaatattcataataaaattaccaaagagaaaaatagaaaaaaaaatttttttgaggcaaggtcttcctctgtagcctaggctggagtacaatggtacaatcttggcttactgcagccttgaactcctggactcaagcaatccttccacctcagcttcccgagtagctgggatcaggaggctgaggcaggagaatggtgtgaacccgggaggtgaacctggcagtgggccaagactacaccactgcactccagcctgggtgacagtgagactcagactcaaaaaaaaaaaaaaaaaaaaaaaagt

SEQ ID NO: 8583 - protein, 30 aa, Homo sapiens
MYTIKLYSNSFYISIIKYYYWERCISTKFK

SEQ ID NO: 8584 - DNA, 935 bp, Homo sapiens
gggagtcgaaggctttcccgatcacaaatctcacctccactacaactctctttatacttttcttgcagaaataataatagaaataaggaggtggtggggtttccaaaaatcttaaccttcaaccatctggggaaaaggcaaaaatcccatctaccgcaactctcagttcgagagtaaaggtttcccaacagtgatgtcacaagattgaccacattgatcacagtaagaccaaaatgatagttaagcttttaaggaagtttggttttctctgagaatgagaattgacttagaaaacatatataatttgaaattattatttcttttgctagccagttgaatgttaacattttaaatgaatcatatcttatacttctagctagttatttaaatacttttaaaatattactttaaaggatttaaaaaacatttaaaatgaaaattacttttaatttacaactgaaattacaggcctaaatatactaaattatttcagtgtgacttaaattctgaacgtcatcttttttgagtttttatttttaccagaaaatgacagaaaggttaaggtgattccacattaggaaatatatataaaagtaaattacttgagattgtaatgaattattaaggaaagattatgaaaatgtagccttggtaggctgggcgcggtggctcacgcctgtaatcccagcactttgggaggccgaggtgggtggatcagctgaggtcaggagttcgagactagcctggccaacatggtaaaaccccgactctactaaaaatacaaaaatagctgggcatggtggcacacacctgtaatcccagctactcgggaggctgaagcaggagaatcacttgaacccgggaggtggaggttgcagtgagctgagattgtgccactgccctccaacctgggcaatagagagactccatctcta

SEQ ID NO: 8585 - protein, 35 aa, Homo sapiens
GGGGVSKNLNLQPSGEKAKIPSTATLSSRVKVSQQ

SEQ ID NO: 8586 - DNA, 599 bp, Homo sapiens
agggaccctttccttttaaataggttgtacattactgactaaagctaagatttatattcagacattatgctttctcaaccctttttacatagtagccatacaactccttaaaaagaaaatcattctgttacctttgactatgactcaatatttaagaaatgtatttactcataacatatttttgttgaggtagatattcatataaatcaaattaaggaacattgaattgtgtatgaaatgtgaacttttttttaaaggactcctgatgcttagtttatctttagagataatatagtcttaattgtactacacataaacatcctgtagtttaagtaggaattttcaggcatcagatttctagaaggaaggtaattctcaatagaaaggtcattttaaaagttcaaactttgatttacagttttttctgttgaccgtattaagtatgaaattatgggtaataaatatatttaattcattttcaactgcatattgagttataaaatattggccacatttttctcctcttaacacttttccacaaacatgcactcattaatcaaagacggtgcactcctgctgagggcagagaggttcatcaa

SEQ ID NO: 8587 - protein, 32 aa, Homo sapiens
NIGHIFLLLTLFHKHALINQRRCTPAEGREVH

SEQ ID NO: 8588 - DNA, 1489 bp, Homo sapiens
aagaagattaaaagagggaagcagaggagttgggagctggcggtcgttcccggggaagaactgctaaaacatgagaccaaggcacagaccttactgtatgagaagcaatgctcctcaaaccttctgcgtgctgacatagaccttcccagaagcaaaactgttggcggcgacctgagcgctggaagccgaaggggaagaggaaggagacgcgaagccagggcggccggcacaaaggcggcggactcgcggcggcagcgcctgcccggccgggagcacaacccacggccctactccagcgaagtcccgcaccggcttctaggaataaagtttacgttctcctgaggccgcaccccccacctcccacccaggacggcacatctccgtgtcctcctcccccaaactccactcgggaccccgagaaccaccccagccttccggccaccacaacaaagagccgcaccgaccggcgaggataaacagcggcggagggcgagagggcggcggggcgagcgcctccacgcagcaactccggagtcccccgcttgcccgagcgcagtttctccgctgctgtttccaccggctttgtaacactgggaatttacatcctcacccgcacccctcacgcccgaggattttaaactcacctttactctcgaactgagagttgcggtagatgggatttttgccttttccccagatggttgaaggttaagatttttggaaaccccaccacctccttatttctattattatttctgcaagaaaagtataaagagagttgtagtggaggtgagatttgtgatcgggaaagccttcgactccctccttctccgtcttccgcctctctctctctgattagttcctatccagcagcagattgaagcaggagatgattcttctcaaggtttgttcagcagcttcacttctaggcgaaggcttcatgaaccaagtgacgtcaaccaacaaggcttctctctctctcctctctctaacaatgaaagttgctgttaacaagggaaaaaaagagagagaattgtttataccatttcagttccaataataaatgacctatcagctcctaaaggagccaagggagggggttgcttcttctttccaagaatactgtagctttgagtttgcaccgttccttgtcccaggaaaaagttaagaaacttaaaatgttttgttttgcttttaaagaagacaggacagaaaacgggatttaaaacttagtttttaaaaaaacaaaagctacagagtagggagcataggtcaaccatctccacctaaattttttttgttcctaaactcagaattctacaacccaactaaattaatatgccaagattttgcggatgttaaaactcaaaaaaagcagtatgcaagacggtcccggggtaaaattctactgcctttccacggacaagttaaactggctgtaatgtttatgcactaagttaaaataaaatttaaataaaagacgttaaaa

SEQ ID NO: 8589 - protein, 56 aa, Homo sapiens [sequence omitted]

SEQ ID NO: 8590 - DNA, 521 bp, Homo sapiens
cccgcttgcttccctgcccgccctgtgtgatctaactgcaagccctttcccttaagagttggagcctgtttgtccaaccttgtgatcatttccttgtggtctcttagacatcttctcaagattatgctaagagaaatgactgcacccttttcctgagctatggcagtcagacctggcagtggtaactactctacagaactcccaaacctggcaaggatggtgcagattttggcagattatggctttgtccccacccagcactgatgatattataaaacctatactacaagaaatgataatggaagttcttcaactgagcaagaaatgatattaacagaaaacttggatcttcagaagcaaatgaagaacatcagaaatgtagcaacagctgctgagaagagatgactaaaagctgaaaagtgaagaattaacactgatttcttggcagaagcagaagcttcaggactcctgaattgagggaatgatctaaattccaaggattatctctcagtgagaacaag

SEQ ID NO: 8591 - protein, 34 aa, Homo sapiens
MAVRPGSGNYSTELPNLARMVQILADYGFVPTQH

SEQ ID NO: 8592 - DNA, 456 bp, Homo sapiens
ggacttcctggcttctcgcgagagtggcggcgcggcggggaccgagagctgcgggcgggctggaggtaccccaccgcggggtggtgctctgactgcgggaaccgttgaagagctgcccccggggagtcagcgaggcgccactggtctcttagacatcttctcaagattatgctaagagaaatgactgcacccttttcctgagctatggcagtcagacctggcagtggtaactactctacagaactcccaaacctggcaaggatggtgcagattttggcagattatggctttgtccccacccagcactgatgatattataaaacctatactacaagaaatgataatggaagttcttcaactgagcaagaaatgatattaacagaaaacttggatcttcagaagcaaatgaagaacatcagaaatgacggagtctcttgctgtgttgcccagactgga

SEQ ID NO: 8593 - protein, 34 aa, Homo sapiens; identical to SEQ ID NO: 8591

SEQ ID NO: 8594 - DNA, 532 bp, Homo sapiens
atggatcttacttgtaacaaaatgtgttctatggtcaaaaaatggcagacaatgatcgaagctcctgttgatgtcaagactactgatagttacttgcttcatctgttctgtgttgactttactaaaatacacaacaatcagatatggatgacctcttatgctcagtaccagcaattctgccaaatctggaagaagatgatggaaatcatgacccaagaggtgcagacaaatgacttgaaagaagtggtcaataaattgattccagacaacattggaaaagacatagaaaagtcttgccaatctatttatcgtctccatgatttctttgttagaaaataaaaatgctgaagaagcccaagtttgaattgggaaaactcatggagcttcatggtgaaggtagtagtactggaaaagccactggggatgagacaggtgttaaagttgaatgagttgatggatatgaaccaccagtccaagaatctgtttaaagttcagacttataatagtggcaaataaaaagtcctatttgtga

SEQ ID NO: 8595 - protein, 112 aa, Homo sapiens
MDLTCNKMCSMVKKWQTMIEAPVDVKTTDSYLLHLFCVDFTKIHNNQIWMTSYAQYQQFCQIWKKMMEIMTQEVQTNDLKEVVNKLIPDNIGKDIEKSCQSIYRLHDFFVRK

SEQ ID NO: 8596 - DNA, 2522 bp, Homo sapiens
gagtggcggcgcggcggggaccgagagctgcgggcgggctggaggtaccccaccgcggggtggtgctctgactgcgggaaccgttgaagagctgcccccggggagtcagcgaggcgccactggtctcttagacatcttctcaagattatgctaagagaaatgactgcacccttttcctgagctatggcagtcagacctggcagtggtaactactctacagaactcccaaacctggcaaggatggtgcagattttggcagattatggctttgtccccacccagcactgatgatattataaaatatgacaccttcaagtataagcaaccaaagaaaactagataaattggacctcataaagtaaaacaaacaaaaaccttttgcttcaaaggataccactaagcaagcgaaaagacaacacatagaatgtgagaaaaaggttgtaaatcctatatatgacaaggcacctgtatccagaataaagaacctcttaaaactcaacaataaaaacacaaataatctaattgtaaaatagcttacaatcattattgtaaaattggcaaaggatttaaatagatatttttctaaagaagatataaaaatagtcaataaatgcataaaaaatagacaataaatatatgctcagcctcagcagtcattagggaaatgtaaatcaaaaccacaagggaagtatttattcacacacactaatatggctacaataaaaaacctagacagtaaaaaatgttgatgaggatgtagaaagttggtacctgcatatattgctgttaggaatgtaaaatggtacagctgtttgggaaagcagtttagcagtcctcaaaagtttaattatagttaccatatgactcagcaatatcgttactaagtatatactcaggaggactgaaaacacatgtcacacaaaaccctatacacaaatgttcatgtcatagtagtcaaaatgtggaaacaactgaaatgtgcaacaatggatgaatggataaacaaaatgtggtatatccatccagtggaatattatttagccttaaaaaggaatgaagttctgctgcatgctgcaacatggatgaaccttgaaaacattatcattagagatggaaaccaaacataaaaggtcacattgtattattccatttatatcactgtccagaataggcaaatccatagagatacaaaacagataagtggttcccaggtactgggaaaagcaagaggtaggagtgactgctaatgagtatagggtttctttttgaggtgatgaaaatgttctgcaactagatagtggtgtttgttttatgaacttgtgaatatactaaaagccactggattatatattttatgtatttgtttgttaggactgtcataacaaataatactacaggctggtggcaacagaaatgtattttctcaccgtgtggagtctagaagtccacagtcaaaatgtctcaagggttgttttcattctcaggcctcttttttggcttgtagatggctaacttccctgtggcctcacatggtcaccccttggtctgtgtgttgtctgtgtcctaacctcctcttataaggacaccagtcatattgaattagggcccacatatatgacattttaccttacttgtctctttaaaggtcccatctccaaattcaatcacattctaaggtactagaggtgttaggacttccacacgtgaatttagttggggagggagacacaacacttgaaaacctaggggtgaattttatgatatgtaaattatacctcaattttgaaaaatataagaacctacttttctttccaaataagtttgaaaacttaaatgaaaaaagtaattttcagctgggcacagtagtacacacctgtcagtcccagttactcaagaggctgaggaaggaggattgcttgagaccaggagtttaaggctgcatctgtgaatagtcacggtactccagcctgggcaacataatgagaccccatctcttaaaaaaaaaaaaaagatggtcaggtgcaatgactcacactttgagaggtcaaggtgtgaggatcccttgaatctaggagtttaagaccagcctggacaacatagtgagaccctgactctacaaaaaataaaaacttagccaggtatggtggcacatgcctatggtcgcagctacttgggagactcagatgggaggatcgcttgagccttggaggtggagactgcagtgagccatgatctcaccattgcgcttagcctgggaggcagggtgagaccctgtctcaaaaaaaaaaaaaaaaaagtttatttttaaggcaaatatatttcatcaaaattggccacatttgagaaagtttaatttctgtagaagaaatagaaaagaatatcaaggatccacctcataaaaaagcaccagtcccagatggttttatagagataatctgtgaaacactcaaagatattctcaatgctccgtaaactggtgctgagcattgaacatggataataccaattcctaaagacagcac

SEQ ID NO: 8597 - protein, 71 aa, Homo sapiens [sequence omitted]

SEQ ID NO: 8598 - DNA, 446 bp, Homo sapiens
ggttggctttttttttttttttttttctttttctggctcttggtctcttagacatcttctcaagattatgctaagagaaatgactgcacccttttcctgagctatggcagtcagacctggcagtggtaactactctacagaactcccaaacctggcaaggatggtgcagattttggcagattatggctttgtccccacccagcactgatgatattataaaatatgacaccttcaagtataagcaaccaaagaaaactagataaattggacctcataaagtaaaacaaacaaaaaccttttgcttcaaaggataccactaagcaagcgaaaagacaacacatagaatgtgagaaaaaggttgtaaatcctatatatgacaaggcacctgtatccagaataaagaacctcttaaaactcaacaataaaaacacaaataatctaattgt

SEQ ID NO: 8599 - protein, 34 aa, Homo sapiens; identical to SEQ ID NO: 8591

SEQ ID NO: 8600 - DNA, 2696 bp, Homo sapiens
gaagtggggggaggaggagcagggaggggcacttaacggtggtggctggttctgcgccggatccgggagaggggcgggcgccattgtgcttcgctgccgactgcatttcctcagtcacgggcctagaactccaaggagaaaggcggcgaaaaatctttaagaatggagtctaaaccttcaaggattccaagaagaatttctgttcaaccttccagctccttaagtgctaggatgatgtctggaagcagaggaagtagtttaaatgatacctatcactcaagagactcttcatttagattggattctgaatatcagtctacatcagcatcagcatctgcgtcaccatttcaatctgcatggtatagtgaatctgagataactcagggagcacgctcaagatcgcagaaccagcaacgggatcatgattcaaaaagacctaaactttcctgtacaaactgtactacctcagctgggagaaatgttggaaatggtttaaacacattatcagattcatcttggaggcatagtcaagttcctagatcttcatcaatggtacttggatcatttggaacagacttaatgagagagaggagagatttggagagaagaacagattcctctattagtaatcttatggattatagtcaccgaagtggtgatttcacaacttcatcatatgttcaagacagagttccttcatattcacaaggagcaagaccaaaagaaaactcaatgagcactttacagttgaatacatcatccacaaaccaccaattgccttctgaacatcagaccatactaagttctagggactccagaaattctttaagatcaaatttttcttcaagagaatcagaatcttcccgaagcaatacgcagcctggattttcttacagttcaagtagagatgaagccccaatcataagcaattcagaaagggttgtttcatctcaaagaccatttcaagaatcttctgacaatgaaggtaggcggacaacgaggagattgctgtcacgcatagcttctagcatgtcatctacttttttttcacgaagatctagtcaggattccttgaatacaagatcattgaattctgaaaattcttacgtttctccaagaatcttgacagcttcacagtcccgtagtaatgtaccatcagcttctgaagttcccgataatagggcatctgaagcttctcagggatttcgatttcttaggcgaagatggggtttgtcatctcttagccacaatcatagctctgagtcagattcagaaaattttaaccaagaatctgaaggtagaaatacaggaccatggttatcttcctcacttagaaatagatgcacacctttgttctctagaaggaggcgagagggaagagatgaatcttcaaggatacctacctctgatacatcatctagatctcatatttttagaagagaatcaaatgaagtggttcaccttgaagcacagaatgatcctcttggagctgctgccaacagaccacaagcatctgcagcatcaagcagtgccacaacaggtggctctacatcagattcggctcaaggtggaagaaatacaggaatatcagggattcttcctggttccttattccggtttgcagtccctccagcacttgggagtaatttgaccgacaatgtcatgatcacagtagatattattccttcaggttggaattcagctgatggtaaaagtgataaaactaaaagtgcgccttcaagagatccagaaagattgcagaaaataaaagagagcctccttttagaggactcagaagaagaagaaggtgacttatgtagaatttgtcaaatggcagctgcatcatcatctaatttgctgatagagccatgcaagtgcacaggaagtttgcagtatgtccaccaagactgtatgaaaaagtggttacaggccaaaattaactctggttcttcattagaagctgtaaccacctgtgaactatgtaaagagaagttggagcttaacctggaggattttgatattcatgaactacatagagctcatgcaaatgaacaagctgagtatgagtttatcagctctggtctctacctagtggtgttattgcacttgtgcgaacaaagcttttctgatatgatgggaaatacaaatgaaccaagcacacgtgtccgatttattaaccttgcaagaactcttcaggcacatatggaagatctcgaaacttcagaggatgattccgaagaagacggagaccataacaggacatttgatattgcctaacttcatataagacagatggatgatctgtgaacataagtgtttattaaaaatggcaattaaatataaattacttttgtgggggaatgcctaataaatacattgactatatataaaatgaatatatacatacacatgtatgcctgtatatatatattcattctccagtgttgctgaattaaaattctgctggactttttaacatagcaaatccgatgtttataaactggtaatcaaaaaggttttttcttttaggtgagtgggaaagtattacccttgttttaaatatctaagcaatgcctatcaacccttttttgtgttatgattactgtagtcatatttatgaaaaaaggtttgtgttttactcttgctagtgagaaaagtgggacaaaatatacttttgaaataaaatgctatatggc

SEQ ID NO: 8601 - protein, 704 aa, Homo sapiens; identical to SEQ ID NO: 650

SEQ ID NO: 8602 - DNA, 3518 bp, Homo sapiens
gaagtggggggaggaggagcagggaggggcacttaacggtggtggctggttctgcgccggatccgggagaggggcgggcgccattgtgcttcgctgccgactgcatttcctcagtcacgggcctagaactccaaggagaaaggcggcgaaaaatctttaagaatggagtctaaaccttcaaggattccaagaagaatttctgttcaaccttccagctccttaagtgctaggatgatgtctggaagcagaggaagtagtttaaatgatacctatcactcaagagactcttcatttagattggattctgaatatcagtctacatcagcatcagcatctgcgtcaccatttcaatctgcatggtatagtgaatctgagataactcagggagcacgctcaagatcgcagaaccagcaacgggatcatgattcaaaaagacctaaactttcctgtacaaactgtactacctcagctgggagaaatgttggaaatggtttaaacacattatcagattcatcttggaggcatagtcaagttcctagatcttcatcaatggtacttggatcatttggaacagacttaatgagagagaggagagatttggagagaagaacagattcctctattagtaatcttatggattatagtcaccgaagtggtgatttcacaacttcatcatatgttcaagacagagttccttcatattcacaaggagcaagaccaaaagaaaactcaatgagcactttacagttgaatacatcatccacaaaccaccaattgccttctgaacatcagaccatactaagttctagggactccagaaattctttaagatcaaatttttcttcaagagaatcagaatcttcccgaagcaatacgcagcctggattttcttacagttcaagtagagatgaagccccaatcataagcaattcagaaagggttgtttcatctcaaagaccatttcaagaatcttctgacaatgaaggtaggcggacaacgaggagattgctgtcacgcatagcttctagcatgtcatctacttttttttcacgaagatctagtcaggattccttgaatacaagatcattgaattctgaaaattcttacgtttctccaagaatcttgacagcttcacagtcccgtagtaatgtaccatcagcttctgaagttcccgataatagggcatctgaagcttctcagggatttcgatttcttaggcgaagatggggtttgtcatctcttagccacaatcatagctctgagtcagattcagaaaattttaaccaagaatctgaaggtagaaatacaggaccatggttatcttcctcacttagaaatagatgcacacctttgttctctagaaggaggcgagagggaagagatgaatcttcaaggatacctacctctgatacatcatctagatctcatatttttagaagagaatcaaatgaagtggttcaccttgaagcacagaatgatcctcttggagctgctgccaacagaccacaagcatctgcagcatcaagcagtgccacaacaggtggctctacatcagattcggctcaaggtggaagaaatacaggaatatcagggattcttcctggttccttattccggtttgcagtccctccagcacttgggagtaatttgaccgacaatgtcatgatcacagtagatattattccttcaggttggaattcagctgatggtaaaagtgataaaactaaaagtgcgccttcaagagatccagaaagattgcagaaaataaaagagagcctccttttagaggactcagaagaagaagaaggtgacttatgtagaatttgtcaaatggcagctgcatcatcatctaatttgctgatagagccatgcaagtgcacaggaagtttgcagtatgtccaccaagactgtatgaaaaagtggttacaggccaaaattaactctggttcttcattagaagctgtaaccacctgtgaactatgtaaagagaagttggagcttaacctggaggattttgatattcatgaactacatagagctcatgcaaatgaacaagctgagtatgagtttatcagctctggtctctacctagtggtgttattgcacttgtgcgaacaaagcttttctgatatgatgggaaatacaaatgaaccaagcacacgtgtccgatttattaaccttgcaagaactcttcaggcacatatggaagatctcgaaacttcagaggatgattccgaagaagacggagaccataacaggacatttgatattgcctaacttcatataagacagatggatgatctgtgaacataagtgtttattaaaaatggcaattaaatataaattacttttgtgggggaatgcctaataaatacattgactatatataaaatgaatatatacatacacatgtatgcctgtatatatatattcattctccagtgttgctgaattaaaattctgctggactttttaacatagcaaatccgatgtttataaactggtaatcaaaaaggttttttcttttaggtgagtgggaaagtattacccttgttttaaatatctaagcaatgcctatcaacccttttttgtgttatgattactgtagtcatatttatgaaaaaaggtttgtgttttactcttgctagtgagaaaagtgggacaaaatatacttttgaaataaaatgctatatggcacctaattattttttcttttaaaatgccttaagttgcagtctcattttgataatcatttgcttccagtgtttaaaaattaaaaaaagaatggggagaaggttatgagaagagcattattaagtttccaaatttaatttgaattccaaattcacctagcaataaaatctaatttttaaaaagtatataaatataaaatgtataaatgatggatagatttttgtattgatttgcaaaatgcagattatatttgataggctatagtatgtagatattccttttaggaatattacagctgtaaattatatgagacttgccagtcaaatgctatttggtttaaaaaaattattgcaatctcaagttaatggaatatttttaaatcccacattcagagtttaaaacactggttttcaatgtgttttttagtgttgtcacttgtttatagataaatatataaataacctgtttggatcctggtcctttttaactgttccttggtaattctgagcatttatttgatgacttaatatttttcactacctttggagaacagatgaacattattcaccatgaatggatctatactgtgtggtcatgagttgtgtatacttccataacactgtatttttcttctgtcagtacccttaggatacactttaaaacaccttaaggtctgatgttatggcaacaaactactttttcaaacctaaataggaaccatgtaatttctcaaaagtgattgaacagtttgcccacacttagtttgttggtcttatgtaaaacattggctcaaaataaagtacacactgatttattttactgtt

SEQ ID NO: 8603 - protein, 704 aa, Homo sapiens; identical to SEQ ID NO: 650

SEQ ID NO: 8604 - DNA, 6700 bp, Homo sapiens
gaagtggggggaggaggagcagggaggggcacttaacggtggtggctggttctgcgccggatccgggagaggggcgggcgccattgtgcttcgctgccgactgcatttcctcagtcacgggcctagaactccaaggagaaaggcggcgaaaaatctttaagaatggagtctaaaccttcaaggattccaagaagaatttctgttcaaccttccagctccttaagtgctaggatgatgtctggaagcagaggaagtagtttaaatgatacctatcactcaagagactcttcatttagattggattctgaatatcagtctacatcagcatcagcatctgcgtcaccatttcaatctgcatggtatagtgaatctgagataactcagggagcacgctcaagatcgcagaaccagcaacgggatcatgattcaaaaagacctaaactttcctgtacaaactgtactacctcagctgggagaaatgttggaaatggtttaaacacattatcagattcatcttggaggcatagtcaagttcctagatcttcatcaatggtacttggatcatttggaacagacttaatgagagagaggagagatttggagagaagaacagattcctctattagtaatcttatggattatagtcaccgaagtggtgatttcacaacttcatcatatgttcaagacagagttccttcatattcacaaggagcaagaccaaaagaaaactcaatgagcactttacagttgaatacatcatccacaaaccaccaattgccttctgaacatcagaccatactaagttctagggactccagaaattctttaagatcaaatttttcttcaagagaatcagaatcttcccgaagcaatacgcagcctggattttcttacagttcaagtagagatgaagccccaatcataagcaattcagaaagggttgtttcatctcaaagaccatttcaagaatcttctgacaatgaaggtaggcggacaacgaggagattgctgtcacgcatagcttctagcatgtcatctacttttttttcacgaagatctagtcaggattccttgaatacaagatcattgaattctgaaaattcttacgtttctccaagaatcttgacagcttcacagtcccgtagtaatgtaccatcagcttctgaagttcccgataatagggcatctgaagcttctcagggatttcgatttcttaggcgaagatggggtttgtcatctcttagccacaatcatagctctgagtcagattcagaaaattttaaccaagaatctgaaggtagaaatacaggaccatggttatcttcctcacttagaaatagatgcacacctttgttctctagaaggaggcgagagggaagagatgaatcttcaaggatacctacctctgatacatcatctagatctcatatttttagaagagaatcaaatgaagtggttcaccttgaagcacagaatgatcctcttggagctgctgccaacagaccacaagcatctgcagcatcaagcagtgccacaacaggtggctctacatcagattcggctcaaggtggaagaaatacaggaatatcagggattcttcctggttccttattccggtttgcagtccctccagcacttgggagtaatttgaccgacaatgtcatgatcacagtagatattattccttcaggttggaattcagctgatggtaaaagtgataaaactaaaagtgcgccttcaagagatccagaaagattgcagaaaataaaagagagcctccttttagaggactcagaagaagaagaaggtgacttatgtagaatttgtcaaatggcagctgcatcatcatctaatttgctgatagagccatgcaagtgcacaggaagtttgcagtatgtccaccaagactgtatgaaaaagtggttacaggccaaaattaactctggttcttcattagaagctgtaaccacctgtgaactatgtaaagagaagttggagcttaacctggaggattttgatattcatgaactacatagagctcatgcaaatgaacaagctgagtatgagtttatcagctctggtctctacctagtggtgttattgcacttgtgcgaacaaagcttttctgatatgatgggaaatacaaatgaaccaagcacacgtgtccgatttattaaccttgcaagaactcttcaggcacatatggaagatctcgaaacttcagaggatgattccgaagaagacggagaccataacaggacatttgatattgcctaacttcatataagacagatggatgatctgtgaacataagtgtttattaaaaatggcaattaaatataaattacttttgtgggggaatgcctaataaatacattgactatatataaaatgaatatatacatacacatgtatgcctgtatatatatattcattctccagtgttgctgaattaaaattctgctggactttttaacatagcaaatccgatgtttataaactggtaatcaaaaaggttttttcttttaggtgagtgggaaagtattacccttgttttaaatatctaagcaatgcctatcaacccttttttgtgttatgattactgtagtcatatttatgaaaaaaggtttgtgttttactcttgctagtgagaaaagtgggacaaaatatacttttgaaataaaatgctatatggcacctaattattttttcttttaaaatgccttaagttgcagtctcattttgataatcatttgcttccagtgtttaaaaattaaaaaaagaatggggagaaggttatgagaagagcattattaagtttccaaatttaatttgaattccaaattcacctagcaataaaatctaatttttaaaaagtatataaatataaaatgtataaatgatggatagatttttgtattgatttgcaaaatgcagattatatttgataggctatagtatgtagatattccttttaggaatattacagctgtaaattatatgagacttgccagtcaaatgctatttggtttaaaaaaattattgcaatctcaagttaatggaatatttttaaatcccacattcagagtttaaaacactggttttcaatgtgttttttagtgttgtcacttgtttatagataaatatataaataacctgtttggatcctggtcctttttaactgttccttggtaattctgagcatttatttgatgacttaatatttttcactacctttggagaacagatgaacattattcaccatgaatggatctatactgtgtggtcatgagttgtgtatacttccataacactgtatttttcttctgtcagtacccttaggatacactttaaaacaccttaaggtctgatgttatggcaacaaactactttttcaaacctaaataggaaccatgtaatttctcaaaagtgattgaacagtttgcccacacttagtttgttggtcttatgtaaaacattggctcaaaataaagtacacactgatttattttactgtttgaaatgtttccttttaaactggtgctcaaagaagacatcagacttcataaccaagaattttattacaatttcaaatctcattttaagcaataatataaatgttctaaaacatttgctcacctcttgccagttacctttgcattgtctgtcttaaagcaaaaatataaaatttaagggtggtagttttaatatattctgtgggtcctaagggatgctttgaatttgaagtatatatacttttaataaaattcagtatgacagttgtcttctgcttaacccataaaactttatttaaaaaatttaactagatggtacaaaacattcattggtatgcacataattctgtatagttttgttattaaatgctaaatgacagtgataacaatggcttaagctttacagtattcttgtagttccctagtaccacttagtatttaaatattgtcatattagcttcagattatcatgtaaatgacggtagaggaataagagaaaaggctttcattggttatcagttttaaattctgaacaaaagagaccatacactgctcactacaagaatgcaattttctaagaaaatgtagtttaaaatgttattctgaatatctgccaaagaattatattgttattactagctagaaccaagatgttgaagaaagcagtttctacattctggatgtagtaaacaagcctgcctgtgtaatccaattatctcttcactaatgagtagataaggtgcctgttatagatgttctggtatataaagaaaaaatgtaggccaagtgtggtggctcacgcatgtaatcccagcactttgggagaccaaggtgggtggatcacttgaggtcaggagtttgagaccagcccagtcaatatggcgaaaccccgtctctaccaaaaatacaaaaagttagctgggtgtggtgacagatgtctgtggtcccagctactaaggaggctgaggcaggagaattgcttgaaaacctgcaaggcggagattggagagagccaagatcgagccactgcactgtagcctgggcagcacagtgagactccatcatatatatatatatagcacttcattaccagaggcctcttggcctgttgaaaaatgaaaccaaatattgaaaattaaatcagagtttaaagcagctattttggaagagctgccattaggtagaaagtatcaaaatgtacaaaagaaagttgtatgggagttgagtggaaggtaggatttaagagcagcactgcccaataaaacttcctataatgaaaatgttctataatgtatgttgcccagtacagtagccactaaccacctgtgatttgaacacttgacaatgtggctaatgtaattcgaaaactggattttaaactaaatttacttaaatagcctcatgtggctagtggctcattggacattgtagttgtagacgtttgagactgttggttttaagttggacttaatcactttcctacccaaattctaccactcctttaagaactcctttagaactcttttagttcacataatacgccatattttttttactgtgcctgtagttcttcaaggagtggtacaatttgggtaggaaaaccaggcaggaattccagggtagtgttcaatattgacattagtaatagtctatcaataataaaatagacatctcaatcactatacaaaatctcagaaatgtaaagctcttacagagcatgcttgtgcttgtgtaacagctggtgtaatgcctgcattttcagtaccatgtagccgcactgttaatagttttctatcactttttagttactcatgtctcattaatgatagtgccattaattgtgatgagtgttttcgattcatgtggtcaataaaaagagactacacaagctggaactttgttgccattagtcaagctagtgagatagtatatctatctatctccccagaagaaagtaagataattgatggggtgtggattcagaagagggattacttttctttgagcctcagacttctagacagtatacttcagtcagtaatggaccacatatagaacagtgtttccttagtagaccatatttttactgtaccttttctatatttagatacacaaatattgtgttacaattgtctgcagtattcagcacagtaacatgctgtgtaggtttgggacaaaataggctctaccatctgggtttgtgtaaatacaagctgattttcacacaagattccctaactatgcatttcttagaacgtatccccattgataagtgatacgtgactaatttacgtgaaatttatacattctttatctttcctgtttttggtttattgatggtgaggaaaattactcgtttcagctttttcatttttttactccccaaatgattttcacctttttcttaaaatgtacaataaatgcactgaaaactttgatcactgtcactacagttgtacttaagtgtttttcttcggtttttgcttgcacagttttcatgtcattgaaggaaaaatttataaatgcttgaggagaatgagatacatcttgtataggggaaagtacaaaaggtatggtggcaagagagaaatccttaaaggggcactataatatgtaagtgttaacctaattgccagctttctctatgccatcctggacacagcgatcatattttgtttcaaataatttataaacattcattaaaacttgagtcatttgtgataaaatggtgtgtgtaaaagtaatgaaactaaaattggtgtggggtgttaaaagttgtaaaattttcttcatctaaatcataaaaagatacacattctagaggaattatctgccaaaaaaataacaattatcaaagatatttaaatgtatgggatgtacttaaaatcacttattccccatttcatgtttactaataaacatataaactaaagtgggtcaactaaatagggaagatacagcaggcaagacaaataggctgggcttttatttttatctgcttgggctttaagctttccttcattcaagtgacagattctgcctttgacgggatgcttaaaatcactatattagatctaagatcatttctaaaacctgtttttttaatgaacctaaagacttttcacagcagatgagtacataaaaatgttactggaataaggaataccattaaagctctaatatcc

SEQ ID NO: 8605 - protein, 704 aa, Homo sapiens; identical to SEQ ID NO: 650

SEQ ID NO: 8606 - DNA, 740 bp, Homo sapiens
caagaatcgtctacattttgacattttattgtaggaaaataattttataatgcaaaatctgtcaaatatcttaaaacttttttagataatttgtaatttgttgtagtcaaattacaaattatggagagcttcacattacaagaatgagcttgacatggcatctgccctccacaactcactgtttagtcatcagactaatgtataaacaactattattatcttaatatgactgtacagtggttctgtgggagcataggggaggggtgcttaatcttggaaattttacaggatttatttatttattgcctgaactaagatgtgaaggctcactaggactttgataaagaaactgcaaagtcatgatattatggtttgttttaggaattcatgatttgttcctgtagctgaaacatacattgaatggtaagttagagcccgacataaaagactttctgtactgtactagaaaattagtgtctgggtgtggtggctcactcctgtaatcccgtcactttgggaggccaaggtgggaggatcgcttaaggctgggagttcagccaggccacaaagaccccatctctacgggcatggtggtgcgggtgtagtggtgcgcactgctactactagctacttgggctgctgaggcaggagaatggcatgaaccctggaggcagagcttgcagtgaatcaagatcacgccactgcactctagcctgggcgacagagcgagactctgtctc

SEQ ID NO: 8607 - protein, 58 aa, Homo sapiens
KISVWVWWLTPVIPSLWEAKVGGSLKAGSSARPQRPHLYGHGGAGVVVRTATTSYLGC

SEQ ID NO: 8608 - DNA, 5296 bp, Homo sapiens
ctctccggccgcgcagccgctgccgcccacccgcacccgccgtcatgctccgggccgcgctgcccgcgctcctgctgccgttgctgggcctcgccgctgctgccgtcgcggactgtccttcatctacttggattcagttccaagacagttgttacatttttctccaagaagccatcaaagtagaaagcatagaggatgtcagaaatcagtgtactgaccatggagcggacatgataagcatacataatgaagaagaaaatgcttttatactggatactttgaaaaagcaatggaaaggcccagatgatatcctactaggcatgttttatgacacagatgatgcgagtttcaagtggtttgataattcaaatatgacatttgataagtggacagaccaagatgatgatgaggatttagttgacacctgtgcttttctgcacatcaagacaggtgaatggaaaaaaggaaattgtgaagtttcttctgtggaaggaacactatgcaaaacagctatcccatacaaaaggaaatatttatcagataaccacattttaatatcagcattggtgattgctagcacggtaattttgacagttttgggagcaatcatttggttcctgtacaaaaaacattctgattctcgtttcaccacagttttttcaaccgcaccccaatcaccttataatgaagactgtgttttggtagttggagaagaaaatgaatatcctgttcaatttgactaagtttttggtaatcttgcactaagacatcaacaaaatgccctggcagagataacttgggaaagattttaatataaaacttgacattggatattagagctttaatggtattccttattccagtaacatttttatgtactcatctgctgtgaaaagtctttaggttcattaaaaaaacaggttttagaaatgatcttagatctaatatagtgattttaagcatcccgtcaaaggcagaatctgtcacttgaatgaaggaaagcttaaagcccaagcagataaaaataaaagcccagcctatttgtcttgcctgctgtatcttccctatttagttgacccactttagtttatatgtttattagtaaacatgaaatggggaataagtgattttaagtacatcccatacatttaaatatctttgataattgttatttttttggcagataattcctctagaatgtgtatctttttatgatttagatgaagaaaattttacaacttttaacaccccacaccaattttagtttcattacttttacacacaccattttatcacaaatgactcaagttttaatgaatgtttataaattatttgaaacaaaatatgatcgctgtgtccaggatggcatagagaaagctggcaattaggttaacacttacatattatagtgcccctttaaggatttctctcttgccaccataccttttgtactttcccctatacaagatgtatctcattctcctcaagcatttataaatttttccttcaatgacatgaaaactgtgcaagcaaaaaccgaagaaaaacacttaagtacaactgtagtgacagtgatcaaagttttcagtgcatttattgtacattttaagaaaaaggtgaaaatcatttggggagtaaaaaaatgaaaaagctgaaacgagtaattttcctcaccatcaataaaccaaaaacaggaaagataaagaatgtataaatttcacgtaaattagtcacgtatcacttatcaatggggatacgttctaagaaatgcatagttagggaatcttgtgtgaaaatcagcttgtatttacacaaacccagatggtagagcctattttgtcccaaacctacacagcatgttactgtgctgaatactgcagacaattgtaacacaatatttgtgtatctaaatatagaaaaggtacagtaaaaatatggtctactaaggaaacactgttctatatgtggtccattactgactgaagtatactgtctagaagtctgaggctcaaagaaaagtaatccctcttctgaatccacaccccatcaattatcttactttcttctggggagatagatagatatactatctcactagcttgactaatggcaacaaagttccagcttgtgtagtctctttttattgaccacatgaatcgaaaacactcatcacaattaatggcactatcattaatgagacatgagtaactaaaaagtgatagaaaactattaacagtgcggctacatggtactgaaaatgcaggcattacaccagctgttacacaagcacaagcatgctctgtaagagctttacatttctgagattttgtatagtgattgagatgtctattttattattgatagactattactaatgtcaatattgaacactaccctggaattcctgcctggttttcctacccaaattgtaccactccttgaagaactacaggcacagtaaaaaaaatatggcgtattatgtgaactaaaagagttctaaaggagttcttaaaggagtggtagaatttgggtaggaaagtgattaagtccaacttaaaaccaacagtctcaaacgtctacaactacaatgtccaatgagccactagccacatgaggctatttaagtaaatttagtttaaaatccagttttcgaattacattagccacattgtcaagtgttcaaatcacaggtggttagtggctactgtactgggcaacatacattatagaacattttcattataggaagttttattgggcagtgctgctcttaaatcctaccttccactcaactcccatacaactttcttttgtacattttgatactttctacctaatggcagctcttccaaaatagctgctttaaactctgatttaattttcaatatttggtttcatttttcaacaggccaagaggcctctggtaatgaagtgctatatatatatatatgatggagtctcactgtgctgcccaggctacagtgcagtggctcgatcttggctctctccaatctccgccttgcaggttttcaagcaattctcctgcctcagcctccttagtagctgggaccacagacatctgtcaccacacccagctaactttttgtatttttggtagagacggggtttcgccatattgactgggctggtctcaaactcctgacctcaagtgatccacccaccttggtctcccaaagtgctgggattacatgcgtgagccaccacacttggcctacattttttctttatataccagaacatctataacaggcaccttatctactcattagtgaagagataattggattacacaggcaggcttgtttactacatccagaatgtagaaactgctttcttcaacatcttggttctagctagtaataacaatataattctttggcagatattcagaataacattttaaactacattttcttagaaaattgcattcttgtagtgagcagtgtatggtctcttttgttcagaatttaaaactgataaccaatgaaagccttttctcttattcctctaccgtcatttacatgataatctgaagctaatatgacaatatttaaatactaagtggtactagggaactacaagaatactgtaaagcttaagccattgttatcactgtcatttagcatttaataacaaaactatacagaattatgtgcataccaatgaatgttttgtaccatctagttaaattttttaaataaagttttatgggttaagcagaagacaactgtcatactgaattttattaaaagtatatatacttcaaattcaaagcatcccttaggacccacagaatatattaaaactaccacccttaaattttatatttttgctttaagacagacaatgcaaaggtaactggcaagaggtgagcaaatgttttagaacatttatattattgcttaaaatgagatttgaaattgtaataaaattcttggttatgaagtctgatgtcttctttgagcaccagtttaaaaggaaacatttcaaacagtaaaataaatcagtgtgtactttattttgagccaatgttttacataagaccaacaaactaagtgtgggcaaactgttcaatcacttttgagaaattacatggttcctatttaggtttgaaaaagtagtttgttgccataacatcagaccttaaggtgttttaaagtgtatcctaagggtactgacagaagaaaaatacagtgttatggaagtatacacaactcatgaccacacagtatagatccattcatggtgaataatgttcatctgttctccaaaggtagtgaaaaatattaagtcatcaaataaatgctcagaattaccaaggaacagttaaaaaggaccaggatccaaacaggttatttatatatttatctataaacaagtgacaacactaaaaaacacattgaaaaccagtgttttaaactctgaatgtgggatttaaaaatattccattaacttgagattgcaataatttttttaaaccaaatagcatttgactggcaagtctcatataatttacagctgtaatattcctaaaaggaatatctacatactatagcctatcaaatataatctgcattttgcaaatcaatacaaaaatctatccatcatttatacattttatatttatatactttttaaaaattagattttattgctaggtgaatttggaattcaaattaaatttggaaacttaataatgctcttctcataaccttctccccattctttttttaatttttaaacactggaagcaaatgattatcaaaatgagactgcaacttaaggcattttaaaagaaaaaataattaggtgccatatagcattttatttcaaaagtatattttgtcccacttttctcactagcaagagtaaaacacaaaccttttttcataaatatgactacagtaatcataacacaaaaaagggttgataggcattgcttagatatttaaaacaagggtaatactttcccactcacctaaaagaaaaaacctttttgattaccagtttataaacatcggatttgctatgttaaaaagtccagcagaattttaattcagcaacactggagaatgaatatatatatacaggcatacatgtgtatgtatatattcattttatatatagtcaatgtatttattaggcattcccccacaaaagtaatttatatttaattgccatttttaataaacacttatgttcacagatcatccatctgtcttatatgaagttaggcaatatcaaatgtcctgttatggtctccgtcttcttcgga

SEQ ID NO: 8609 - protein, 232 aa, Homo sapiens; identical to SEQ ID NO: 652

SEQ ID NO: 8610 - DNA, 8192 bp, Homo sapiens
aggatgaggacaggctgggcgacccctcgccgcccggcggggctcctcatgctgctcttctggttcttcgatctcgcggagccctctggccgcgcagctaatgaccccttcaccatcgtccatggaaatacgggcaagtgcatcaagccagtgtatggctggatagtagcagacgactgtgatgaaactgaggacaagttatggaagtgggtgtcccagcatcggctctttcatttgcactcccaaaagtgccttggcctcgatattaccaaatcggtaaatgagctgagaatgttcagctgtgactccagtgccatgctgtggtggaaatgtgagcaccactctctgtacggagctgcccggtaccggctggctctgaaggatggacatggcacagcaatctcaaatgcatctgatgtctggaagaaaggaggctcagaggaaagcctttgtgaccagccttatcatgagatctataccagagatgggaactcttatgggagaccttgtgaatttccattcttaattgatgggacctggcatcatgattgcattcttgatgaagatcatagtgggccatggtgtgccaccaccttaaattatgaatatgaccgaaagtggggcatctgcttaaagcctgaaaacggttgtgaagataattgggaaaagaacgagcagtttggaagttgctaccaatttaatactcagacggctctttcttggaaagaagcttatgtttcatgtcagaatcaaggagctgatttactgagcatcaacagtgctgctgaattaacttaccttaaagaaaaagaaggcattgctaagattttctggattggtttaaatcagctatactctgctagaggctgggaatggtcagaccacaaaccattaaactttctcaactgggatccagacaggcccagtgcacctactataggtggctccagctgtgcaagaatggatgctgagtctggtctgtggcagagcttttcctgtgaagctcaactgccctatgtctgcaggaaaccattaaataatacagtggagttaacagatgtctggacatactcagatacccgctgtgatgcaggctggctgccaaataatggattttgctatctgctggtaaatgaaagtaattcctgggataaggcacatgcgaaatgcaaagccttcagtagtgacctaatcagcattcattctctagcagatgtggaggtggttgtcacaaaactccataatgaggatatcaaagaagaagtgtggataggccttaagaacataaacataccaactttatttcagtggtcagatggtactgaagttactctaacatattgggatgagaatgagccaaatgttccctacaataagacgcccaactgtgtttcctacttaggagagctaggtcagtggaaagtccaatcatgtgaggagaaactaaaatatgtatgcaagagaaagggagaaaaactgaatgacgcaagttctgataagatgtgtcctccagatgagggctggaagagacatggagaaacctgttacaagatttatgaggatgaggtcccttttggaacaaactgcaatctgactatcactagcagatttgagcaagaatacctaaatgatttgatgaaaaagtatgataaatctctaagaaaatacttctggactggcctgagagatgtagattcttgtggagagtataactgggcaactgttggtggaagaaggcgggctgtaaccttttccaactggaattttcttgagccagcttccccgggcggctgcgtggctatgtctactggaaagtctgttggaaagtgggaggtgaaggactgcagaagcttcaaagcactttcaatttgcaagaaaatgagtggaccccttgggcctgaagaagcatcccctaagcctgatgacccctgtcctgaaggctggcagagtttccccgcaagtctttcttgttataaggtattccatgcagaaagaattgtaagaaagaggaactgggaagaagctgaacgattctgccaagcccttggagcacacctttctagcttcagccatgtggatgaaataaaggaatttcttcactttttaacggaccagttcagtggccagcattggctgtggattggtttgaataaaaggagcccagatttacaaggatcctggcaatggagtgatcgtacaccagtgtctactattatcatgccaaatgagtttcagcaggattatgacatcagagactgtgctgctgtcaaggtatttcataggccatggcgaagaggctggcatttctatgatgatagagaatttatttatttgaggccttttgcttgtgatacaaaacttgaatgggtgtgccaaattccaaaaggccgtactccaaaaacaccagactggtacaatccagaccgtgctggaattcatggacctccacttataattgaaggaagtgaatattggtttgttgctgatcttcacctaaactatgaagaagccgtcctgtactgtgccagcaatcacagctttcttgcaactataacatcttttgtgggactaaaagccatcaaaaacaaaatagcaaatatatctggtgatggacagaagtggtggataagaattagcgagtggccaatagatgatcattttacatactcacgatatccatggcaccgctttcctgtgacatttggagaggaatgcttgtacatgtctgccaagacttggcttatcgacttaggtaaaccaacagactgtagtaccaagttgcccttcatctgtgaaaaatataatgtttcttcgttagagaaatacagcccagattctgcagctaaagtgcaatgttctgagcaatggattccttttcagaataagtgttttctaaagatcaaacccgtgtctctcacattttctcaagcaagcgatacctgtcactcctatggtggcacccttccttcagtgttgagccagattgaacaagactttattacatccttgcttccggatatggaagctactttatggattggtttgcgctggactgcctatgaaaagataaacaaatggacagataacagagagctgacgtacagtaactttcacccattattggttagtgggaggctgagaataccagaaaatttttttgaggaagagtctcgctaccactgtgccctaatactcaacctccaaaaatcaccgtttactgggacgtggaattttacatcctgcagtgaacgccactttgtgtctctctgtcagaaatattcagaagttaaaagcagacagacgttgcagaatgcttcagaaactgtaaagtatctaaataatctgtacaaaataatcccaaagactctgacttggcacagtgctaaaagggagtgtctgaaaagtaacatgcagctggtgagcatcacggacccttaccagcaggcattcctcagtgtgcaggcgctccttcacaactcttccttatggatcggactcttcagtcaagatgatgaactcaactttggttggtcagatgggaaacgtcttcattttagtcgctgggctgaaactaatgggcaactcgaagactgtgtagtattagacactgatggattctggaaaacagttgattgcaatgacaatcaaccaggtgctatttgctactattcaggaaatgagactgaaaaagaggtcaaaccagttgacagtgttaaatgtccatctcctgttctaaatactccgtggataccatttcagaactgttgctacaatttcataataacaaagaataggcatatggcaacaacacaggatgaagttcatactaaatgccagaaactgaatccaaaatcacatattctgagtattcgagatgaaaaggagaataactttgttcttgagcaactgctgtacttcaattatatggcttcatgggtcatgttaggaataacttatagaaataagtctcttatgtggtttgataagaccccactgtcatatacacattggagagcaggaagaccaactataaaaaatgagaagtttttggctggtttaagtactgacggcttctgggatattcaaacctttaaagttattgaagaagcagtttattttcaccagcacagcattcttgcttgtaaaattgaaatggttgactacaaagaagaatataatactacactgccacagtttatgccatatgaagatggtatttacagtgttattcaaaaaaaggtaacatggtatgaagcattaaacatgtgttctcaaagtggaggtcacttggcaagcgttcacaaccaaaatggccagctctttctggaagatattgtaaaacgtgatggatttccactatgggttgggctctcaagtcatgatggaagtgaatcaagttttgaatggtctgatggtagtacatttgactatatcccatggaaaggccaaacatctcctggaaattgtgttctcttggatccaaaaggaacttggaaacatgaaaaatgcaactctgttaaggatggtgctatttgttataaacctacaaaatctaaaaagctgtcccgtcttacatattcatcaagatgtccagcagcaaaagagaatgggtcacggtggatccagtacaagggtcactgttacaagtctgatcaggcattgcacagtttttcagaggccaaaaaattgtgttcaaaacatgatcactctgcaactatcgtttccataaaagatgaagatgagaataaatttgtgagcagactgatgagggaaaataataacattaccatgagagtttggcttggattatctcaacattctgttgactgtccttcatctacttggattcagttccaagacagttgttacatttttctccaagaagccatcaaagtagaaagcatagaggatgtcagaaatcagtgtactgaccatggagcggacatgataagcatacataatgaagaagaaaatgcttttatactggatactttgaaaaagcaatggaaaggcccagatgatatcctactaggcatgttttatgacacagatgatgcgagtttcaagtggtttgataattcaaatatgacatttgataagtggacagaccaagatgatgatgaggatttagttgacacctgtgcttttctgcacatcaagacaggtgaatggaaaaaaggaaattgtgaagtttcttctgtggaaggaacactatgcaaaacagctatcccatacaaaaggaaatatttatcagataaccacattttaatatcagcattggtgattgctagcacggtaattttgacagttttgggagcaatcatttggttcctgtacaaaaaacattctgattctcgtttcaccacagttttttcaaccgcaccccaatcaccttataatgaagactgtgttttggtagttggagaagaaaatgaatatcctgttcaatttgactaagtttttggtaatcttgcactaagacatcaacaaaatgccctggcagagataacttgggaaagattttaatataaaacttgacattggatattagagctttaatggtattccttattccagtaacatttttatgtactcatctgctgtgaaaagtctttaggttcattaaaaaaacaggttttagaaatgatcttagatctaatatagtgattttaagcatcccgtcaaaggcagaatctgtcacttgaatgaaggaaagcttaaagcccaagcagataaaaataaaagcccagcctatttgtcttgcctgctgtatcttccctatttagttgacccactttagtttatatgtttattagtaaacatgaaatggggaataagtgattttaagtacatcccatacatttaaatatctttgataattgttatttttttggcagataattcctctagaatgtgtatctttttatgatttagatgaagaaaattttacaacttttaacaccccacaccaattttagtttcattacttttacacacaccattttatcacaaatgactcaagttttaatgaatgtttataaattatttgaaacaaaatatgatcgctgtgtccaggatggcatagagaaagctggcaattaggttaacacttacatattatagtgcccctttaaggatttctctcttgccaccataccttttgtactttcccctatacaagatgtatctcattctcctcaagcatttataaatttttccttcaatgacatgaaaactgtgcaagcaaaaaccgaagaaaaacacttaagtacaactgtagtgacagtgatcaaagttttcagtgcatttattgtacattttaagaaaaaggtgaaaatcatttggggagtaaaaaaatgaaaaagctgaaacgagtaattttcctcaccatcaataaaccaaaaacaggaaagataaagaatgtataaatttcacgtaaattagtcacgtatcacttatcaatggggatacgttctaagaaatgcatagttagggaatcttgtgtgaaaatcagcttgtatttacacaaacccagatggtagagcctattttgtcccaaacctacacagcatgttactgtgctgaatactgcagacaattgtaacacaatatttgtgtatctaaatatagaaaaggtacagtaaaaatatggtctactaaggaaacactgttctatatgtggtccattactgactgaagtatactgtctagaagtctgaggctcaaagaaaagtaatccctcttctgaatccacaccccatcaattatcttactttcttctggggagatagatagatatactatctcactagcttgactaatggcaacaaagttccagcttgtgtagtctctttttattgaccacatgaatcgaaaacactcatcacaattaatggcactatcattaatgagacatgagtaactaaaaagtgatagaaaactattaacagtgcggctacatggtactgaaaatgcaggcattacaccagctgttacacaagcacaagcatgctctgtaagagctttacatttctgagattttgtatagtgattgagatgtctattttattattgatagactattactaatgtcaatattgaacactaccctggaattcctgcctggttttcctacccaaattgtaccactccttgaagaactacaggcacagtaaaaaaaatatggcgtattatgtgaactaaaagagttctaaaggagttcttaaaggagtggtagaatttgggtaggaaagtgattaagtccaacttaaaaccaacagtctcaaacgtctacaactacaatgtccaatgagccactagccacatgaggctatttaagtaaatttagtttaaaatccagttttcgaattacattagccacattgtcaagtgttcaaatcacaggtggttagtggctactgtactgggcaacatacattatagaacattttcattataggaagttttattgggcagtgctgctcttaaatcctaccttccactcaactcccatacaactttcttttgtacattttgatactttctacctaatggcagctcttccaaaatagctgctttaaactctgatttaattttcaatatttggtttcatttttcaacaggccaagaggcctctggtaatgaagtgctatatatatatatatgatggagtctcactgtgctgcccaggctacagtgcagtggctcgatcttggctctctccaatctccgccttgcaggttttcaagcaattctcctgcctcagcctccttagtagctgggaccacagacatctgtcaccacacccagctaactttttgtatttttggtagagacggggtttcgccatattgactgggctggtctcaaactcctgacctcaagtgatccacccaccttggtctcccaaagtgctgggattacatgcgtgagccaccacacttggcctacattttttctttatataccagaacatctataacaggcaccttatctactcattagtgaagagataattggattacacaggcaggcttgtttactacatccagaatgtagaaactgctttcttcaacatcttggttctagctagtaataacaatataattctttggcagatattcagaataacattttaaactacattttcttagaaaattgcattcttgtagtgagcagtgtatggtctcttt

SEQ ID NO: 8611 - protein, 1817 aa, Homo sapiens
MRTGWATPRRPAGLLMLLFWFFDLAEPSGRAANDPFTIVHGNTGKCIKPVYGWIVADDCDETEDKLWKWVSQHRLFHLHSQKCLGLDITKSVNELRMFSCDSSAMLWWKCEHHSLYGAARYRLALKDGHGTAISNASDVWKKGGSEESLCDQPYHEIYTRDGNSYGRPCEFPFLIDGTWHHDCILDEDHSGPWCATTLNYEYDRKWGICLKPENGCEDNWEKNEQFGSCYQFNTQTALSWKEAYVSCQNQGADLLSINSAAELTYLKEKEGIAKIFWIGLNQLYSARGWEWSDHKPLNFLNWDPDRPSAPTIGGSSCARMDAESGLWQSFSCEAQLPYVCRKPLNNTVELTDVWTYSDTRCDAGWLPNNGFCYLLVNESNSWDKAHAKCKAFSSDLISIHSLADVEVVVTKLHNEDIKEEVWIGLKNINIPTLFQWSDGTEVTLTYWDENEPNVPYNKTPNCVSYLGELGQWKVQSCEEKLKYVCKRKGEKLNDASSDKMCPPDEGWKRHGETCYKIYEDEVPFGTNCNLTITSRFEQEYLNDLMKKYDKSLRKYFWTGLRDVDSCGEYNWATVGGRRRAVTFSNWNFLEPASPGGCVAMSTGKSVGKWEVKDCRSFKALSICKKMSGPLGPEEASPKPDDPCPEGWQSFPASLSCYKVFHAERIVRKRNWEEAERFCQALGAHLSSFSHVDEIKEFLHFLTDQFSGQHWLWIGLNKRSPDLQGSWQWSDRTPVSTIIMPNEFQQDYDIRDCAAVKVFHRPWRRGWHFYDDREFIYLRPFACDTKLEWVCQIPKGRTPKTPDWYNPDRAGIHGPPLIIEGSEYWFVADLHLNYEEAVLYCASNHSFLATITSFVGLKAIKNKIANISGDGQKWWIRISEWPIDDHFTYSRYPWHRFPVTFGEECLYMSAKTWLIDLGKPTDCSTKLPFICEKYNVSSLEKYSPDSAAKVQCSEQWIPFQNKCFLKIKPVSLTFSQASDTCHSYGGTLPSVLSQIEQDFITSLLPDMEATLWIGLRWTAYEKINKWTDNRELTYSNFHPLLVSGRLRIPENFFEEESRYHCALILNLQKSPFTGTWNFTSCSERHFVSLCQKYSEVKSRQTLQNASETVKYLNNLYKIIPKTLTWHSAKRECLKSNMQLVSITDPYQQAFLSVQALLHNSSLWIGLFSQDDELNFGWSDGKRLHFSRWAETNGQLEDCVVLDTDGFWKTVDCNDNQPGAICYYSGNETEKEVKPVDSVKCPSPVLNTPWIPFQNCCYNFIITKNRHMATTQDEVHTKCQKLNPKSHILSIRDEKENNFVLEQLLYFNYMASWVMLGITYRNKSLMWFDKTPLSYTHWRAGRPTIKNEKFLAGLSTDGFWDIQTFKVIEEAVYFHQHSILACKIEMVDYKEEYNTTLPQFMPYEDGIYSVIQKKVTWYEALNMCSQSGGHLASVHNQNGQLFLEDIVKRDGFPLWVGLSSHDGSESSFEWSDGSTFDYIPWKGQTSPGNCVLLDPKGTWKHEKCNSVKDGAICYKPTKSKKLSRLTYSSRCPAAKENGSRWIQYKGHCYKSDQALHSFSEAKKLCSKHDHSATIVSIKDEDENKFVSRLMRENNNITMRVWLGLSQHSVDCPSSTWIQFQDSCYIFLQEAIKVESIEDVRNQCTDHGADMISIHNEEENAFILDTLKKQWKGPDDILLGMFYDTDDASFKWFDNSNMTFDKWTDQDDDEDLVDTCAFLHIKTGEWKKGNCEVSSVEGTLCKTAIPYKRKYLSDNHILISALVIASTVILTVLGAIIWFLYKKHSDSRFTTVFSTAPQSPYNEDCVLVVGEENEYPVQFD

SEQ ID NO: 8612 - DNA, 8192 bp, Homo sapiens
aggatgaggacaggctgggcgacccctcgccgcccggcggggctcctcatgctgctcttctggttcttcgatctcgcggagccctctggccgcgcagctaatgaccccttcaccatcgtccatggaaatacgggcaagtgcatcaagccagtgtatggctggatagtagcagacgactgtgatgaaactgaggacaagttatggaagtgggtgtcccagcatcggctctttcatttgcactcccaaaagtgccttggcctcgatattaccaaatcggtaaatgagctgagaatgttcagctgtgactccagtgccatgctgtggtggaaatgtgagcaccactctctgtacggagctgcccggtaccggctggctctgaaggatggacatggcacagcaatctcaaatgcatctgatgtctggaagaaaggaggctcagaggaaagcctttgtgaccagccttatcatgagatctataccagagatgggaactcttatgggagaccttgtgaatttccattcttaattgatgggacctggcatcatgattgcattcttgatgaagatcatagtgggccatggtgtgccaccaccttaaattatgaatatgaccgaaagtggggcatctgcttaaagcctgaaaacggttgtgaagataattgggaaaagaacgagcagtttggaagttgctaccaatttaatactcagacggctctttcttggaaagaagcttatgtttcatgtcagaatcaaggagctgatttactgagcatcaacagtgctgctgaattaacttaccttaaagaaaaagaaggcattgctaagattttctggattggtttaaatcagctatactctgctagaggctgggaatggtcagaccacaaaccattaaactttctcaactgggatccagacaggcccagtgcacctactataggtggctccagctgtgcaagaatggatgctgagtctggtctgtggcagagcttttcctgtgaagctcaactgccctatgtctgcaggaaaccattaaataatacagtggagttaacagatgtctggacatactcagatacccgctgtgatgcaggctggctgccaaataatggattttgctatctgctggtaaatgaaagtaattcctgggataaggcacatgcgaaatgcaaagccttcagtagtgacctaatcagcattcattctctagcagatgtggaggtggttgtcacaaaactccataatgaggatatcaaagaagaagtgtggataggccttaagaacataaacataccaactttatttcagtggtcagatggtactgaagttactctaacatattgggatgagaatgagccaaatgttccctacaataagacgcccaactgtgtttcctacttaggagagctaggtcagtggaaagtccaatcatgtgaggagaaactaaaatatgtatgcaagagaaagggagaaaaactgaatgacgcaagttctgataagatgtgtcctccagatgagggctggaagagacatggagaaacctgttacaagatttatgaggatgaggtcccttttggaacaaactgcaatctgactatcactagcagatttgagcaagaatacctaaatgatttgatgaaaaagtatgataaatctctaagaaaatacttctggactggcctgagagatgtagattcttgtggagagtataactgggcaactgttggtggaagaaggcgggctgtaaccttttccaactggaattttcttgagccagcttccccgggcggctgcgtggctatgtctactggaaagtctgttggaaagtgggaggtgaaggactgcagaagcttcaaagcactttcaatttgcaagaaaatgagtggaccccttgggcctgaagaagcatcccctaagcctgatgacccctgtcctgaaggctggcagagtttccccgcaagtctttcttgttataaggtattccatgcagaaagaattgtaagaaagaggaactgggaagaagctgaacgattctgccaagcccttggagcacacctttctagcttcagccatgtggatgaaataaaggaatttcttcactttttaacggaccagttcagtggccagcattggctgtggattggtttgaataaaaggagcccagatttacaaggatcctggcaatggagtgatcgtacaccagtgtctactattatcatgccaaatgagtttcagcaggattatgacatcagagactgtgctgctgtcaaggtatttcataggccatggcgaagaggctggcatttctatgatgatagagaatttatttatttgaggccttttgcttgtgatacaaaacttgaatgggtgtgccaaattccaaaaggccgtactccaaaaacaccagactggtacaatccagaccgtgctggaattcatggacctccacttataattgaaggaagtgaatattggtttgttgctgatcttcacctaaactatgaagaagccgtcctgtactgtgccagcaatcacagctttcttgcaactataacatcttttgtgggactaaaagccatcaaaaacaaaatagcaaatatatctggtgatggacagaagtggtggataagaattagcgagtggccaatagatgatcattttacatactcacgatatccatggcaccgctttcctgtgacatttggagaggaatgcttgtacatgtctgccaagacttggcttatcgacttaggtaaaccaacagactgtagtaccaagttgcccttcatctgtgaaaaatataatgtttcttcgttagagaaatacagcccagattctgcagctaaagtgcaatgttctgagcaatggattccttttcagaataagtgttttctaaagatcaaacccgtgtctctcacattttctcaagcaagcgatacctgtcactcctatggtggcacccttccttcagtgttgagccagattgaacaagactttattacatccttgcttccggatatggaagctactttatggattggtttgcgctggactgcctatgaaaagataaacaaatggacagataacagagagctgacgtacagtaactttcacccattattggttagtgggaggctgagaataccagaaaatttttttgaggaagagtctcgctaccactgtgccctaatactcaacctccaaaaatcaccgtttactgggacgtggaattttacatcctgcagtgaacgccactttgtgtctctctgtcagaaatattcagaagttaaaagcagacagacgttgcagaatgcttcagaaactgtaaagtatctaaataatctgtacaaaataatcccaaagactctgacttggcacagtgctaaaagggagtgtctgaaaagtaacatgcagctggtgagcatcacggacccttaccagcaggcattcctcagtgtgcaggcgctccttcacaactcttccttatggatcggactcttcagtcaagatgatgaactcaactttggttggtcagatgggaaacgtcttcattttagtcgctgggctgaaactaatgggcaactcgaagactgtgtagtattagacactgatggattctggaaaacagttgattgcaatgacaatcaaccaggtgctatttgctactattcaggaaatgagactgaaaaagaggtcaaaccagttgacagtgttaaatgtccatctcctgttctaaatactccgtggataccatttcagaactgttgctacaatttcataataacaaagaataggcatatggcaacaacacaggatgaagttcatactaaatgccagaaactgaatccaaaatcacatattctgagtattcgagatgaaaaggagaataactttgttcttgagcaactgctgtacttcaattatatggcttcatgggtcatgttaggaataacttatagaaataagtctcttatgtggtttgataagaccccactgtcatatacacattggagagcaggaagaccaactataaaaaatgagaagtttttggctggtttaagtactgacggcttctgggatattcaaacctttaaagttattgaagaagcagtttattttcaccagcacagcattcttgcttgtaaaattgaaatggttgactacaaagaagaatataatactacactgccacagtttatgccatatgaagatggtatttacagtgttattcaaaaaaaggtaacatggtatgaagcattaaacatgtgttctcaaagtggaggtcacttggcaagcgttcacaaccaaaatggccagctctttctggaagatattgtaaaacgtgatggatttccactatgggttgggctctcaagtcatgatggaagtgaatcaagttttgaatggtctgatggtagtacatttgactatatcccatggaaaggccaaacatctcctggaaattgtgttctcttggatccaaaaggaacttggaaacatgaaaaatgcaactctgttaaggatggtgctatttgttataaacctacaaaatctaaaaagctgtcccgtcttacatattcatcaagatgtccagcagcaaaagagaatgggtcacggtggatccagtacaagggtcactgttacaagtctgatcaggcattgcacagtttttcagaggccaaaaaattgtgttcaaaacatgatcactctgcaactatcgtttccataaaagatgaagatgagaataaatttgtgagcagactgatgagggaaaataataacattaccatgagagtttggcttggattatctcaacattctgttgaccagtcttggagttggttagatggatcagaagtgacatttgtcaaatgggaaaataaaagtaagagtggtgttggaagatgtagcatgttgatagcttcaaatgaaacttggaaaaaagttgaatgtgaacatggttttggaagagttgtctgcaaagtgcctctggactgtccttcatctacttggattcagttccaagacagttgttacatttttctccaagaagccatcaaagtagaaagcatagaggatgtcagaaatcagtgtactgaccatggagcggacatgataagcatacataatgaagaagaaaatgcttttatactggatactttgaaaaagcaatggaaaggcccagatgatatcctactaggcatgttttatgacacagatgatgcgagtttcaagtggtttgataattcaaatatgacatttgataagtggacagaccaagatgatgatgaggatttagttgacacctgtgcttttctgcacatcaagacaggtgaatggaaaaaaggaaattgtgaagtttcttctgtggaaggaacactatgcaaaacagctatcccatacaaaaggaaatatttatcagataaccacattttaatatcagcattggtgattgctagcacggtaattttgacagttttgggagcaatcatttggttcctgtacaaaaaacattctgattctcgtttcaccacagttttttcaaccgcaccccaatcaccttataatgaagactgtgttttggtagttggagaagaaaatgaatatcctgttcaatttgactaagtttttggtaatcttgcactaagacatcaacaaaatgccctggcagagataacttgggaaagattttaatataaaacttgacattggatattagagctttaatggtattccttattccagtaacatttttatgtactcatctgctgtgaaaagtctttaggttcattaaaaaaacaggttttagaaatgatcttagatctaatatagtgattttaagcatcccgtcaaaggcagaatctgtcacttgaatgaaggaaagcttaaagcccaagcagataaaaataaaagcccagcctatttgtcttgcctgctgtatcttccctatttagttgacccactttagtttatatgtttattagtaaacatgaaatggggaataagtgattttaagtacatcccatacatttaaatatctttgataattgttatttttttggcagataattcctctagaatgtgtatctttttatgatttagatgaagaaaattttacaacttttaacaccccacaccaattttagtttcattacttttacacacaccattttatcacaaatgactcaagttttaatgaatgtttataaattatttgaaacaaaatatgatcgctgtgtccaggatggcatagagaaagctggcaattaggttaacacttacatattatagtgcccctttaaggatttctctcttgccaccataccttttgtactttcccctatacaagatgtatctcattctcctcaagcatttataaatttttccttcaatgacatgaaaactgtgcaagcaaaaaccgaagaaaaacacttaagtacaactgtagtgacagtgatcaaagttttcagtgcatttattgtacattttaagaaaaaggtgaaaatcatttggggagtaaaaaaatgaaaaagctgaaacgagtaattttcctcaccatcaataaaccaaaaacaggaaagataaagaatgtataaatttcacgtaaattagtcacgtatcacttatcaatggggatacgttctaagaaatgcatagttagggaatcttgtgtgaaaatcagcttgtatttacacaaacccagatggtagagcctattttgtcccaaacctacacagcatgttactgtgctgaatactgcagacaattgtaacacaatatttgtgtatctaaatatagaaaaggtacagtaaaaatatggtctactaaggaaacactgttctatatgtggtccattactgactgaagtatactgtctagaagtctgaggctcaaagaaaagtaatccctcttctgaatccacaccccatcaattatcttactttcttctggggagatagatagatatactatctcactagcttgactaatggcaacaaagttccagcttgtgtagtctctttttattgaccacatgaatcgaaaacactcatcacaattaatggcactatcattaatgagacatgagtaactaaaaagtgatagaaaactattaacagtgcggctacatggtactgaaaatgcaggcattacaccagctgttacacaagcacaagcatgctctgtaagagctttacatttctgagattttgtatagtgattgagatgtctattttattattgatagactattactaatgtcaatattgaacactaccctggaattcctgcctggttttcctacccaaattgtaccactccttgaagaactacaggcacagtaaaaaaaatatggcgtattatgtgaactaaaagagttctaaaggagttcttaaaggagtggtagaatttgggtaggaaagtgattaagtccaacttaaaaccaacagtctcaaacgtctacaactacaatgtccaatgagccactagccacatgaggctatttaagtaaatttagtttaaaatccagttttcgaattacattagccacattgtcaagtgttcaaatcacaggtggttagtggctactgtactgggcaacatacattatagaacattttcattataggaagttttattgggcagtgctgctcttaaatcctaccttccactcaactcccatacaactttcttttgtacattttgatactttctacctaatggcagctcttccaaaatagctgctttaaactctgatttaattttcaatatttggtttcatttttcaacaggccaagaggcctctggtaatgaagtgctatatatatatatatgatggagtctcactgtgctgcccaggctacagtgcagtggctcgatcttggctctctccaatctccgccttgcaggttttcaagcaattctcctgcctcagcctccttagtagctgggaccacagacatctgtcaccacacccagctaactttttgtatttttggtagagacggggtttcgccatattgactgggctggtctcaaactcctgacctcaagtgatccacccaccttggtctcccaaagtgctgggattacatgcgtgagccaccacacttggcctacattttttctttatataccagaacatctataacaggcaccttatctactcattagtgaagagataattggattac

SEQ ID NO: 8613 - protein, 1873 aa, Homo sapiens
MRTGWATPRRPAGLLMLLFWFFDLAEPSGRAANDPFTIVHGNTGKCIKPVYGWIVADDCDETEDKLWKWVSQHRLFHLHSQKCLGLDITKSVNELRMFSCDSSAMLWWKCEHHSLYGAARYRLALKDGHGTAISNASDVWKKGGSEESLCDQPYHEIYTRDGNSYGRPCEFPFLIDGTWHHDCILDEDHSGPWCATTLNYEYDRKWGICLKPENGCEDNWEKNEQFGSCYQFNTQTALSWKEAYVSCQNQGADLLSINSAAELTYLKEKEGIAKIFWIGLNQLYSARGWEWSDHKPLNFLNWDPDRPSAPTIGGSSCARMDAESGLWQSFSCEAQLPYVCRKPLNNTVELTDVWTYSDTRCDAGWLPNNGFCYLLVNESNSWDKAHAKCKAFSSDLISIHSLADVEVVVTKLHNEDIKEEVWIGLKNINIPTLFQWSDGTEVTLTYWDENEPNVPYNKTPNCVSYLGELGQWKVQSCEEKLKYVCKRKGEKLNDASSDKMCPPDEGWKRHGETCYKIYEDEVPFGTNCNLTITSRFEQEYLNDLMKKYDKSLRKYFWTGLRDVDSCGEYNWATVGGRRRAVTFSNWNFLEPASPGGCVAMSTGKSVGKWEVKDCRSFKALSICKKMSGPLGPEEASPKPDDPCPEGWQSFPASLSCYKVFHAERIVRKRNWEEAERFCQALGAHLSSFSHVDEIKEFLHFLTDQFSGQHWLWIGLNKRSPDLQGSWQWSDRTPVSTIIMPNEFQQDYDIRDCAAVKVFHRPWRRGWHFYDDREFIYLRPFACDTKLEWVCQIPKGRTPKTPDWYNPDRAGIHGPPLIIEGSEYWFVADLHLNYEEAVLYCASNHSFLATITSFVGLKAIKNKIANISGDGQKWWIRISEWPIDDHFTYSRYPWHRFPVTFGEECLYMSAKTWLIDLGKPTDCSTKLPFICEKYNVSSLEKYSPDSAAKVQCSEQWIPFQNKCFLKIKPVSLTFSQASDTCHSYGGTLPSVLSQIEQDFITSLLPDMEATLWIGLRWTAYEKINKWTDNRELTYSNFHPLLVSGRLRIPENFFEEESRYHCALILNLQKSPFTGTWNFTSCSERHFVSLCQKYSEVKSRQTLQNASETVKYLNNLYKIIPKTLTWHSAKRECLKSNMQLVSITDPYQQAFLSVQALLHNSSLWIGLFSQDDELNFGWSDGKRLHFSRWAETNGQLEDCVVLDTDGFWKTVDCNDNQPGAICYYSGNETEKEVKPVDSVKCPSPVLNTPWIPFQNCCYNFIITKNRHMATTQDEVHTKCQKLNPKSHILSIRDEKENNFVLEQLLYFNYMASWVMLGITYRNKSLMWFDKTPLSYTHWRAGRPTIKNEKFLAGLSTDGFWDIQTFKVIEEAVYFHQHSILACKIEMVDYKEEYNTTLPQFMPYEDGIYSVIQKKVTWYEALNMCSQSGGHLASVHNQNGQLFLEDIVKRDGFPLWVGLSSHDGSESSFEWSDGSTFDYIPWKGQTSPGNCVLLDPKGTWKHEKCNSVKDGAICYKPTKSKKLSRLTYSSRCPAAKENGSRWIQYKGHCYKSDQALHSFSEAKKLCSKHDHSATIVSIKDEDENKFVSRLMRENNNITMRVWLGLSQHSVDQSWSWLDGSEVTFVKWENKSKSGVGRCSMLIASNETWKKVECEHGFGRVVCKVPLDCPSSTWIQFQDSCYIFLQEAIKVESIEDVRNQCTDHGADMISIHNEEENAFILDTLKKQWKGPDDILLGMFYDTDDASFKWFDNSNMTFDKWTDQDDDEDLVDTCAFLHIKTGEWKKGNCEVSSVEGTLCKTAIPYKRKYLSDNHILISALVIASTVILTVLGAIIWFLYKKHSDSRFTTVFSTAPQSPYNEDCVLVVGEENEYPVQFD

SEQ ID NO: 8614 - DNA, 3741 bp, Homo sapiens
ctctccggccgcgcagccgctgccgcccacccgcacccgccgtcatgctccgggccgcgctgcccgcgctcctgctgccgttgctgggcctcgccgctgctgccgtcgcggactgtccttcatctacttggattcagttccaagacagttgttacatttttctccaagaagccatcaaagtagaaagcatagaggatgtcagaaatcagtgtactgaccatggagcggacatgataagcatacataatgaagaagaaaatgcttttatactggatactttgaaaaagcaatggaaaggcccagatgatatcctactaggcatgttttatgacacagatgatgcgagtttcaagtggtttgataattcaaatatgacatttgataagtggacagaccaagatgatgatgaggatttagttgacacctgtgcttttctgcacatcaagacaggtgaatggaaaaaaggaaattgtgaagtttcttctgtggaaggaacactatgcaaaacagctatcccatacaaaaggaaatatttatcagataaccacattttaatatcagcattggtgattgctagcacggtaattttgacagttttgggagcaatcatttggttcctgtacaaaaaacattctgattctcgtttcaccacagttttttcaaccgcaccccaatcaccttataatgaagactgtgttttggtagttggagaagaaaatgaatatcctgttcaatttgactaagtttttggtaatcttgcactaagacatcaacaaaatgccctggcagagataacttgggaaagattttaatataaaacttgacattggatattagagctttaatggtattccttattccagtaacatttttatgtactcatctgctgtgaaaagtctttaggttcattaaaaaaacaggttttagaaatgatcttagatctaatatagtgattttaagcatcccgtcaaaggcagaatctgtcacttgaatgaaggaaagcttaaagcccaagcagataaaaataaaagcccagcctatttgtcttgcctgctgtatcttccctatttagttgacccactttagtttatatgtttattagtaaacatgaaatggggaataagtgattttaagtacatcccatacatttaaatatctttgataattgttatttttttggcagataattcctctagaatgtgtatctttttatgatttagatgaagaaaattttacaacttttaacaccccacaccaattttagtttcattacttttacacacaccattttatcacaaatgactcaagttttaatgaatgtttataaattatttgaaacaaaatatgatcgctgtgtccaggatggcatagagaaagctggcaattaggttaacacttacatattatagtgcccctttaaggatttctctcttgccaccataccttttgtactttcccctatacaagatgtatctcattctcctcaagcatttataaatttttccttcaatgacatgaaaactgtgcaagcaaaaaccgaagaaaaacacttaagtacaactgtagtgacagtgatcaaagttttcagtgcatttattgtacattttaagaaaaaggtgaaaatcatttggggagtaaaaaaatgaaaaagctgaaacgagtaattttcctcaccatcaataaaccaaaaacaggaaagataaagaatgtataaatttcacgtaaattagtcacgtatcacttatcaatggggatacgttctaagaaatgcatagttagggaatcttgtgtgaaaatcagcttgtatttacacaaacccagatggtagagcctattttgtcccaaacctacacagcatgttactgtgctgaatactgcagacaattgtaacacaatatttgtgtatctaaatatagaaaaggtacagtaaaaatatggtctactaaggaaacactgttctatatgtggtccattactgactgaagtatactgtctagaagtctgaggctcaaagaaaagtaatccctcttctgaatccacaccccatcaattatcttactttcttctggggagatagatagatatactatctcactagcttgactaatggcaacaaagttccagcttgtgtagtctctttttattgaccacatgaatcgaaaacactcatcacaattaatggcactatcattaatgagacatgagtaactaaaaagtgatagaaaactattaacagtgcggctacatggtactgaaaatgcaggcattacaccagctgttacacaagcacaagcatgctctgtaagagctttacatttctgagattttgtatagtgattgagatgtctattttattattgatagactattactaatgtcaatattgaacactaccctggaattcctgcctggttttcctacccaaattgtaccactccttgaagaactacaggcacagtaaaaaaaatatggcgtattatgtgaactaaaagagttctaaaggagttcttaaaggagtggtagaatttgggtaggaaagtgattaagtccaacttaaaaccaacagtctcaaacgtctacaactacaatgtccaatgagccactagccacatgaggctatttaagtaaatttagtttaaaatccagttttcgaattacattagccacattgtcaagtgttcaaatcacaggtggttagtggctactgtactgggcaacatacattatagaacattttcattataggaagttttattgggcagtgctgctcttaaatcctaccttccactcaactcccatacaactttcttttgtacattttgatactttctacctaatggcagctcttccaaaatagctgctttaaactctgatttaattttcaatatttggtttcatttttcaacaggccaagaggcctctggtaatgaagtgctatatatatatatatgatggagtctcactgtgctgcccaggctacagtgcagtggctcgatcttggctctctccaatctccgccttgcaggttttcaagcaattctcctgcctcagcctccttagtagctgggaccacagacatctgtcaccacacccagctaactttttgtatttttggtagagacggggtttcgccatattgactgggctggtctcaaactcctgacctcaagtgatccacccaccttggtctcccaaagtgctgggattacatgcgtgagccaccacacttggcctacattttttctttatataccagaacatctataacaggcaccttatctactcattagtgaagagataattggattacacaggcaggcttgtttactacatccagaatgtagaaactgctttcttcaacatcttggttctagctagtaataacaatataattctttggcagatattcagaataacattttaaactacattttcttagaaaattgcattcttgtagtgagcagtgtatggtctcttttgttcagaatttaaaactgataaccaatgaaagccttttctcttattcctctaccgtcatttacatgataatctgaagctaatatgacaatatttaaatactaagtggtactagggaactacaagaatactgtaaagcttaagccattgttatcactgtcatttagcatttaataacaaaactatacagaattatgtgcataccaatgaatgttttgtaccatctagttaaattttttaaataaagttttatgggttaagcag

SEQ ID NO: 8615 - protein, 232 aa, Homo sapiens; identical to SEQ ID NO: 652

SEQ ID NO: 8616 - DNA, 8192 bp, Homo sapiens; identical to SEQ ID NO: 8610

SEQ ID NO: 8617 - protein, 1817 aa, Homo sapiens; identical to SEQ ID NO: 8611

SEQ ID NO: 8618 - DNA, 8192 bp, Homo sapiens; identical to SEQ ID NO: 8612

SEQ ID NO: 8619 - protein, 1873 aa, Homo sapiens; identical to SEQ ID NO: 8613

SEQ ID NO: 8620 - DNA, 5551 bp, Homo sapiens
aggatgaggacaggctgggcgacccctcgccgcccggcggggctcctcatgctgctcttctggttcttcgatctcgcggagccctctggccgcgcagctaatgaccccttcaccatcgtccatggaaatacgggcaagtgcatcaagccagtgtatggctggatagtagcagacgactgtgatgaaactgaggacaagttatggaagtgggtgtcccagcatcggctctttcatttgcactcccaaaagtgccttggcctcgatattaccaaatcggtaaatgagctgagaatgttcagctgtgactccagtgccatgctgtggtggaaatgtgagcaccactctctgtacggagctgcccggtaccggctggctctgaaggatggacatggcacagcaatctcaaatgcatctgatgtctggaagaaaggaggctcagaggaaagcctttgtgaccagccttatcatgagatctataccagagatgggaactcttatgggagaccttgtgaatttccattcttaattgatgggacctggcatcatgattgcattcttgatgaagatcatagtgggccatggtgtgccaccaccttaaattatgaatatgaccgaaagtggggcatctgcttaaagcctgaaaacggttgtgaagataattgggaaaagaacgagcagtttggaagttgctaccaatttaatactcagacggctctttcttggaaagaagcttatgtttcatgtcagaatcaaggagctgatttactgagcatcaacagtgctgctgaattaacttaccttaaagaaaaagaaggcattgctaagattttctggattggtttaaatcagctatactctgctagaggctgggaatggtcagaccacaaaccattaaactttctcaactgggatccagacaggcccagtgcacctactataggtggctccagctgtgcaagaatggatgctgagtctggtctgtggcagagcttttcctgtgaagctcaactgccctatgtctgcaggaaaccattaaataatacagtggagttaacagatgtctggacatactcagatacccgctgtgatgcaggctggctgccaaataatggattttgctatctgctggtaaatgaaagtaattcctgggataaggcacatgcgaaatgcaaagccttcagtagtgacctaatcagcattcattctctagcagatgtggaggtggttgtcacaaaactccataatgaggatatcaaagaagaagtgtggataggccttaagaacataaacataccaactttatttcagtggtcagatggtactgaagttactctaacatattgggatgagaatgagccaaatgttccctacaataagacgcccaactgtgtttcctacttaggagagctaggtcagtggaaagtccaatcatgtgaggagaaactaaaatatgtatgcaagagaaagggagaaaaactgaatgacgcaagttctgataagatgtgtcctccagatgagggctggaagagacatggagaaacctgttacaagatttatgaggatgaggtcccttttggaacaaactgcaatctgactatcactagcagatttgagcaagaatacctaaatgatttgatgaaaaagtatgataaatctctaagaaaatacttctggactggcctgagagatgtagattcttgtggagagtataactgggcaactgttggtggaagaaggcgggctgtaaccttttccaactggaattttcttgagccagcttccccgggcggctgcgtggctatgtctactggaaagtctgttggaaagtgggaggtgaaggactgcagaagcttcaaagcactttcaatttgcaagaaaatgagtggaccccttgggcctgaagaagcatcccctaagcctgatgacccctgtcctgaaggctggcagagtttccccgcaagtctttcttgttataaggtattccatgcagaaagaattgtaagaaagaggaactgggaagaagctgaacgattctgccaagcccttggagcacacctttctagcttcagccatgtggatgaaataaaggaatttcttcactttttaacggaccagttcagtggccagcattggctgtggattggtttgaataaaaggagcccagatttacaaggatcctggcaatggagtgatcgtacaccagtgtctactattatcatgccaaatgagtttcagcaggattatgacatcagagactgtgctgctgtcaaggtatttcataggccatggcgaagaggctggcatttctatgatgatagagaatttatttatttgaggccttttgcttgtgatacaaaacttgaatgggtgtgccaaattccaaaaggccgtactccaaaaacaccagactggtacaatccagaccgtgctggaattcatggacctccacttataattgaaggaagtgaatattggtttgttgctgatcttcacctaaactatgaagaagccgtcctgtactgtgccagcaatcacagctttcttgcaactataacatcttttgtgggactaaaagccatcaaaaacaaaatagcaaatatatctggtgatggacagaagtggtggataagaattagcgagtggccaatagatgatcattttacatactcacgatatccatggcaccgctttcctgtgacatttggagaggaatgcttgtacatgtctgccaagacttggcttatcgacttaggtaaaccaacagactgtagtaccaagttgcccttcatctgtgaaaaatataatgtttcttcgttagagaaatacagcccagattctgcagctaaagtgcaatgttctgagcaatggattccttttcagaataagtgttttctaaagatcaaacccgtgtctctcacattttctcaagcaagcgatacctgtcactcctatggtggcacccttccttcagtgttgagccagattgaacaagactttattacatccttgcttccggatatggaagctactttatggattggtttgcgctggactgcctatgaaaagataaacaaatggacagataacagagagctgacgtacagtaactttcacccattattggttagtgggaggctgagaataccagaaaatttttttgaggaagagtctcgctaccactgtgccctaatactcaacctccaaaaatcaccgtttactgggacgtggaattttacatcctgcagtgaacgccactttgtgtctctctgtcagaaatattcagaagttaaaagcagacagacgttgcagaatgcttcagaaactgtaaagtatctaaataatctgtacaaaataatcccaaagactctgacttggcacagtgctaaaagggagtgtctgaaaagtaacatgcagctggtgagcatcacggacccttaccagcaggcattcctcagtgtgcaggcgctccttcacaactcttccttatggatcggactcttcagtcaagatgatgaactcaactttggttggtcagatgggaaacgtcttcattttagtcgctgggctgaaactaatgggcaactcgaagactgtgtagtattagacactgatggattctggaaaacagttgattgcaatgacaatcaaccaggtgctatttgctactattcaggaaatgagactgaaaaagaggtcaaaccagttgacagtgttaaatgtccatctcctgttctaaatactccgtggataccatttcagaactgttgctacaatttcataataacaaagaataggcatatggcaacaacacaggatgaagttcatactaaatgccagaaactgaatccaaaatcacatattctgagtattcgagatgaaaaggagaataactttgttcttgagcaactgctgtacttcaattatatggcttcatgggtcatgttaggaataacttatagaaataagtctcttatgtggtttgataagaccccactgtcatatacacattggagagcaggaagaccaactataaaaaatgagaagtttttggctggtttaagtactgacggcttctgggatattcaaacctttaaagttattgaagaagcagtttattttcaccagcacagcattcttgcttgtaaaattgaaatggttgactacaaagaagaatataatactacactgccacagtttatgccatatgaagatggtatttacagtgttattcaaaaaaaggtaacatggtatgaagcattaaacatgtgttctcaaagtggaggtcacttggcaagcgttcacaaccaaaatggccagctctttctggaagatattgtaaaacgtgatggatttccactatgggttgggctctcaagtcatgatggaagtgaatcaagttttgaatggtctgatggtagtacatttgactatatcccatggaaaggccaaacatctcctggaaattgtgttctcttggatccaaaaggaacttggaaacatgaaaaatgcaactctgttaaggatggtgctatttgttataaacctacaaaatctaaaaagctgtcccgtcttacatattcatcaagatgtccagcagcaaaagagaatgggtcacggtggatccagtacaagggtcactgttacaagtctgatcaggcattgcacagtttttcagaggccaaaaaattgtgttcaaaacatgatcactctgcaactatcgtttccataaaagatgaagatgagaataaatttgtgagcagactgatgagggaaaataataacattaccatgagagtttggcttggattatctcaacattctgttgactgtccttcatctacttggattcagttccaagacagttgttacatttttctccaagaagccatcaaagtagaaagcatagaggatgtcagaaatcagtgtactgaccatggagcggacatgataagcatacataatgaagaagaaaatgcttttatactggatactttgaaaaagcaatggaaaggcccagatgatatcctactaggcatgttttatgacacagatgatgcgagtttcaagtggtttgataattcaaatatgacatttgataagtggacagaccaagatgatgatgaggatttagttgacacctgtgcttttctgcacatcaagacaggtgaatggaaaaaaggaaattgtgaagtttcttctgtggaaggaacactatgcaaaacagctatcccatacaaaaggaaatatttatcagataaccacattttaatatcagcattggtgattgctagcacggtaattttgacagttttgggagcaatcatttggttcctgtacaaaaaacattctgattctcgtttcaccacagttttttcaaccgcaccccaatcaccttataatgaagactgtgttttggtagttggagaagaaaatgaatatcctgttcaatttgactaagtttttggtaatcttgcactaagacatcaacaaaatgccctggcagagataacttgggaaagattttaatataaaacttgacattggatattag

SEQ ID NO: 8621 - protein, 1817 aa, Homo sapiens; identical to SEQ ID NO: 8611

SEQ ID NO: 8622 - DNA, 5719 bp, Homo sapiens
aggatgaggacaggctgggcgacccctcgccgcccggcggggctcctcatgctgctcttctggttcttcgatctcgcggagccctctggccgcgcagctaatgaccccttcaccatcgtccatggaaatacgggcaagtgcatcaagccagtgtatggctggatagtagcagacgactgtgatgaaactgaggacaagttatggaagtgggtgtcccagcatcggctctttcatttgcactcccaaaagtgccttggcctcgatattaccaaatcggtaaatgagctgagaatgttcagctgtgactccagtgccatgctgtggtggaaatgtgagcaccactctctgtacggagctgcccggtaccggctggctctgaaggatggacatggcacagcaatctcaaatgcatctgatgtctggaagaaaggaggctcagaggaaagcctttgtgaccagccttatcatgagatctataccagagatgggaactcttatgggagaccttgtgaatttccattcttaattgatgggacctggcatcatgattgcattcttgatgaagatcatagtgggccatggtgtgccaccaccttaaattatgaatatgaccgaaagtggggcatctgcttaaagcctgaaaacggttgtgaagataattgggaaaagaacgagcagtttggaagttgctaccaatttaatactcagacggctctttcttggaaagaagcttatgtttcatgtcagaatcaaggagctgatttactgagcatcaacagtgctgctgaattaacttaccttaaagaaaaagaaggcattgctaagattttctggattggtttaaatcagctatactctgctagaggctgggaatggtcagaccacaaaccattaaactttctcaactgggatccagacaggcccagtgcacctactataggtggctccagctgtgcaagaatggatgctgagtctggtctgtggcagagcttttcctgtgaagctcaactgccctatgtctgcaggaaaccattaaataatacagtggagttaacagatgtctggacatactcagatacccgctgtgatgcaggctggctgccaaataatggattttgctatctgctggtaaatgaaagtaattcctgggataaggcacatgcgaaatgcaaagccttcagtagtgacctaatcagcattcattctctagcagatgtggaggtggttgtcacaaaactccataatgaggatatcaaagaagaagtgtggataggccttaagaacataaacataccaactttatttcagtggtcagatggtactgaagttactctaacatattgggatgagaatgagccaaatgttccctacaataagacgcccaactgtgtttcctacttaggagagctaggtcagtggaaagtccaatcatgtgaggagaaactaaaatatgtatgcaagagaaagggagaaaaactgaatgacgcaagttctgataagatgtgtcctccagatgagggctggaagagacatggagaaacctgttacaagatttatgaggatgaggtcccttttggaacaaactgcaatctgactatcactagcagatttgagcaagaatacctaaatgatttgatgaaaaagtatgataaatctctaagaaaatacttctggactggcctgagagatgtagattcttgtggagagtataactgggcaactgttggtggaagaaggcgggctgtaaccttttccaactggaattttcttgagccagcttccccgggcggctgcgtggctatgtctactggaaagtctgttggaaagtgggaggtgaaggactgcagaagcttcaaagcactttcaatttgcaagaaaatgagtggaccccttgggcctgaagaagcatcccctaagcctgatgacccctgtcctgaaggctggcagagtttccccgcaagtctttcttgttataaggtattccatgcagaaagaattgtaagaaagaggaactgggaagaagctgaacgattctgccaagcccttggagcacacctttctagcttcagccatgtggatgaaataaaggaatttcttcactttttaacggaccagttcagtggccagcattggctgtggattggtttgaataaaaggagcccagatttacaaggatcctggcaatggagtgatcgtacaccagtgtctactattatcatgccaaatgagtttcagcaggattatgacatcagagactgtgctgctgtcaaggtatttcataggccatggcgaagaggctggcatttctatgatgatagagaatttatttatttgaggccttttgcttgtgatacaaaacttgaatgggtgtgccaaattccaaaaggccgtactccaaaaacaccagactggtacaatccagaccgtgctggaattcatggacctccacttataattgaaggaagtgaatattggtttgttgctgatcttcacctaaactatgaagaagccgtcctgtactgtgccagcaatcacagctttcttgcaactataacatcttttgtgggactaaaagccatcaaaaacaaaatagcaaatatatctggtgatggacagaagtggtggataagaattagcgagtggccaatagatgatcattttacatactcacgatatccatggcaccgctttcctgtgacatttggagaggaatgcttgtacatgtctgccaagacttggcttatcgacttaggtaaaccaacagactgtagtaccaagttgcccttcatctgtgaaaaatataatgtttcttcgttagagaaatacagcccagattctgcagctaaagtgcaatgttctgagcaatggattccttttcagaataagtgttttctaaagatcaaacccgtgtctctcacattttctcaagcaagcgatacctgtcactcctatggtggcacccttccttcagtgttgagccagattgaacaagactttattacatccttgcttccggatatggaagctactttatggattggtttgcgctggactgcctatgaaaagataaacaaatggacagataacagagagctgacgtacagtaactttcacccattattggttagtgggaggctgagaataccagaaaatttttttgaggaagagtctcgctaccactgtgccctaatactcaacctccaaaaatcaccgtttactgggacgtggaattttacatcctgcagtgaacgccactttgtgtctctctgtcagaaatattcagaagttaaaagcagacagacgttgcagaatgcttcagaaactgtaaagtatctaaataatctgtacaaaataatcccaaagactctgacttggcacagtgctaaaagggagtgtctgaaaagtaacatgcagctggtgagcatcacggacccttaccagcaggcattcctcagtgtgcaggcgctccttcacaactcttccttatggatcggactcttcagtcaagatgatgaactcaactttggttggtcagatgggaaacgtcttcattttagtcgctgggctgaaactaatgggcaactcgaagactgtgtagtattagacactgatggattctggaaaacagttgattgcaatgacaatcaaccaggtgctatttgctactattcaggaaatgagactgaaaaagaggtcaaaccagttgacagtgttaaatgtccatctcctgttctaaatactccgtggataccatttcagaactgttgctacaatttcataataacaaagaataggcatatggcaacaacacaggatgaagttcatactaaatgccagaaactgaatccaaaatcacatattctgagtattcgagatgaaaaggagaataactttgttcttgagcaactgctgtacttcaattatatggcttcatgggtcatgttaggaataacttatagaaataagtctcttatgtggtttgataagaccccactgtcatatacacattggagagcaggaagaccaactataaaaaatgagaagtttttggctggtttaagtactgacggcttctgggatattcaaacctttaaagttattgaagaagcagtttattttcaccagcacagcattcttgcttgtaaaattgaaatggttgactacaaagaagaatataatactacactgccacagtttatgccatatgaagatggtatttacagtgttattcaaaaaaaggtaacatggtatgaagcattaaacatgtgttctcaaagtggaggtcacttggcaagcgttcacaaccaaaatggccagctctttctggaagatattgtaaaacgtgatggatttccactatgggttgggctctcaagtcatgatggaagtgaatcaagttttgaatggtctgatggtagtacatttgactatatcccatggaaaggccaaacatctcctggaaattgtgttctcttggatccaaaaggaacttggaaacatgaaaaatgcaactctgttaaggatggtgctatttgttataaacctacaaaatctaaaaagctgtcccgtcttacatattcatcaagatgtccagcagcaaaagagaatgggtcacggtggatccagtacaagggtcactgttacaagtctgatcaggcattgcacagtttttcagaggccaaaaaattgtgttcaaaacatgatcactctgcaactatcgtttccataaaagatgaagatgagaataaatttgtgagcagactgatgagggaaaataataacattaccatgagagtttggcttggattatctcaacattctgttgaccagtcttggagttggttagatggatcagaagtgacatttgtcaaatgggaaaataaaagtaagagtggtgttggaagatgtagcatgttgatagcttcaaatgaaacttggaaaaaagttgaatgtgaacatggttttggaagagttgtctgcaaagtgcctctggactgtccttcatctacttggattcagttccaagacagttgttacatttttctccaagaagccatcaaagtagaaagcatagaggatgtcagaaatcagtgtactgaccatggagcggacatgataagcatacataatgaagaagaaaatgcttttatactggatactttgaaaaagcaatggaaaggcccagatgatatcctactaggcatgttttatgacacagatgatgcgagtttcaagtggtttgataattcaaatatgacatttgataagtggacagaccaagatgatgatgaggatttagttgacacctgtgcttttctgcacatcaagacaggtgaatggaaaaaaggaaattgtgaagtttcttctgtggaaggaacactatgcaaaacagctatcccatacaaaaggaaatatttatcagataaccacattttaatatcagcattggtgattgctagcacggtaattttgacagttttgggagcaatcatttggttcctgtacaaaaaacattctgattctcgtttcaccacagttttttcaaccgcaccccaatcaccttataatgaagactgtgttttggtagttggagaagaaaatgaatatcctgttcaatttgactaagtttttggtaatcttgcactaagacatcaacaaaatgccctggcagagataacttgggaaagattttaatataaaacttgacattggatattag

SEQ ID NO: 8623 - protein, 1873 aa, Homo sapiens; identical to SEQ ID NO: 8613

SEQ ID NO: 8624 - DNA, 597 bp, Homo sapiens
acccgccgtcatgctccgggccgcgctgcccgcgctcctgctgccgttgctgggcctcgccgctgctgccgtcgcggactgtccttcatctacttggattcagttccaagacagttgttacatttttctccaagaagccatcaaagtagaaagcatagaggatgtcagaaatcagtgtactgaccatggagcggacatgataagcatacataatgaagaagaaaatgcttttatactggatactttgaaaaagcaatggaaaggcccagatgatatcctactaggcatgttttatgacacagatgatgcgagtttcaagtggtttgataattcaaatatgacatttgataagtggacagaccaagatgatgatgaggatttagttgacacctgtgcttttctgcacatcaagacaggtgaatggaaaaaaggaaattgtgaagtttcttctgtggaaggaacactatgcaaaacagctatcagataaccacattttaatatcagcattggtgattgctagcacggtaattttgacagttttgggagcaatcatttggttcctgtacaaaaaacattctgattctcgtttcaccacag

SEQ ID NO: 8625 - protein, 158 aa, Homo sapiens
MLRAALPALLLPLLGLAAAAVADCPSSTWIQFQDSCYIFLQEAIKVESIEDVRNQCTDHGADMISIHNEEENAFILDTLKKQWKGPDDILLGMFYDTDDASFKWFDNSNMTFDKWTDQDDDEDLVDTCAFLHIKTGEWKKGNCEVSSVEGTLCKTAIR

SEQ ID NO: 8626 - DNA, 368 bp, Homo sapiens
tatgtgagatggtgacacatcctatagggaaaacaggcagataaggatgaattccagtgcaagaagggaggtgttgcactttatttttatttttagtacagtggccagggaaggcctcatttaataaggccatgattttgcataatgaagacctaaagtcaaagtgaaagcctgtcatgtagatagggattaggcttagtctgactttaaggagtaaaacagtagagaacatggagttgaagcagcaaggaaacaacccaacagttaagtgtagctgccatcttggcaaacagggagttccccttcataccaagggtaagctggaattcaggttagaagaaatttggaagtagggctacacacacata

SEQ ID NO: 8627 - protein, 40 aa, Homo sapiens [sequence omitted]

SEQ ID NO: 8628 - DNA, 1514 bp, Homo sapiens
actttttcagttgtttagatcttaggcatgtgctggtatccacagttaattccctgctaaatgccatgtttatcaccctaattaatagaatggaggggactccaaagctggaactgaagtccaaattgtttgtacagtaatatgtttaatgttcattttctctgtatgaatgtgattggtaactaggatatgtatattttaatagaatttttaacaaaacttcttagaaaattaaaataggcatattactaggtgacatgtctactttttaatttttaagagcatccggccaaatgcaaaattagtacctcaaagtaaaaattgaactgtaaactctatcagcattgtttcaaaatagtcatttttagcactggggaaaaataaacaataagacatgcttactttttaatttttatttttttgagactgagtctctctctgttgcccaggctggagtacaatggcgtgatctcggctcactgcaaatctccgcctcccaggttcaagcgattctcctgcctcagcctcctgagtagctgggattacaggcaactgccaccatgcccggctaatttttgtatttttagtagagatggggtttcaccatgttggccaggctggtctcgaactcgtgaccgcaggtgatcctcccgcctcggcctcccaaagtgctgggattacaggcatgagccaccgcgcctggcctctgcttactttttatatagcaaaatgattcctcttggcaagatgtttcttatattattccaaagttatttcataccattattatgtaaatatgaagagtttttttctgtttataattgtttataaaacaatgacttttaaagatttagtgcttaacattttcccaagtgtgggaacattatttttagattgagtaggtaccttgtagcagtgtgctttgcattttctgatgtattacatgactgtttcttttgtaaagagaatcaactaggtatttaagattttttaacatgtgttaaacagagaaagggtccatgaaggaaagtgtatgagttgcatttgtaaaaatgagactttttcagtggaactctaaaccttgtgatgactactaacaaatgtaaaattatgagtgattaagaaaacattgctttgtggttatcactttaagttttgacacctagattatagtcttagtaatagcatccactggaaaaggtgaaaatgttttattcggcatttaacttacatttgtactttatttttgtataaaatccatagatttattttacatttagagtatttacactatgataaagttgtaaataattttctaagacagtttttatatagtctacagttgtcctgatttcttattgaatttgttagactagttctcttgtcctgtgatctgtgtacaattttagtcactaagactttcctccaagaactaagccaacttgatgtgaaaagcacagctgtatataatggtgatgtcataataaagttgttttatcttttaagtaaaagta

SEQ ID NO: 8629 - protein, 46 aa, Homo sapiens
MGFHHVGQAGLELVTAGDPPASASQSAGITGMSHRAWPLLTFYIAK

SEQ ID NO: 8630 - DNA, 6909 bp, Homo sapiens
ggcgggagccgcgtgcgcccgaggacccggccggaaggcttgcgccagctcaggatgaggacaggctgggcgacccctcgccgcccggcggggctcctcatgctgctcttctggttcttcgatctcgcggagccctctggccgcgcagctaatgaccccttcaccatcgtccatggaaatacgggcaagtgcatcaagccagtgtatggctggatagtagcagacgactgtgatgaaactgaggacaagttatggaagtgggtgtcccagcatcggctctttcatttgcactcccaaaagtgccttggcctcgatattaccaaatcggtaaatgagctgagaatgttcagctgtgactccagtgccatgctgtggtggaaatgtgagcaccactctctgtacggagctgcccggtaccggctggctctgaaggatggacatggcacagcaatctcaaatgcatctgatgtctggaagaaaggaggctcagaggaaagcctttgtgaccagccttatcatgagatctataccagagatgggaactcttatgggagaccttgtgaatttccattcttaattgatgggacctggcatcatgattgcattcttgatgaagatcatagtgggccatggtgtgccaccaccttaaattatgaatatgaccgaaagtggggcatctgcttaaagcctgaaaacggttgtgaagataattgggaaaagaacgagcagtttggaagttgctaccaatttaatactcagacggctctttcttggaaagaagcttatgtttcatgtcagaatcaaggagctgatttactgagcatcaacagtgctgctgaattaacttaccttaaagaaaaagaaggcattgctaagattttctggattggtttaaatcagctatactctgctagaggctgggaatggtcagaccacaaaccattaaactttctcaactgggatccagacaggcccagtgcacctactataggtggctccagctgtgcaagaatggatgctgagtctggtctgtggcagagcttttcctgtgaagctcaactgccctatgtctgcaggaaaccattaaataatacagtggagttaacagatgtctggacatactcagatacccgctgtgatgcaggctggctgccaaataatggattttgctatctgctggtaaatgaaagtaattcctgggataaggcacatgcgaaatgcaaagccttcagtagtgacctaatcagcattcattctctagcagatgtggaggtggttgtcacaaaactccataatgaggatatcaaagaagaagtgtggataggccttaagaacataaacataccaactttatttcagtggtcagatggtactgaagttactctaacatattgggatgagaatgagccaaatgttccctacaataagacgcccaactgtgtttcctacttaggagagctaggtcagtggaaagtccaatcatgtgaggagaaactaaaatatgtatgcaagagaaagggagaaaaactgaatgacgcaagttctgataagatgtgtcctccagatgagggctggaagagacatggagaaacctgttacaagatttatgaggatgaggtcccttttggaacaaactgcaatctgactatcactagcagatttgagcaagaatacctaaatgatttgatgaaaaagtatgataaatctctaagaaaatacttctggactggcctgagagatgtagattcttgtggagagtataactgggcaactgttggtggaagaaggcgggctgtaaccttttccaactggaattttcttgagccagcttccccgggcggctgcgtggctatgtctactggaaagtctgttggaaagtgggaggtgaaggactgcagaagcttcaaagcactttcaatttgcaagaaaatgagtggaccccttgggcctgaagaagcatcccctaagcctgatgacccctgtcctgaaggctggcagagtttccccgcaagtctttcttgttataaggtattccatgcagaaagaattgtaagaaagaggaactgggaagaagctgaacgattctgccaagcccttggagcacacctttctagcttcagccatgtggatgaaataaaggaatttcttcactttttaacggaccagttcagtggccagcattggctgtggattggtttgaataaaaggagcccagatttacaaggatcctggcaatggagtgatcgtacaccagtgtctactattatcatgccaaatgagtttcagcaggattatgacatcagagactgtgctgctgtcaaggtatttcataggccatggcgaagaggctggcatttctatgatgatagagaatttatttatttgaggccttttgcttgtgatacaaaacttgaatgggtgtgccaaattccaaaaggccgtactccaaaaacaccagactggtacaatccagaccgtgctggaattcatggacctccacttataattgaaggaagtgaatattggtttgttgctgatcttcacctaaactatgaagaagccgtcctgtactgtgccagcaatcacagctttcttgcaactataacatcttttgtgggactaaaagccatcaaaaacaaaatagcaaatatatctggtgatggacagaagtggtggataagaattagcgagtggccaatagatgatcattttacatactcacgatatccatggcaccgctttcctgtgacatttggagaggaatgcttgtacatgtctgccaagacttggcttatcgacttaggtaaaccaacagactgtagtaccaagttgcccttcatctgtgaaaaatataatgtttcttcgttagagaaatacagcccagattctgcagctaaagtgcaatgttctgagcaatggattccttttcagaataagtgttttctaaagatcaaacccgtgtctctcacattttctcaagcaagcgatacctgtcactcctatggtggcacccttccttcagtgttgagccagattgaacaagactttattacatccttgcttccggatatggaagctactttatggattggtttgcgctggactgcctatgaaaagataaacaaatggacagataacagagagctgacgtacagtaactttcacccattattggttagtgggaggctgagaataccagaaaatttttttgaggaagagtctcgctaccactgtgccctaatactcaacctccaaaaatcaccgtttactgggacgtggaattttacatcctgcagtgaacgccactttgtgtctctctgtcagaaatattcagaagttaaaagcagacagacgttgcagaatgcttcagaaactgtaaagtatctaaataatctgtacaaaataatcccaaagactctgacttggcacagtgctaaaagggagtgtctgaaaagtaacatgcagctggtgagcatcacggacccttaccagcaggcattcctcagtgtgcaggcgctccttcacaactcttccttatggatcggactcttcagtcaagatgatgaactcaactttggttggtcagatgggaaacgtcttcattttagtcgctgggctgaaactaatgggcaactcgaagactgtgtagtattagacactgatggattctggaaaacagttgattgcaatgacaatcaaccaggtgctatttgctactattcaggaaatgagactgaaaaagaggtcaaaccagttgacagtgttaaatgtccatctcctgttctaaatactccgtggataccatttcagaactgttgctacaatttcataataacaaagaataggcatatggcaacaacacaggatgaagttcatactaaatgccagaaactgaatccaaaatcacatattctgagtattcgagatgaaaaggagaataactttgttcttgagcaactgctgtacttcaattatatggcttcatgggtcatgttaggaataacttatagaaataagtctcttatgtggtttgataagaccccactgtcatatacacattggagagcaggaagaccaactataaaaaatgagaagtttttggctggtttaagtactgacggcttctgggatattcaaacctttaaagttattgaagaagcagtttattttcaccagcacagcattcttgcttgtaaaattgaaatggttgactacaaagaagaatataatactacactgccacagtttatgccatatgaagatggtatttacagtgttattcaaaaaaaggtaacatggtatgaagcattaaacatgtgttctcaaagtggaggtcacttggcaagcgttcacaaccaaaatggccagctctttctggaagatattgtaaaacgtgatggatttccactatgggttgggctctcaagtcatgatggaagtgaatcaagttttgaatggtctgatggtagtacatttgactatatcccatggaaaggccaaacatctcctggaaattgtgttctcttggatccaaaaggaacttggaaacatgaaaaatgcaactctgttaaggatggtgctatttgttataaacctacaaaatctaaaaagctgtcccgtcttacatattcatcaagatgtccagcagcaaaagagaatgggtcacggtggatccagtacaagggtcactgttacaagtctgatcaggcattgcacagtttttcagaggccaaaaaattgtgttcaaaacatgatcactctgcaactatcgtttccataaaagatgaagatgagaataaatttgtgagcagactgatgagggaaaataataacattaccatgagagtttggcttggattatctcaacattctgttgaccagtcttggagttggttagatggatcagaagtgacatttgtcaaatgggaaaataaaagtaagagtggtgttggaagatgtagcatgttgatagcttcaaatgaaacttggaaaaaagttgaatgtgaacatggttttggaagagttgtctgcaaagtgcctctgggccctgattacacagcaatagctatcatagttgccacactaagtatcttagttctcatgggcggactgatttggttcctcttccaaaggcaccgtttgcacctggcgggtttctcatcagttcgatatgcacaaggagtgaatgaagatgagattatgcttccttctttccatgactaaattcttctaaaagttttctaatttgcactaatgtgttatgagaaattagtcacttaaaatgtcccagtgtcagtatttactctgctccaaagtagaactcttaaatactttttcagttgtttagatcttaggcatgtgctggtatccacagttaattccctgctaaatgccatgtttatcaccctaattaatagaatggaggggactccaaagctggaactgaagtccaaattgtttgtacagtaatatgtttaatgttcattttctctgtatgaatgtgattggtaactaggatatgtatattttaatagaatttttaacaaaacttcttagaaaattaaaataggcatattactaggtgacatgtctactttttaatttttaagagcatccggccaaatgcaaaattagtacctcaaagtaaaaattgaactgtaaactctatcagcattgtttcaaaatagtcatttttagcactggggaaaaataaacaataagacatgcttactttttaatttttatttttttgagactgagtctctctctgttgcccaggctggagtacaatggcgtgatctcggctcactgcaaatctccgcctcccaggttcaagcgattctcctgcctcagcctcctgagtagctgggattacaggcaactgccaccatgcccggctaatttttgtatttttagtagagatggggtttcaccatgttggccaggctggtctcgaactcgtgaccgcaggtgatcctcccgcctcggcctcccaaagtgctgggattacaggcatgagccaccgcgcctggcctctgcttactttttatatagcaaaatgattcctcttggcaagatgtttcttatattattccaaagttatttcataccattattatgtaaatatgaagagtttttttctgtttataattgtttataaaacaatgacttttaaagatttagtgcttaacattttcccaagtgtgggaacattatttttagattgagtaggtaccttgtagcagtgtgctttgcattttctgatgtattacatgactgtttcttttgtaaagagaatcaactaggtatttaagactgataattttacaatttatatgcttcacatagcatgtcaacttttgactaagaattttgttttacttttttaacatgtgttaaacagagaaagggtccatgaaggaaagtgtatgagttgcatttgtaaaaatgagactttttcagtggaactctaaaccttgtgatgactactaacaaatgtaaaattatgagtgattaagaaaacattgctttgtggttatcactttaagttttgacacctagattatagtcttagtaatagcatccactggaaaaggtgaaaatgttttattcggcatttaacttacatttgtactttatttttgtataaaatccatagatttattttacatttagagtatttacactatgataaagttgtaaataattttctaagacagtttttatatagtctacagttgtcctgatttcttattgaatttgttagactagttctcttgtcctgtgatctgtgtacaattttagtcactaagactttcctccaagaactaagccaacttgatgtgaaaagcacagctgtatataatggtgatgtcataataaagttgttttatcttttaagtaaaagta

SEQ ID NO: 8631 - protein, 1722 aa, Homo sapiens
MRTGWATPRRPAGLLMLLFWFFDLAEPSGRAANDPFTIVHGNTGKCIKPVYGWIVADDCDETEDKLWKWVSQHRLFHLHSQKCLGLDITKSVNELRMFSCDSSAMLWWKCEHHSLYGAARYRLALKDGHGTAISNASDVWKKGGSEESLCDQPYHEIYTRDGNSYGRPCEFPFLIDGTWHHDCILDEDHSGPWCATTLNYEYDRKWGICLKPENGCEDNWEKNEQFGSCYQFNTQTALSWKEAYVSCQNQGADLLSINSAAELTYLKEKEGIAKIFWIGLNQLYSARGWEWSDHKPLNFLNWDPDRPSAPTIGGSSCARMDAESGLWQSFSCEAQLPYVCRKPLNNTVELTDVWTYSDTRCDAGWLPNNGFCYLLVNESNSWDKAHAKCKAFSSDLISIHSLADVEVVVTKLHNEDIKEEVWIGLKNINIPTLFQWSDGTEVTLTYWDENEPNVPYNKTPNCVSYLGELGQWKVQSCEEKLKYVCKRKGEKLNDASSDKMCPPDEGWKRHGETCYKIYEDEVPFGTNCNLTITSRFEQEYLNDLMKKYDKSLRKYFWTGLRDVDSCGEYNWATVGGRRRAVTFSNWNFLEPASPGGCVAMSTGKSVGKWEVKDCRSFKALSICKKMSGPLGPEEASPKPDDPCPEGWQSFPASLSCYKVFHAERIVRKRNWEEAERFCQALGAHLSSFSHVDEIKEFLHFLTDQFSGQHWLWIGLNKRSPDLQGSWQWSDRTPVSTIIMPNEFQQDYDIRDCAAVKVFHRPWRRGWHFYDDREFIYLRPFACDTKLEWVCQIPKGRTPKTPDWYNPDRAGIHGPPLIIEGSEYWFVADLHLNYEEAVLYCASNHSFLATITSFVGLKAIKNKIANISGDGQKWWIRISEWPIDDHFTYSRYPWHRFPVTFGEECLYMSAKTWLIDLGKPTDCSTKLPFICEKYNVSSLEKYSPDSAAKVQCSEQWIPFQNKCFLKIKPVSLTFSQASDTCHSYGGTLPSVLSQIEQDFITSLLPDMEATLWIGLRWTAYEKINKWTDNRELTYSNFHPLLVSGRLRIPENFFEEESRYHCALILNLQKSPFTGTWNFTSCSERHFVSLCQKYSEVKSRQTLQNASETVKYLNNLYKIIPKTLTWHSAKRECLKSNMQLVSITDPYQQAFLSVQALLHNSSLWIGLFSQDDELNFGWSDGKRLHFSRWAETNGQLEDCVVLDTDGFWKTVDCNDNQPGAICYYSGNETEKEVKPVDSVKCPSPVLNTPWIPFQNCCYNFIITKNRHMATTQDEVHTKCQKLNPKSHILSIRDEKENNFVLEQLLYFNYMASWVMLGITYRNKSLMWFDKTPLSYTHWRAGRPTIKNEKFLAGLSTDGFWDIQTFKVIEEAVYFHQHSILACKIEMVDYKEEYNTTLPQFMPYEDGIYSVIQKKVTWYEALNMCSQSGGHLASVHNQNGQLFLEDIVKRDGFPLWVGLSSHDGSESSFEWSDGSTFDYIPWKGQTSPGNCVLLDPKGTWKHEKCNSVKDGAICYKPTKSKKLSRLTYSSRCPAAKENGSRWIQYKGHCYKSDQALHSFSEAKKLCSKHDHSATIVSIKDEDENKFVSRLMRENNNITMRVWLGLSQHSVDQSWSWLDGSEVTFVKWENKSKSGVGRCSMLIASNETWKKVECEHGFGRVVCKVPLGPDYTAIAIIVATLSILVLMGGLIWFLFQRHRLHLAGFSSVRYAQGVNEDEIMLPSFHD

SEQ ID NO: 8632 - DNA, 1040 bp, Homo sapiens
gcggggctcctcatgctgctcttctggttcttcgatctcgcggagccctctggccgcgcagagcagacttgtggccttgtttggggaagcactggaattttgaacccccagccatttgggtcaattgtttggcaagagtgtccgcttcatgatgctggtgatggcatgcacctcgtcacatgtgcacggctaggcttgtgcaggtggcctctattacccaaacactgaaggagcccctctgtgtccttggagagatgccaggtgcttagtttacatttttgcctgcttggagagctaacagcttgaagtaaaccaatccatcagggactcctgaggttttcaccagccaacaccacccaatcgtgcgtgaagactttctgactccctggacattgccatggactcaactgtcacttcaggacctgtttttgaactaacaaacctagacttctgattctctcttgctgcacctacctgtacattccgaacacatggtagagactctacaaaatgcttaatatgtgatctatggacggttcccctgaaattataaatgctgccatcttcatccttcttgttttcccaagctatttccctatccatttgtctgtggttataaatgtcaatatccagcttctctttggaatgtgtgaagctctttggtctagggaccaaaggcaggaattatttagtgatcagacaataagaaaacactgaaagagatgatttgcctttgatggatgtaaaaatactaaaaatttattttcaatttatggtaatgctacttagccattttctctcaaacaccactggagaatttatataacatgaagcatatacaaaatgcatctagggggtaatgaggcttctcttcatcaacttctgccttttagatttgccccaatattgtacttggaggtaaatattaaaactccattgaggactggtataaagttgtaaagtgaacaaaacccagtagaaagctattgataaagaatctattttataaaataagttttatacaataaaatctactctgt

SEQ ID NO: 8633 - protein, 71 aa, Homo sapiens
MLLFWFFDLAEPSGRAEQTCGLVWGSTGILNPQPFGSIVWQECPLHDAGDGMHLVTCARLGLCRWPLLPKH

SEQ ID NO: 8634 - DNA, 1672 bp, Homo sapiens
aggccgcgctcagcaggcggggcgggagccgcgtgcgcccgaggacccggccggaaggcttgcgccagctcaggatgaggacaggctgggcgacccctcgccgcccggcggggctcctcatgctgctcttctggttcttcgatctcgcggagccctctggccgcgcagctaagctaagttaccatctggtttagacttccttcggagagcgatgggaagagatttctcagagtgtgaatggcatcatcctatctacagcaaggacctggaaatgaaccctgctctgagtcacacttctctattctcctttgaccctgtgtgctaggaactaccaaaagaatcctttaaaataagatcctttattgccttgataatttattctgcctgccccacaatccaaggtggaaaagttcactgcagcaactaactacagtgaaaatgcactaacttttcaatcactaacctcttggttcccatcgacatctgcttcagtcctgtttttatctccttcacaaatttcaggatttccctaattcttgcaatctctgcaatcactgccctttatcactgacccaaagcaaaaagcaccaggtttaactctgttccccctgtgctaggtccccacaggttttgttatcctgtatccttccttactcctagcagctactctgatcgattttctctcaccctcagagcagacttgtggccttgtttggggaagcactggaattttgaacccccagccatttgggtcaattgtttggcaagagtgtccgcttcatgatgctggtgatggcatgcacctcgtcacatgtgcacggctaggcttgtgcaggtggcctctattacccaaacactgaaggagcccctctgtgtccttggagagatgccaggtgcttagtttacatttttgcctgcttggagagctaacagcttgaagtaaaccaatccatcagggactcctgaggttttcaccagccaacaccacccaatcgtgcgtgaagactttctgactccctggacattgccatggactcaactgtcacttcaggacctgtttttgaactaacaaacctagacttctgattctctcttgctgcacctacctgtacattccgaacacatggtagagactctacaaaatgcttaatatgtgatctatggacggttcccctgaaattataaatgctgccatcttcatccttcttgttttcccaagctatttccctatccatttgtctgtggttataaatgtcaatatccagcttctctttggaatgtgtgaagctctttggtctagggaccaaaggcaggaattatttagtgatcagacaataagaaaacactgaaagagatgatttgcctttgatggatgtaaaaatactaaaaatttattttcaatttatggtaatgctacttagccattttctctcaaacaccactggagaatttatataacatgaagcatatacaaaatgcatctagggggtaatgaggcttctcttcatcaacttctgccttttagatttgccccaatattgtacttggaggtaaatattaaaactccattgaggactggtataaagttgtaaagtgaacaaaacccagtagaaagctattgataaagaatctattttataaaataagttttatacaataaaatctactctgt

SEQ ID NO: 8635 - protein, 39 aa, Homo sapiens
MRTGWATPRRPAGLLMLLFWFFDLAEPSGRAAKLSYHLV

SEQ ID NO: 8636 - DNA, 390 bp, Homo sapiens
agttgaaggctgcagtgagctatggttgcaccactgcactcctgcctgggcaactgaatgagaccccacctcaaaaaagtgctgttctagaaacagaggtactaagatgacacctaaaggtgcaaaagaaaaccatctctgcacactaccaaacagacagtgcgtgaacgaagcagaccctcctgaccacagccaaggactggagagcttggtgaaactggtgctcaaggtagaaattccctgcgattgctactgcaacttatactaaacgtcccaagtgaagtgaagggagaaaaaagagatattaagcaagaaggcccacttgtttatgcattgctttagaagataatctgtaattgcatattaataagtaaagttaacgttacactt

SEQ ID NO: 8637 - protein, 53 aa, Homo sapiens
MTPKGAKENHLCTLPNRQCVNEADPPDHSQGLESLVKLVLKVEIPCDCYCNLY

SEQ ID NO: 8638 - DNA, 5628 bp, Homo sapiens
cccgagtgtcggttcactgtggagacagcggtggcggagtgggtctccagggctctgggctggcaaggcccccggagggggtggggcgcggaggaggctacggatccgcttccgcgcggcggggccgggtgcttgggacgcggctctgggctcccgggataaggggctcccgggacaaggggctcccggagagcccagtggttagcgatgctgctgtcgccgtcgctgctgctgctgctgctgctgggggcgccgcggggctgcgccgagggtgtggcggcggcgcttacccccgagcggctcctggagtggcaggataaaggaatatttgttatccaaagtgagagtctcaagaaatgcattcaagcaggtaaatcggttctgaccctggagaactgcaagcaagcaaacaagcacatgctgtggaaatgggtttcaaaccatggcctctttaacataggaggcagtggttgcctgggcctgaatttctccgccccagagcagccattaagcttatatgaatgtgactccaccctcgtttccttacggtggcgctgtaacaggaagatgatcacaggcccgctgcagtactctgtccaggtggcgcatgacaacacagtggtggcctcacggaagtatattcataagtggatttcttatgggtcaggtggtggagacatttgtgaatatctacacaaagatttgcatacaatcaaagggaacacccacgggatgccgtgtatgtttcccttccagtataaccatcagtggcatcatgaatgtacccgtgaaggtcgggaagatgacttactgtggtgtgccacgacaagccgttatgaaagagatgaaaagtggggattttgccctgatcccacctctgcagaagtaggttgtgatactatttgggagaaggacctcaattcacacatttgctaccagttcaacctgctttcatctctctcttggagtgaggcacattcttcatgccagatgcaaggaggtacgctgttaagtattacagatgaaactgaagaaaatttcataagggagcacatgagcagtaaaacagtggaggtgtggatgggcctcaatcagctggatgaacacgctggctggcagtggtctgatggaacgccgctcaactatctgaattggagcccagaggtaaattttgagccatttgttgaagatcactgtggaacatttagttcatttatgccaagtgcctggaggagtcgggattgtgagtccaccttgccatatatatgtaaaaaatatctaaaccacattgatcatgaaatagttgaaaaagatgcgtggaaatattatgctacccactgtgagcctggctggaatccctacaatcgtaattgctacaaacttcagaaagaagaaaagacctggcatgaggctctgcgttcttgtcaggctgataacagtgcattaatagacataacctcattagcagaggtggagtttcttgtaaccctccttggagatgaaaatgcatcagaaacatggattggtttgagcagcaataaaattccagtttcctttgaatggtctaatgactcttcagtcatctttactaattggcacacacttgagccccacatttttccaaatagaagccagctgtgtgtctcagcagagcagtctgagggacactggaaagtcaaaaattgtgaagaaagacttttttacatttgtaaaaaagcaggccatgtcctctctgatgctgaatcaggatgtcaagagggatgggagagacatggtggattctgttacaaaattgacacagtccttcgaagctttgaccaagcttccagcggttattactgtcctcctgcacttgtaaccattacaaacaggtttgaacaggcttttattaccagtttgatcagtagtgtggtaaaaatgaaggacagttatttttggatagctcttcaggaccaaaatgatacgggagaatacacttggaagccagtagggcagaaacccgagccggtgcagtacacacactggaacacacaccagccgcgctacagtggtggctgtgttgccatgcgaggaaggcatccacttggtcgctgggaagtgaagcactgtcggcactttaaggcaatgtccttgtgcaagcagccagttgaaaatcaggaaaaagcagagtatgaagagagatggccctttcacccctgctatttggactgggagtcagagcctggtctggccagttgcttcaaggtatttcatagtgaaaaagttctgatgaaaagaacatggagagaagctgaagcattttgcgaagaatttggagctcatcttgcaagctttgcccatattgaggaagagaattttgtgaatgagctcttacattcaaaatttaattggacagaagaaaggcagttctggattggatttaataaaagaaacccactgaatgccggctcatgggagtggtctgatagaactcctgttgtctcttcgtttttagacaacacttattttggagaagatgcaagaaactgtgctgtttataaggcaaacaaaacattgctgcccttacactgtggttccaaacgtgaatggatatgcaaaatcccaagagatgtgaaacccaagattccgttctggtaccagtacgatgtaccctggctcttttatcaggatgcagaatacctttttcatacctttgcctcagaatggttgaactttgagtttgtctgtagctggctgcacagtgatcttctcacaattcattctgcacatgagcaagaattcatccacagcaaaataaaagcgctatcaaagtatggtgcaagttggtggattggacttcaagaagaaagagccaatgatgaatttcgctggagagatggaacaccagtgatataccagaactgggacacaggaagagaaagaactgtgaataatcagagccagagatgtggctttatttcttctataacaggactctggggtagtgaagagtgttcagtttctatgcctagtatctgtaagcgaaaaaaggtttggctcatagagaaaaagaaagatacaccaaaacaacatggaacgtgtcccaaaggatggctatattttaactataagtgccttctgctgaatatccccaaagacccaagcagttggaagaactggacgcatgctcaacatttctgtgctgaagaaggggggaccctggtcgccattgaaagtgaggtggagcaagctttcattactatgaatctttttggccagaccaccagtgtgtggataggtttacaaaatgatgattatgaaacatggctaaatggaaagcctgtggtatattctaactggtctccatttgatataataaatattccaagtcacaataccactgaagttcagaaacacattcctctctgtgccttactctcaagtaatcctaattttcatttcactggaaaatggtattttgaagactgtggaaaggaaggctatgggtttgtttgtgaaaaaatgcaagatacttctggacacggtgtaaatacatctgatatgtatccaatgcccaataccttagaatatggaaacagaacttacaaaataattaatgcaaatatgacttggtatgcagcaataaaaacctgcctgatgcacaaagcacaactggtcagcatcacagaccagtatcaccagtccttcctcactgttgtcctcaaccggctaggatatgcccactggattggactgttcaccacagataatggtcttaattttgactggtctgatggcaccaaatcttctttcactttttggaaagatgaggagtcctccctccttggtgactgcgtttttgccgacagcaacggacgctggcatagcacagcctgcgagtcatttctgcaaggtgccatttgtcatgtgccacctgaaacaagacaatctgaacacccagagttgtgctcagaaacatctattccctggataaaatttaaaagtaattgctacagtttttctacagtcctagacagtatgagttttgaggctgctcatgaattttgcaaaaaggaaggttctaatcttttaacaatcaaggatgaggctgaaaatgcatttctcctagaagagctgtttgcttttggttcttctgtccagatggtttggttgaatgctcaatttgatggtaacaatgaaaccataaagtggtttgatggaactcccacagaccagtcaaactggggcattcggaagccagacacagactacttcaagccccatcattgtgttgccttgaggatccctgaaggattatggcagctatccccgtgtcaagaaaaaaaaggctttatatgtaaaatggaggcagatattcacactgcagaggcgctgccagaaaaaggaccaagtcacagcatcattcctcttgcggttgtactgacactgatagtcattgtggccatttgcacactttccttctgcatatacaagcataacggtggcttcttcaggagacttgcagggtttcggaatccttactatcctgcaaccaactttagtacagtatatttagaagaaaatattctcatttctgatcttgagaagagtgaccaataataatgaggtcagagaatgccacagacaccagggtaagtaaagaagactaaacaggagtctcatctgtctttccctttacagcacagatgccattagaatgtgaattgggtcactattttaattattcttgaagtgattactggttttgaatcttaaccaaatcagatgggttttgatttattcatttccctaaactgtgatccattcttaaaaggggtaaattatgcattggttatttttcagaaagacaagaactattaaaagaaactccctattgaaaactctgaaatcaatgcgaataatagtttttgcattaatgtatctctactaaaatttgggggaattttaaaactaatctggtatctattcagacatttacctgcactcgtaccattaagaaagacagaaagaagcaaaaaaaaattaatcttgtatatgagaggaaaaggaaagggcttctgagaggattcttagttgtttcttttgaattcacttttaatagcaggatttggaaaatactaatttctgtgcttaagggtcacaggttctgggctctcaactgatatttaaggtgacattcatttttattaggtctaacatctcaagctaaaggagaaagaaaaataccttcttttaaatggcaaagaccttcattagcagcacacttttataaacaaccatatagttaaaatgtggccttaaactttcaattactaaatgatgattaagttggatattttaaaatgtcttatacataagcttaaagtaatatattgaaactttaacagttgtactgttaaaactcatggactttctgaaaaactaaatatataaaataatatgtaacactcttaataactggaagatataaaatgtaacttggatttaaaggagaagagctaaagatctgaattatagtctcattagaaccagacagatgttgttgagaagtactaaataaattagtaatctagatatctttattatgtaaatgagtttaggtgttctatttaataaactattttctgg

SEQ ID NO: 8639 - protein, 1463 aa, Homo sapiens; identical to SEQ ID NO: 658

SEQ ID NO: 8640 - DNA, 5349 bp, Homo sapiens
cccgagtgtcggttcactgtggagacagcggtggcggagtgggtctccagggctctgggctggcaaggcccccggagggggtggggcgcggaggaggctacggatccgcttccgcgcggcggggccgggtgcttgggacgcggctctgggctcccgggataaggggctcccgggacaaggggctcccggagagcccagtggttagcgatgctgctgtcgccgtcgctgctgctgctgctgctgctgggggcgccgcggggctgcgccgagggtgtggcggcggcgcttacccccgagcggctcctggagtggcaggataaaggaatatttgttatccaaagtgagagtctcaagaaatgcattcaagcaggtaaatcggttctgaccctggagaactgcaagcaagcaaacaagcacatgctgtggaaatgggtttcaaaccatggcctctttaacataggaggcagtggttgcctgggcctgaatttctccgccccagagcagccattaagcttatatgaatgtgactccaccctcgtttccttacggtggcgctgtaacaggaagatgatcacaggcccgctgcagtactctgtccaggtggcgcatgacaacacagtggtggcctcacggaagtatattcataagtggatttcttatgggtcaggtggtggagacatttgtgaatatctacacaaagatttgcatacaatcaaagggaacacccacgggatgccgtgtatgtttcccttccagtataaccatcagtggcatcatgaatgtacccgtgaaggtcgggaagatgacttactgtggtgtgccacgacaagccgttatgaaagagatgaaaagtggggattttgccctgatcccacctctgcagaagtaggttgtgatactatttgggagaaggacctcaattcacacatttgctaccagttcaacctgctttcatctctctcttggagtgaggcacattcttcatgccagatgcaaggaggtacgctgttaagtattacagatgaaactgaagaaaatttcataagggagcacatgagcagtaaaacagtggaggtgtggatgggcctcaatcagctggatgaacacgctggctggcagtggtctgatggaacgccgctcaactatctgaattggagcccagaggtaaattttgagccatttgttgaagatcactgtggaacatttagttcatttatgccaagtgcctggaggagtcgggattgtgagtccaccttgccatatatatgtaaaaaatatctaaaccacattgatcatgaaatagttgaaaaagatgcgtggaaatattatgctacccactgtgagcctggctggaatccctacaatcgtaattgctacaaacttcagaaagaagaaaagacctggcatgaggctctgcgttcttgtcaggctgataacagtgcattaatagacataacctcattagcagaggtggagtttcttgtaaccctccttggagatgaaaatgcatcagaaacatggattggtttgagcagcaataaaattccagtttcctttgaatggtctaatgactcttcagtcatctttactaattggcacacacttgagccccacatttttccaaatagaagccagctgtgtgtctcagcagagcagtctgagggacactggaaagtcaaaaattgtgaagaaagacttttttacatttgtaaaaaagcaggccatgtcctctctgatgctgaatcaggatgtcaagagggatgggagagacatggtggattctgttacaaaattgacacagtccttcgaagctttgaccaagcttccagcggttattactgtcctcctgcacttgtaaccattacaaacaggtttgaacaggcttttattaccagtttgatcagtagtgtggtaaaaatgaaggacagttatttttggatagctcttcaggaccaaaatgatacgggagaatacacttggaagccagtagggcagaaacccgagccggtgcagtacacacactggaacacacaccagccgcgctacagtggtggctgtgttgccatgcgaggaaggcatccacttggtcgctgggaagtgaagcactgtcggcactttaaggcaatgtccttgtgcaagcagccagttgaaaatcaggaaaaagcagagtatgaagagagatggccctttcacccctgctatttggactgggagtcagagcctggtctggccagttgcttcaaggtatttcatagtgaaaaagttctgatgaaaagaacatggagagaagctgaagcattttgcgaagaatttggagctcatcttgcaagctttgcccatattgaggaagagaattttgtgaatgagctcttacattcaaaatttaattggacagaagaaaggcagttctggattggatttaataaaagaaacccactgaatgccggctcatgggagtggtctgatagaactcctgttgtctcttcgtttttagacaacacttattttggagaagatgcaagaaactgtgctgtttataaggcaaacaaaacattgctgcccttacactgtggttccaaacgtgaatggatatgcaaaatcccaagagatgtgaaacccaagattccgttctggtaccagtacgatgtaccctggctcttttatcaggatgcagaatacctttttcatacctttgcctcagaatggttgaactttgagtttgtctgtagctggctgcacagtgatcttctcacaattcattctgcacatgagcaagaattcatccacagcaaaataaaagcgctatcaaagtatggtgcaagttggtggattggacttcaagaagaaagagccaatgatgaatttcgctggagagatggaacaccagtgatataccagaactgggacacaggaagagaaagaactgtgaataatcagagccagagatgtggctttatttcttctataacaggactctggggtagtgaagagtgttcagtttctatgcctagtatctgtaagcgaaaaaaggtttggctcatagagaaaaagaaagatacaccaaaacaacatggaacgtgtcccaaaggatggctatattttaactataagtgccttctgctgaatatccccaaagacccaagcagttggaagaactggacgcatgctcaacatttctgtgctgaagaaggggggaccctggtcgccattgaaagtgaggtggagcaagctttcattactatgaatctttttggccagaccaccagtgtgtggataggtttacaaaatgatgattatgaaacatggctaaatggaaagcctgtggtatattctaactggtctccatttgatataataaatattccaagtcacaataccactgaagttcagaaacacattcctctctgtgccttactctcaagtaatcctaattttcatttcactggaaaatggtattttgaagactgtggaaaggaaggctatgggtttgtttgtgaaaaaatgcaagatacttctggacacggtgtaaatacatctgatatgtatccaatgcccaataccttagaatatggaaacagaacttacaaaataattaatgcaaatatgacttggtatgcagcaataaaaacctgcctgatgcacaaagcacaactggtcagcatcacagaccagtatcaccagtccttcctcactgttgtcctcaaccggctaggatatgcccactggattggactgttcaccacagataatggtcttaattttgactggtctgatggcaccaaatcttctttcactttttggaaagatgaggagtcctccctccttggtgactgcgtttttgccgacagcaacggacgctggcatagcacagcctgcgagtcatttctgcaaggtgccatttgtcatgtgccacctgaaacaagacaatctgaacacccagagttgtgctcagaaacatctattccctggataaaatttaaaagtaattgctacagtttttctacagtcctagacagtatgagttttgaggctgctcatgaattttgcaaaaaggaaggttctaatcttttaacaatcaaggatgaggctgaaaatgcatttctcctagaagagctgtttgcttttggttcttctgtccagatggtttggttgaatgctcaatttgatggtaacagtaagtgatttgggtagaggagaggacataaataaatacatggttgttaaagctgatgataatggcatctgtgagccagaaaactctccttggatacgttttctgagaaaaaatagcatgaagcctaaagccatttcttccaaaaacaacattgcaacccttttctttacccttttgtcttttaaaataatcccagaacaccaaaaataaaaacaaacaataacatgtttatctttacccttagcaggaagatgcttggctggaactttgtgttcacagacttagtcattgcataccaaaaccatatttactggaaaatatcccaggtttctaaatgttataaaagcacaatagagttatggaaatgtttccatgatgaactgtgctgttaggattcttatttgctactcataaaaaccagagtttgtaataaaatggaagcatggtattcttttctttatgtaattgatggttattgaaaggtacttgtgaagaaaattattttaattggtatggagagcttgttacagtggtgtaccaaggttgggggtgagcctaccctttcgaggaggagtattttaatcaccaacattgtttagaatttcaagcagatggtgataataaaaagcagaccaacttttagttagctgtattgttagttttaaattattttcagacaatacactattgcccacacatgggatggactctcctaccgcccctacccccttggtacatggctggcttggtattaaagaaattcactgtaaaatctttttagaaagtgagccattttgtaatgatgaagatgttaggacttcaaaggatttttctttactcgattagttttgtttatcaaatgatttctttaaatcgattatatatatatatggaatatttcaaaattcaaactgtcacattaagaaacatgataacctaaatgacctaaataagaacactgtacctaaaataaagaggcaactttattaatgcctaccttttgatgttgagtacatcactgtatttactgagttgaatgtattagttcaagagtctcattaaattcaggggctgccatcccattactgggtatatacccaaaggactataaatcatgctgctataaagacacatacacacgtatgtttattgcggcactattcacaatagcaaag

SEQ ID NO: 8641 - protein, 1324 aa, Homo sapiens; identical to SEQ ID NO: 656

SEQ ID NO: 8642 - DNA, 671 bp, Homo sapiens
aggtttgaacaggcttttattaccagtttgatcagtagtgtggtaaaaatgaaggacagttatttttggatagctcttcaggaccaaaatgatacgggagaatacacttggaagccagtagggcagaaacccgagccggtgcagtacacacactggaacacacaccagccgcgctacagtggtggctgtgttgccatgcgaggaaggcatccacttggtcgctgggaagtgaagcactgtcggcactttaaggcaatgtccttgtgcaagcagccagttgaaaatcaggaaaaagcagagtatgaagagagatggccctttcacccctgctatttggactgggagtcagagcctggtctggccagttgcttcaaggtatttcatagtgaaaaagttctgatgaaaagaacatggagagaagctgaagcattttgcgaagaatttggagctcatcttgcaagctttgcccatattgaggaagagaattttgtgaatgagctcttacattcaaaatttaattggtaaatacttgttaattatgaaaaattacagtcaaatattctatctcccagtaatggcttctgaggggtgagtatcccaagtagttgtttaaaattcccatatttgtattatgcccaaagccaagaaaaataaatatacatatagtttta

SEQ ID NO: 8643 - protein, 158 aa, Homo sapiens
MKDSYFWIALQDQNDTGEYTWKPVGQKPEPVQYTHWNTHQPRYSGGCVAMRGRHPLGRWEVKHCRHFKAMSLCKQPVENQEKAEYEERWPFHPCYLDWESEPGLASCFKVFHSEKVLMKRTWREAEAFCEEFGAHLASFAHIEEENFVNELLHSKFNW

SEQ ID NO: 8644 - DNA, 2532 bp, Homo sapiens
gcgcatgcagcccttcccaagcactggtagggcactgggcatgcagacagcccaccagaagggaagaatcaggagaaaagggatgcaagatcccagagataaactgaagcacaagagggtaaaaactttgtccttggtcttacagccagaaagtggtgatgcaaagaacttagtccaagctttgatctgttctgcactgcctgccaaagcagaaccttgagaaatacccatgtttgggggatgagaagaagaagataaatcagcaaagaaaatagtgataagaaagatgcagaacccagggatatggagagccaattgtatttgtaaaacacttagaatggtgcctgacacgtgagttgctttgtctaattctagccctgtggtagctacccaagattgttgtaacctccagtgatcaagttctttggataagcaaagagggagggcattaagtgtgtggaaaagacccctcctctccactcttgttgcaaggactcaggatcctgccctctgagggtttacagaagtcattctcactatctcacactggccgtcttgacccagagcagttctttactttctcgggacacaaacgggatgaaagtccagggctgggacttcctccttggaatgtttgacaaggactgacgtactctaggccctttgaatcccggaagtccaggacacacccaaccttgattacagtgtccagaatgctggagcgtaggtgaaaggacaaaagccagacacatttcaacatgagggacccactgacagattgtccgtataataaagtatacaagaacctaaaggagttttctcaaaatggagagaatttctgcaaacaggtcacatctgttcttcagcaaagggcaaacctggaaattagctatgccaaaggacttcagaaactggcaagcaagctgagcaaagcattacagaacacgagaaaaagttgtgttagcagtgcctgggcctgggcctcagagggaatgaaatccacagcggacctgcatcaaaaacttggcaaagcaattgaattggaagcaataaaaccgacttatcaagtcctaaatgtacaagagaagaagagaaaatcacttgacaatgaagttgaaaagacagcaaatcttgtcattagcaactggaatcagcaaattaaggcaaaagaaattaatggttagtaccaagaaacatgaagcacttttccagcttgtagaaagctccaagcaatctatgactgagaaggagaagcggaagctcctcaataaactgacaaaatcaactgaaaagttggaaaaggaagatgaaaattactaccaaaaaaacatggcgggttattctaccagactgaaatgggaaaacacactagagaactgctaccaggtaacccacagcatctgcctatatgccttttgggtcaaaagagcctggggaaagtgtgtgagtgatttaagataccaagacacattccttcctggaaatctccctccactatggtttggatatgacatagtcaagaggctaatcatgagactttgttcagtctgtcttcagagcattctggagctggagaaggaaagaattcaacttttatgcaataacttaaaccagtacagccaacatatttctctttttggccaaaccctgaccacatgccacacgcagattcactgtgccatcagcaagattgacattgaaaaagatatccaggctgtaatggaagaaactgcaattttatctacagaaaacaaatctgagttcctgttaacggattactttgaagaagatcctaacagtgcaatggataaagagagacgaaagtctttactaaaaccaaaattattgagactgcagagagacattgaaaaagcctcaaaagacaaggaaggcctggaacgaatgcttaaaacgtactccagcacctcctccttctctgatgcaaagagccagaaagacacagcagcgttaatggatgagaacaatttgaaactagaccttttggaagcgaactcctacaaactgtcatcaatgttagcagaacttgagcaaagacctcaacccagccatccttgtagtaattccatcttcaggtggagggaaaaggagcatactcatagctatgtgaaaatatctcggccttttttaatgaagagattagagaatattgtgagcaaggcatcttctggtgggcagagcaatccaggttcttcaactccagcccctggtgcagcccagctcagcagcagactttgcaaggccttgtattcttttcaagccaggcaagatgatgagttgaatttggaaaagggtgacattgtgattatacacgagaaaaaagaaggaggatggtggtttggatctttgaatgggaaaaaaggccattttcctgccgcttatgtggaggagttaccttcaaatgctggcaacacagctacaaaggcataaaacaagactctgaacatactaccttcacactcggtaatcaacaatacagtgtggttcaaataagaataaagtgctcttaccttt

SEQ ID NO: 8645 - protein, 457 aa, Homo sapiens
MYKRRRENHLTMKLKRQQILSLATGISKLRQKKLMVSTKKHEALFQLVESSKQSMTEKEKRKLLNKLTKSTEKLEKEDENYYQKNMAGYSTRLKWENTLENCYQVTHSICLYAFWVKRAWGKCVSDLRYQDTFLPGNLPPLWFGYDIVKRLIMRLCSVCLQSILELEKERIQLLCNNLNQYSQHISLFGQTLTTCHTQIHCAISKIDIEKDIQAVMEETAILSTENKSEFLLTDYFEEDPNSAMDKERRKSLLKPKLLRLQRDIEKASKDKEGLERMLKTYSSTSSFSDAKSQKDTAALMDENNLKLDLLEANSYKLSSMLAELEQRPQPSHPCSNSIFRWREKEHTHSYVKISRPFLMKRLENIVSKASSGGQSNPGSSTPAPGAAQLSSRLCKALYSFQARQDDELNLEKGDIVIIHEKKEGGWWFGSLNGKKGHFPAAYVEELPSNAGNTATKA

SEQ ID NO: 8646 - DNA, 2977 bp, Homo sapiens
gcgcatgcagcccttcccaagcactggtagggcactgggcatgcagacagcccaccagaagggaagaatcaggagaaaagggatgcaagatcccagagataaactgaagcacaagagggtaaaaactttgtccttggtcttacagccagaaagtggtgatgcaaagaacttagtccaagctttgatctgttctgcactgcctgccaaagcagaaccttgagaaatacccatgtttgggggatgagaagaagaagataaatcagcaaagaaaatagtgataagaaagatgcagaacccagggatatggagagccaattgtatttgtaaaacacttagaatggtgcctgacacgtgagttgctttgtctaattctagccctgtggtagctacccaagattgttgtaacctccagtgatcaagttctttggataagcaaagagggagggcattaagtgtgtggaaaagacccctcctctccactcttgttgcaaggactcaggatcctgccctctgagggtttacagaagtcattctcactatctcacactggccgtcttgacccagagcagttctttactttctcgggacacaaacgggatgaaagtccagggctgggacttcctccttggaatgtttgacaaggactgacgtactctaggccctttgaatcccggaagtccaggacacacccaaccttgattacagtgtccagaatgctggagcgtaggtgaaaggacaaaagccagacacatttcaacatgagggacccactgacagattgtccgtataataaagtatacaagaacctaaaggagttttctcaaaatggagagaatttctgcaaacaggtcacatctgttcttcagcaaagggcaaacctggaaattagctatgccaaaggacttcagaaactggcaagcaagctgagcaaagcattacagaacacgagaaaaagttgtgttagcagtgcctgggcctgggcctcagagggaatgaaatccacagcggacctgcatcaaaaacttggcaaagcaattgaattggaagcaataaaaccgacttatcaagtcctaaatgtacaagagaagaagagaaaatcacttgacaatgaagttgaaaagacagcaaatcttgtcattagcaactggaatcagcaaattaaggcaaaagaaattaatggttagtaccaagaaacatgaagcacttttccagcttgtagaaagctccaagcaatctatgactgagaaggagaagcggaagctcctcaataaactgacaaaatcaactgaaaagttggaaaaggaagatgaaaattactaccaaaaaaacatggcgggttattctaccagactgaaatgggaaaacacactagagaactgctaccaggtaacccacagcatctgcctatatgccttttgggtcaaaagagcctggggaaagtgtgtgagtgatttaagataccaagacacattccttcctggaaatctccctccactatggtttggatatgacatagtcaagaggctaatcatgagactttgttcagtctgtcttcagagcattctggagctggagaaggaaagaattcaacttttatgcaataacttaaaccagtacagccaacatatttctctttttggccaaaccctgaccacatgccacacgcagattcactgtgccatcagcaagattgacattgaaaaagatatccaggctgtaatggaagaaactgcaattttatctacagaaaacaaatctgagttcctgttaacggattactttgaagaagatcctaacagtgcaatggataaagagagacgaaagtctttactaaaaccaaaattattgagactgcagagagacattgaaaaagcctcaaaagacaaggaaggcctggaacgaatgcttaaaacgtactccagcacctcctccttctctgatgcaaagagccagaaagacacagcagcgttaatggatgagaacaatttgaaactagaccttttggaagcgaactcctacaaactgtcatcaatgttagcagaacttgagcaaagacctcaacccagccatccttgtagtaattccatcttcaggtggagggaaaaggagcatactcatagctatgtgaaaatatctcggccttttttaatgaagagattagagaatattgtgagcaaggcatcttctggtgggcagagcaatccaggttcttcaactccagcccctggtgcagcccagctcagcagcagactttgcaaggccttgtattcttttcaagccaggcaagatgatgagttgaatttggaaaagggtgacattgtgattatacacgagaaaaaagaaggaggatggtggtttggatctttgaatgggaaaaaaggccattttcctgccgcttatgtggaggagttaccttcaaatgctggcaacacagctacaaaggcataaaacaagactctgaacatactaccttcacactcggtaatcaacaatacagtgtggttcaaataagaataaagtgctcttacctttacatgtttttcttttgaaatggatggagttctacctgcatgtcacagcactttgcattcatgattattagcttgaaacagtcagaaaaaagatggatgggtggagacagacaaggaagaggctccttggttcctagaggagtttccaaattctaggagaccctagagatgatccagtataacccctggtgtcacagaaacagacggagtccaaggtgggttcagctgcttgcctgaagtcagagttatctggtagacaacagcagtgggacttagatgtctttttcctctggatttgggtggcaacagaacacagcaggcctatgagggggtcaagcagagcctgggagatgaggaacacagatcaattccaagaagagagacaggcaatcaagacaccaatgagatcaacccaaattaggggatggtaggatatctctgacaaa

SEQ ID NO: 8647 - protein, 457 aa, Homo sapiens; identical to SEQ ID NO: 8645

SEQ ID NO: 8648 - DNA, 1567 bp, Homo sapiens
ccagaatgctggagcgtaggtgaaaggacaaaagccagacacatttcaacatgagggacccactgacagattgtccgggcaaacctggaaattagctatgccaaaggacttcagaaactggcaagcaagctgagcaaagcattacagaacacgagaaaaagttgtgttagcagtgcctgggcctgggcctcagagggaatgaaatccacagcggacctgcatcaaaaacttggcaaagcaattgaattggaagcaataaaaccgacttatcaagtcctaaatgtacaagagaagaagagaaaatcacttgacaatgaagttgaaaagacagcaaatcttgtcattagcaactggaatcagcaaattaaggcaaaagaaattaatggttagtaccaagaaacatgaagcacttttccagcttgtagaaagctccaagcaatctatgactgagaaggagaagcggaagctcctcaataaactgacaaaatcaactgaaaagttggaaaaggaagatgaaaattactaccaaaaaaacatggcgggttattctaccagactgaaatgggaaaacacactagagaactgctaccagagcattctggagctggagaaggaaagaattcaacttttatgcaataacttaaaccagtacagccaacatatttctctttttggccaaaccctgaccacatgccacacgcagattcactgtgccatcagcaagattgacattgaaaaagatatccaggctgtaatggaagaaactgcaattttatctacagaaaacaaatctgagttcctgttaacggattactttgaagaagatcctaacagtgcaatggataaagagagacgaaagtctttactaaaaccaaaattattgagactgcagagagacattgaaaaagcctcaaaagacaaggaaggcctggaacgaatgcttaaaacgtactccagcacctcctccttctctgatgcaaagagccagaaagacacagcagcgttaatggatgagaacaatttgaaactagaccttttggaagcgaactcctacaaactgtcatcaatgttagcagaacttgagcaaagacctcaacccagccatccttgtagtaattccatcttcaggtggagggaaaaggagcatactcatagctatgtgaaaatatctcggccttttttaatgaagagattagagaatattgtgagcaaggcatcttctggtgggcagagcaatccaggttcttcaactccagcccctggtgcagcccagctcagcagcagactttgcaaggccttgtattcttttcaagccaggcaagatgatgagttgaatttggaaaagggtgacattgtgattatacacgagaaaaaagaaggaggatggtggtttggatctttgaatgggaaaaaaggccattttcctgccgcttatgtggaggagttaccttcaaatgctggcaacacagctacaaaggcataaaacaagactctgaacatactaccttcacactcggtaatcaacaatacagtgtggttcaaataagaataaagtgctcttaccttt

SEQ ID NO: 8649 - protein, 400 aa, Homo sapiens
MYKRRRENHLTMKLKRQQILSLATGISKLRQKKLMVSTKKHEALFQLVESSKQSMTEKEKRKLLNKLTKSTEKLEKEDENYYQKNMAGYSTRLKWENTLENCYQSILELEKERIQLLCNNLNQYSQHISLFGQTLTTCHTQIHCAISKIDIEKDIQAVMEETAILSTENKSEFLLTDYFEEDPNSAMDKERRKSLLKPKLLRLQRDIEKASKDKEGLERMLKTYSSTSSFSDAKSQKDTAALMDENNLKLDLLEANSYKLSSMLAELEQRPQPSHPCSNSIFRWREKEHTHSYVKISRPFLMKRLENIVSKASSGGQSNPGSSTPAPGAAQLSSRLCKALYSFQARQDDELNLEKGDIVIIHEKKEGGWWFGSLNGKKGHFPAAYVEELPSNAGNTATKA

SEQ ID NO: 8650 - DNA, 1645 bp, Homo sapiens
ctatataagtattatactactattttcagaaatgtagcattttaactgtgtttctgaaattggctagaatgagagataatgtgtttggtttaaaacatggtcaaccaactgtgcatgagagttttggatgagttttttggtttgtttcttttgacttttgaaacaatgtaaaaacctttcaaattaaattctgtacgtagaagttaggcatgtcagactgtgaagcagctctaaagcaacaaggatgacaaaaacgactccacatttgtgactctgatgtctacctagtaacttgttttatatggaccacgataactcattgcaatggaatactagagagcaaattcaagatagaaaacatttagtgatgtgaataccataacgaggaagaagccaacgttgggtaactgttagcaattgctagaatgggtcgactgaaagaatttcaaaatctcatctggaaaaataacaatcaagatgctttaagcaccagcacttctcaaatttcattaagtgaagagaaaggtaaacagttcatttatcattcagtcaaatttattaagaactacctgcagagactccctcagccatttaagaaaccctactggtggctgggtgctgtggctcacgcctataatcctaacactttgggaagccaaggcgggtggatcacaaggtcaggcgctggagaccagtttggccaacatgatgaaactgtgtctctactaaaaatacgaaaattagccggacatggtggcatacacctgtaatcccagctactcaagaggctgagggaggagaattgtttgaacttgggaggcagaggttgcagtgagccgagatcgcgccactgcactccagcctgggtgacagagcaagactccgtcttaaaaaaaaaaatctcactggtatcacttctaggctccctttgagagcgaccgactcctggctgtgtcccactgagacagtgtgaaaggtgactgagaacatgatttcattttcaggcctggaacgaatgcttaaaacgtactccagcacctcctccttctctgatgcaaagagccagaaagacacagcagcgttaatggatgagaacaatttgaaactagaccttttggaagcgaactcctacaaactgtcatcaatgttagcagaacttgagcaaagacctcaacccagccatccttgtagtaattccatcttcaggtggagggaaaaggagcatactcatagctatgtgaaaatatctcggccttttttaatgaagagattagagaatattgtgagcaaggcatcttctggtgggcagagcaatccaggttcttcaactccagcccctggtgcagcccagctcagcagcagactttgcaaggccttgtattcttttcaagccaggcaagatgatgagttgaatttggaaaagggtgacattgtgattatacacgagaaaaaagaaggaggatggtggtttggatctttgaatgggaaaaaaggccattttcctgccgcttatgtggaggagttaccttcaaatgctggcaacacagctacaaaggcataaaacaagactctgaacatactaccttcacactcggtaatcaacaatacagtgtggttcaaataagaataaagtgctcttaccttt

SEQ ID NO: 8651 - protein, 190 aa, Homo sapiens
MISFSGLERMLKTYSSTSSFSDAKSQKDTAALMDENNLKLDLLEANSYKLSSMLAELEQRPQPSHPCSNSIFRWREKEHTHSYVKISRPFLMKRLENIVSKASSGGQSNPGSSTPAPGAAQLSSRLCKALYSFQARQDDELNLEKGDIVIIHEKKEGGWWFGSLNGKKGHFPAAYVEELPSNAGNTATKA

SEQ ID NO: 8652 - DNA, 2090 bp, Homo sapiens
ctatataagtattatactactattttcagaaatgtagcattttaactgtgtttctgaaattggctagaatgagagataatgtgtttggtttaaaacatggtcaaccaactgtgcatgagagttttggatgagttttttggtttgtttcttttgacttttgaaacaatgtaaaaacctttcaaattaaattctgtacgtagaagttaggcatgtcagactgtgaagcagctctaaagcaacaaggatgacaaaaacgactccacatttgtgactctgatgtctacctagtaacttgttttatatggaccacgataactcattgcaatggaatactagagagcaaattcaagatagaaaacatttagtgatgtgaataccataacgaggaagaagccaacgttgggtaactgttagcaattgctagaatgggtcgactgaaagaatttcaaaatctcatctggaaaaataacaatcaagatgctttaagcaccagcacttctcaaatttcattaagtgaagagaaaggtaaacagttcatttatcattcagtcaaatttattaagaactacctgcagagactccctcagccatttaagaaaccctactggtggctgggtgctgtggctcacgcctataatcctaacactttgggaagccaaggcgggtggatcacaaggtcaggcgctggagaccagtttggccaacatgatgaaactgtgtctctactaaaaatacgaaaattagccggacatggtggcatacacctgtaatcccagctactcaagaggctgagggaggagaattgtttgaacttgggaggcagaggttgcagtgagccgagatcgcgccactgcactccagcctgggtgacagagcaagactccgtcttaaaaaaaaaaatctcactggtatcacttctaggctccctttgagagcgaccgactcctggctgtgtcccactgagacagtgtgaaaggtgactgagaacatgatttcattttcaggcctggaacgaatgcttaaaacgtactccagcacctcctccttctctgatgcaaagagccagaaagacacagcagcgttaatggatgagaacaatttgaaactagaccttttggaagcgaactcctacaaactgtcatcaatgttagcagaacttgagcaaagacctcaacccagccatccttgtagtaattccatcttcaggtggagggaaaaggagcatactcatagctatgtgaaaatatctcggccttttttaatgaagagattagagaatattgtgagcaaggcatcttctggtgggcagagcaatccaggttcttcaactccagcccctggtgcagcccagctcagcagcagactttgcaaggccttgtattcttttcaagccaggcaagatgatgagttgaatttggaaaagggtgacattgtgattatacacgagaaaaaagaaggaggatggtggtttggatctttgaatgggaaaaaaggccattttcctgccgcttatgtggaggagttaccttcaaatgctggcaacacagctacaaaggcataaaacaagactctgaacatactaccttcacactcggtaatcaacaatacagtgtggttcaaataagaataaagtgctcttacctttacatgtttttcttttgaaatggatggagttctacctgcatgtcacagcactttgcattcatgattattagcttgaaacagtcagaaaaaagatggatgggtggagacagacaaggaagaggctccttggttcctagaggagtttccaaattctaggagaccctagagatgatccagtataacccctggtgtcacagaaacagacggagtccaaggtgggttcagctgcttgcctgaagtcagagttatctggtagacaacagcagtgggacttagatgtctttttcctctggatttgggtggcaacagaacacagcaggcctatgagggggtcaagcagagcctgggagatgaggaacacagatcaattccaagaagagagacaggcaatcaagacaccaatgagatcaacccaaattaggggatggtaggatatctctgacaaa

SEQ ID NO: 8653 - protein, 190 aa, Homo sapiens; identical to SEQ ID NO: 8651

SEQ ID NO: 8654 - DNA, 910 bp, Homo sapiens
ggcgggtggcgggaagtgcactaggtttgaaatcggaaagttggcggggctgcgggagctgagcctagagtccggctgttggctagagtgggcgcggatctggtgtggggaaggcggcgggactcaggcctgcctgcgaagcattgtcctacataatggtagaggacgaactggcacttttcgataaaagcataaatgaattttggaataaattcaaaagtacggacacctcctgtcagatggcgggactaagagatacctacaaggattccatcaaagcatttgcagaaaagctgtctgtgaaattaaaggaagaagaacgaatggttgagatgtttctggaatatcaaaatcagatcagcaggcaaaataagctcattcaagaaaaaaaggataacttgttaaaattgattgctgaagtaaaaggcaaaaagcaggaattggaagtactgactgcaaatatccaggatcttaaggaagaatattctaggaagaaggaaactatttctactgctaataaagcgaatgcagagaggttgaaaaggctgcagaaatctgcagacttgtataaagatcgacttggactagaaattcgaaaaatttatggtgagaaattgcagtttattttcactaatattgaccctaagaatcctgagagcccatttatgttttccttacatctcaatgaagcaagggactatgaaggctctgcttgaccccctcataggcctgctgtgttctgttgccacccaaatccagaggaaaaagacatctaagtcccactgctgttgtctaccagataactctgacttcaggcaagcagctgaacccaccttggactccgtctgtttctgtgacaccaggggttatactggatcatctctagggtctcctagaatttggaaactcc

SEQ ID NO: 8655 - protein, 186 aa, Homo sapiens
MVEDELALFDKSINEFWNKFKSTDTSCQMAGLRDTYKDSIKAFAEKLSVKLKEEERMVEMFLEYQNQISRQNKLIQEKKDNLLKLIAEVKGKKQELEVLTANIQDLKEEYSRKKETISTANKANAERLKRLQKSADLYKDRLGLEIRKIYGEKLQFIFTNIDPKNPESPFMFSLHLNEARDYEGSA

SEQ ID NO: 8656 - DNA, 1369 bp, Homo sapiens
ggcgggtggcgggaagtgcactaggtttgaaatcggaaagttggcggggctgcgggagctgagcctagagtccggctgttggctagagtgggcgcggatctggtgtggggaaggcggcgggactcaggcctgcctgcgaagcattgtcctacataatggtagaggacgaactggcacttttcgataaaagcataaatgaattttggaataaattcaaaagtacggacacctcctgtcagatggcgggactaagagatacctacaaggattccatcaaagcatttgcagaaaagctgtctgtgaaattaaaggaagaagaacgaatggttgagatgtttctggaatatcaaaatcagatcagcaggcaaaataagctcattcaagaaaaaaaggataacttgttaaaattgattgctgaagtaaaaggcaaaaagcaggaattggaagtactgactgcaaatatccaggatcttaaggaagaatattctaggaagaaggaaactatttctactgctaataaagcgaatgcagagaggttgaaaaggctgcagaaatctgcagacttgtataaagatcgacttggactagaaattcgaaaaatttatggtgagaaattgcagtttattttcactaatattgaccctaagaatcctgagagcccatttatgttttccttacatctcaatgaagcaagggactatgaagtgtcagatagtgcccctcatcttgagggcctagcagaatttcaagagaatgtaaggaagaccaacaatttttcagcttttcttgccaatgttcggaaagcttttactgccacggtttataattaacatacaaatagtgtatataaaaacggtttatttttcttctctattacatatctctttttttcttgtttttattattattatactttaagttttagggtacatgtgcacaatgtgcaggtttgttacatatgtatacatgtgccatattggtgtgctgcacccattaactcgtcatttcattaggtatatctcctaatgctatccctcccccctcccccaacccacaacagtccccgttgtgtgatgttccccttcctgtgtccatgtgttctcattgttcaattcccacctaggagtgagaatatgtggtgtttggttttttgtcctttcgatagtttgctgagaatgatggtttccagcttcatccatgttcctacaaaggacatgaactcatccttttttatggctgcatagtattccatggtgtatatgtgccacattttcttaatccagtctatcattgttggacatttgggttggttccaagtctttgctattgtgaatagtgccgaaataaacatacgtgtgcatgtgtcttt

SEQ ID NO: 8657 - protein, 224 aa, Homo sapiens; identical to SEQ ID NO: 664

SEQ ID NO: 8658 - DNA, 1311 bp, Homo sapiens
ggcgggtggcgggaagtgcactaggtttgaaatcggaaagttggcggggctgcgggagctgagcctagagtccggctgttggctagagtgggcgcggatctggtgtggggaaggcggcgggactcaggcctgcctgcgaagcattgtcctacataatggtagaggacgaactggcacttttcgataaaagcataaatgaattttggaataaattcaaaagtacggacacctcctgtcagatggcgggactaagagatacctacaaggattccatcaaagcatttgcagaaaagctgtctgtgaaattaaaggaagaagaacgaatggttgagatgtttctggaatatcaaaatcagatcagcaggcaaaataagctcattcaagaaaaaaaggataacttgttaaaattgattgctgaagtaaaaggcaaaaagcaggaattggaagtactgactgcaaatatccaggatcttaaggaagaatattctaggaagaaggaaactatttctactgctaataaagcgaatgcagagaggttgaaaaggctgcagaaatctgcagacttgtataaagatcgacttggactagaaattcaatcctgagagcccatttatgttttccttacatctcaatgaagcaagggactatgaagtgtcagatagtgcccctcatcttgagggcctagcagaatttcaagagaatgtaaggaagaccaacaatttttcagcttttcttgccaatgttcggaaagcttttactgccacggtttataattaacatacaaatagtgtatataaaaacggtttatttttcttctctattacatatctctttttttcttgtttttattattattatactttaagttttagggtacatgtgcacaatgtgcaggtttgttacatatgtatacatgtgccatattggtgtgctgcacccattaactcgtcatttcattaggtatatctcctaatgctatccctcccccctcccccaacccacaacagtccccgttgtgtgatgttccccttcctgtgtccatgtgttctcattgttcaattcccacctaggagtgagaatatgtggtgtttggttttttgtcctttcgatagtttgctgagaatgatggtttccagcttcatccatgttcctacaaaggacatgaactcatccttttttatggctgcatagtattccatggtgtatatgtgccacattttcttaatccagtctatcattgttggacatttgggttggttccaagtctttgctattgtgaatagtgccgaaataaacatacgtgtgcatgtg

SEQ ID NO: 8659 - protein, 148 aa, Homo sapiens
MVEDELALFDKSINEFWNKFKSTDTSCQMAGLRDTYKDSIKAFAEKLSVKLKEEERMVEMFLEYQNQISRQNKLIQEKKDNLLKLIAEVKGKKQELEVLTANIQDLKEEYSRKKETISTANKANAERLKRLQKSADLYKDRLGLEIQS

SEQ ID NO: 8660 - DNA, 875 bp, Homo sapiens
ggcgggtggcgggaagtgcactaggtttgaaatcggaaagttggcggggctgcgggagctgagcctagagtccggctgttggctagagtgggcgcggatctggtgtggggaaggcggcgggactcaggcctgcctgcgaagcattgtcctacataatggtagaggacgaactggcacttttcgataaaagcataaatgaattttggaataaattcaaaagtacggacacctcctgtcagatggcgggactaagagatacctacaaggattccatcaaagcatttgcagaaaagctgtctgtgaaattaaaggaagaagaacgaatggttgagatgtttctggaatatcaaaatcagatcagcaggcaaaataagctcattcaagaaaaaaaggataacttgttaaaattgattgctgaagtaaaaggcaaaaagcaggaattggaagtactgactgcaaatatccaggatcttaaggaagaatattctaggaagaaggaaactatttctactgctaataaagcgaatgcagagaggttgaaaaggctgcagaaatctgcagacttgtataaagatcgacttggactagaaattcgaaaaatttatggtgagaaattgcagtttattttcactaatattgaccctaagaatcctgagagcccatttatgttttccttacatctcaatgaagcaagggactatgaagtgtcagatagtgcccctcatcttgagggcctagcagaatttcaagagaatgtaaggaagaccaacaatttttcagcttttcttgccaatgttcggaaagcttttactgccacggtttataattaacatacaaatagtgtatataaaaacggtttatttttcttctctatt

SEQ ID NO: 8661 - protein, 224 aa, Homo sapiens; identical to SEQ ID NO: 664

SEQ ID NO: 8662 - DNA, 819 bp, Homo sapiens
ggcgggtggcgggaagtgcactaggtttgaaatcggaaagttggcggggctgcgggagctgagcctagagtccggctgttggctagagtgggcgcggatctggtgtggggaaggcggcgggactcaggcctgcctgcgaagcattgtcctacataatggtagaggacgaactggcacttttcgataaaagcataaatgaattttggaataaattcaaaagtacggacacctcctgtcagatggcgggactaagagatacctacaaggattccatcaaagcatttgcagaaaagctgtctgtgaaattaaaggaagaagaacgaatggttgagatgtttctggaatatcaaaatcagatcagcaggcaaaataagctcattcaagaaaaaaaggataacttgttaaaattgattgctgaagtaaaaggcaaaaagcaggaattggaagtactgactgcaaatatccaggatcttaaggaagaatattctaggaagaaggaaactatttctactgctaataaagcgaatgcagagaggttgaaaaggctgcagaaatctgcagacttgtataaagatcgacttggactagaaattcaatcctgagagcccatttatgttttccttacatctcaatgaagcaagggactatgaagtgtcagatagtgcccctcatcttgagggcctagcagaatttcaagagaatgtaaggaagaccaacaatttttcagcttttcttgccaatgttcggaaagcttttactgccacggtttataattaacatacaaatagtgtatataaaaacggtttatttttcttctct

SEQ ID NO: 8663 - protein, 148 aa, Homo sapiens; identical to SEQ ID NO: 8659

SEQ ID NO: 8664 - DNA, 492 bp, Homo sapiens
ggcgggtggcgggaagtgcactaggtttgaaatcggaaagttggcggggctgcgggagctgagcctagagtccggctgttggctagagtgggcgcggatctggtgtggggaaggcggcgggactcaggcctgcctgcgaagcattgtcctacataatggtagaggacgaactggcacttttcgataaaagcataaatgaattttggaataaattcaaaagtacggacacctcctgtcagatggcgggactaagagatacctacaaggattccatcaaagcatttgcagaaaagctgtctgtgaaattaaaggaagaagaacgaatggttgagatgtttctggaatatcaaaatcagatcagcaggcaaaataagctcattcaagaaaaaaaggataacttgttaaaattgattgctgaagtaaaaggcaaaaagcaggaattggaactatttctactgctaataaagcgaatgcagagaggttgaaaaggct

SEQ ID NO: 8665 - protein, 109 aa, Homo sapiens
MVEDELALFDKSINEFWNKFKSTDTSCQMAGLRDTYKDSIKAFAEKLSVKLKEEERMVEMFLEYQNQISRQNKLIQEKKDNLLKLIAEVKGKKQELELFLLLIKRMQRG

SEQ ID NO: 8666 - DNA, 1393 bp, Homo sapiens
agctccaattgctctatgtttagaattgcctctttttcaagatggatttccttcacaggaatggagtgctcataattcagcatttgcagaaggactaccgagcttactacacttttctaaattttatgtccaatgttggagaccccaggaatatctttttcatttattttccactttgttttcaatttaatcagacagttggaaccaagatgatatgggtagcagtcattggggattggttaaatcttatatttaaatggatattatttggtcatcgaccttactggtgggtccaagaaactcagatttacccaaatcactcaagtccatgccttgaacagttccctactacatgtgaaacaggtccaggaagtccatctggccatgcaatgggcgcatcctgtgtctggtatgtcatggtaaccgctgccctgagccacactgtctgtgggatggataagttctctatcactctgcacaggcatgctggtggcagaggcctttgaacacactccaggcatccaaacggccagtctgggcacatacctgaagaccaacctctttctcttcctgtttgcagttggcttttacctgcttcttagggtgctcaacattgacctgctgtggtccgtgcccatagccaaaaagtggtgtgctaaccccgactggatccacattgacaccacgccttttgctggactcgtgagaaaccttggggtcctctttggcttgggctttgcaatcaactcagagatgttcctcctgagctgccgagggggaaataactacacactgagcttccggttgctctgtgccttgacctcattgacaatactgcagctctaccatttcctccagatcccgactcacgaagagcatttattttatgtgctgtctttttgtaaaagtgcatccattcccctaactgtggttgctttcattccctactctgttcatatgttaatgaaacaaagcggaaagaagagtcagtagagtggtgcctagagttagtgctctgtgtcacagatcacccttctccatccaccagtagagccacagagtaggcacagaccagaggcttctaatccgacttcacagaatagcggcacaggccccattccccatagagatgtttagtttggccttcgcactggtctttttttttaatccttcagttaccaatatttagatacaagaatatttgacataaaaatcggaagttctgtatttcttgaaaaatctgatagtatgacaacacagagcctgcatccccagctggagacaactgaccagagctgcatactaacagtccccagtaggaggcaaggactccattttctcacagtcttcagcatcccagcaggagccccactatgattcctttatcttctta

SEQ ID NO: 8667 - protein, 154 aa, Homo sapiens
MDFLHRNGVLIIQHLQKDYRAYYTFLNFMSNVGDPRNIFFIYFPLCFQFNQTVGTKMIWVAVIGDWLNLIFKWILFGHRPYWWVQETQIYPNHSSPCLEQFPTTCETGPGSPSGHAMGASCVWYVMVTAALSHTVCGMDKFSITLHRHAGGRGL

SEQ ID NO: 8668 - DNA, 1478 bp, Homo sapiens
ctttttcaagatggatttccttcacaggaatggagtgctcataattcagcatttgcagaaggactaccgagcttactacacttttctaaattttatgtccaatgttggagaccccaggaatatctttttcatttattttccactttgttttcaatttaatcagacagttggaaccaagatgatatgggtagcagtcattggggattggttaaatcttatatttaaatggatattatttggtcatcgaccttactggtgggtccaagaaactcagatttacccaaatcactcaagtccatgccttgaacagttccctactacatgtgaaacaggtccaggaagtccatctggccatgcaatgggcgcatcctgtgtctggtatgtcatggtaaccgctgccctgagccacactgtctgtgggatggataagttctctatcactctgcacagactgacctggtcatttctttggagtgttttttggttgattcaaatcagtgtctgcatctccagagtattcatagcaacacattttcctcatcaagttattcttggagtaattggtggcatgctggtggcagaggcctttgaacacactccaggcatccaaacggccagtctgggcacatacctgaagaccaacctctttctcttcctgtttgcagttggcttttacctgcttcttagggtgctcaacattgacctgctgtggtccgtgcccatagccaaaaagtggtgtgctaaccccgactggatccacattgacaccacgccttttgctggactcgtgagaaaccttggggtcctctttggcttgggctttgcaatcaactcagagatgttcctcctgagctgccgagggggaaataactacacactgagcttccggttgctctgtgccttgacctcattgacaatactgcagctctaccatttcctccagatcccgactcacgaagagcatttattttatgtgctgtctttttgtaaaagtgcatccattcccctaactgtggttgctttcattccctactctgttcatatgttaatgaaacaaagcggaaagaagagtcagtagagtggtgcctagagttagtgctctgtgtcacagatcacccttctccatccaccagtagagccacagagtaggcacagaccagaggcttctaatccgacttcacagaatagcggcacaggccccattccccatagagatgtttagtttggccttcgcactggtctttttttttaatccttcagttaccaatatttagatacaagaatatttgacataaaaatcggaagttctgtatttcttgaaaaatctgatagtatgacaacacagagcctgcatccccagctggagacaactgaccagagctgcatactaacagtccccagtaggaggcaaggactccattttctcacagtcttcagcatcccagcaggagccccactatgattcctttatcttctta

SEQ ID NO: 8669 - protein, 355 aa, Homo sapiens; identical to SEQ ID NO: 666

SEQ ID NO: 8670 - DNA, 1137 bp, Homo sapiens
tttcaagatggatttccttcacaggaatggagtgctcataattcagcatttgcagaaggactaccgagcttactacacttttctaaattttatgtccaatgttggagaccccaggaatatctttttcatttattttccactttgttttcaatttaatcagacagttggaaccaagatgatatgggtagcagtcattggggattggttaaatcttatatttaaatggcatgctggtggcagaggcctttgaacacactccaggcatccaaacggccagtctgggcacatacctgaagaccaacctctttctcttcctgtttgcagttggcttttacctgcttcttagggtgctcaacattgacctgctgtggtccgtgcccatagccaaaaagtggtgtgctaaccccgactggatccacattgacaccacgccttttgctggactcgtgagaaaccttggggtcctctttggcttgggctttgcaatcaactcagagatgttcctcctgagctgccgagggggaaataactacacactgagcttccggttgctctgtgccttgacctcattgacaatactgcagctctaccatttcctccagatcccgactcacgaagagcatttattttatgtgctgtctttttgtaaaagtgcatccattcccctaactgtggttgctttcattccctactctgttcatatgttaatgaaacaaagcggaaagaagagtcagtagagtggtgcctagagttagtgctctgtgtcacagatcacccttctccatccaccagtagagccacagagtaggcacagaccagaggcttctaatccgacttcacagaatagcggcacaggccccattccccatagagatgtttagtttggccttcgcactggtctttttttttaatccttcagttaccaatatttagatacaagaatatttgacataaaaatcggaagttctgtatttcttgaaaaatctgatagtatgacaacacagagcctgcatccccagctggagacaactgaccagagctgcatactaacagtccccagtaggaggcaaggactccattttctcacagtcttcagcatcccagcaggagccccactatgattcctttatcttctta

SEQ ID NO: 8671 - protein, 80 aa, Homo sapiens
MDFLHRNGVLIIQHLQKDYRAYYTFLNFMSNVGDPRNIFFIYFPLCFQFNQTVGTKMIWVAVIGDWLNLIFKWHAGGRGL

SEQ ID NO: 8672 - DNA, 5326 bp, Homo sapiens
gaatgatgaaaaccgaggttggaaaaggttgtgaaaccttttaactctccacagtggagtccattatttcctctggcttcctcaaattcatattcacagggtcgttggctgtgggttgcaattaccatgtctgactcagtaattcttcgaagtataaagaaatttggagaggagaatgatggttttgagtcagataaatcatataataatgataagaaatcaaggttacaagatgagaagaaaggtgatggcgttagagttggcttctttcaattgtttcggttttcttcatcaactgacatttggctgatgtttgtgggaagtttgtgtgcatttctccatggaatagcccagccaggcgtgctactcatttttggcacaatgacagatgtttttattgactacgacgttgagttacaagaactccagattccaggaaaagcatgtgtgaataacaccattgtatggactaacagttccctcaaccagaacatgacaaatggaacacgttgtgggttgctgaacatcgagagcgaaatgatcaaatttgccagttactatgctggaattgctgtcgcagtacttatcacaggatatattcaaatatgcttttgggtcattgccgcagctcgtcagatacagaaaatgagaaaattttactttaggagaataatgagaatggaaatagggtggtttgactgcaattcagtgggggagctgaatacaagattctctgatgatattaataaaatcaatgatgccatagctgaccaaatggcccttttcattcagcgcatgacctcgaccatctgtggtttcctgttgggatttttcaggggttggaaactgaccttggttattatttctgtcagccctctcattgggattggagcagccaccattggtctgagtgtgtccaagtttacggactatgagctgaaggcctatgccaaagcaggggtggtggctgatgaagtcatttcatcaatgagaacagtggctgcttttggtggtgagaaaagagaggttgaaaggtatgagaaaaatcttgtgttcgcccagcgttggggaattagaaaaggaatagtgatgggattctttactggattcgtgtggtgtctcatctttttgtgttatgcactggccttctggtacggctccacacttgtcctggatgaaggagaatatacaccaggaacccttgtccagattttcctcagtgtcatagtaggagctttaaatcttggcaatgcctctccttgtttggaagcctttgcaactggacgtgcagcagccaccagcatttttgagacaatagacaggaaacccatcattgactgcatgtcagaagatggttacaagttggatcgaatcaagggtgaaattgaattccataatgtgaccttccattatccttccagaccagaggtgaagattctaaatgacctcaacatggtcattaaaccaggggaaatgacagctctggtaggacccagtggagctggaaaaagtacagcactgcaactcattcagcgattctatgacccctgtgaaggaatggtgaccgtggatggccatgacattcgctctcttaacattcagtggcttagagatcagattgggatagtggagcaagagccagttctgttctctaccaccattgcagaaaatattcgctatggcagagaagatgcaacaatggaagacatagtccaagctgccaaggaggccaatgcctacaacttcatcatggacctgccacagcaatttgacacccttgttggagaaggaggaggccagatgagtggtggccagaaacaaagggtagctatcgccagagccctcatccgaaatcccaagattctgcttttggacatggccacctcagctctggacaatgagagtgaagccatggtgcaagaagtgctgagtaagattcagcatgggcacacaatcatttcagttgctcatcgcttgtctacggtcagagctgcagataccatcattggttttgaacatggcactgcagtggaaagagggacccatgaagaattactggaaaggaaaggtgtttacttcactctagtgactttgcaaagccagggaaatcaagctcttaatgaagaggacataaaggatgcaactgaagatgacatgcttgcgaggacctttagcagagggagctaccaggatagtttaagggcttccatccggcaacgctccaagtctcagctttcttacctggtgcacgaacctccattagctgttgtagatcataagtctacctatgaagaagatagaaaggacaaggacattcctgtgcaggaagaagttgaacctgccccagttaggaggattctgaaattcagtgctccagaatggccctacatgctggtagggtctgtgggtgcagctgtgaacgggacagtcacacccttgtatgcctttttattcagccagattcttgggactttttcaattcctgataaagaggaacaaaggtcacagatcaatggtgtgtgcctactttttgtagcaatgggctgtgtatctcttttcacccaatttctacagggatatgcctttgctaaatctggggagctcctaacaaaaaggctacgtaaatttggtttcagggcaatgctggggcaagatattgcctggtttgatgacctcagaaatagccctggagcattgacaacaagacttgctacagatgcttcccaagttcaaggggctgccggctctcagatcgggatgatagtcaattccttcactaacgtcactgtggccatgatcattgccttctcctttagctggaagctgagcctggtcatcttgtgcttcttccccttcttggctttatcaggagccacacagaccaggatgttgacaggatttgcctctcgagataagcaggccctggagatggtgggacagattacaaatgaagccctcagtaacatccgcactgttgctggaattggaaaggagaggcggttcattgaagcacttgagactgagctggagaagcccttcaagacagccattcagaaagccaatatttacggattctgctttgcctttgcccagtgcatcatgtttattgcgaattctgcttcctacagatatggaggttacttaatctccaatgaggggctccatttcagctatgtgttcagggtgatctctgcagttgtactgagtgcaacagctcttggaagagccttctcttacaccccaagttatgcaaaagctaaaatatcagctgcacgcttttttcaactgctggaccgacaacccccaatcagtgtatacaatactgcaggtgaaaaatgggacaacttccaggggaagattgattttgttgattgtaaatttacatatccttctcgacctgactcgcaagttctgaatggtctctcagtgtcgattagtccagggcagacactggcgtttgttgggagcagtggatgtggcaaaagcactagcattcagctgttggaacgtttctatgatcctgatcaagggaaggtgatgatagatggtcatgacagcaaaaaagtaaatgtccagttcctccgctcaaacattggaattgtttcccaggaaccagtgttgtttgcctgtagcataatggacaatatcaagtatggagacaacaccaaagaaattcccatggaaagagtcatagcagctgcaaaacaggctcagctgcatgattttgtcatgtcactcccagagaaatatgaaactaacgttgggtcccaggggtctcaactctctagaggggagaaacaacgcattgctattgctcgggccattgtacgagatcctaaaatcttgctactagatgaagccacttctgccttagacacagaaagtgaaaagacggtgcaggttgctctagacaaagccagagagggtcggacctgcattgtcattgcccatcgcttgtccaccatccagaacgcggatatcattgctgtcatggcacagggggtggtgattgaaaaggggacccatgaagaactgatggcccaaaaaggagcctactacaaactagtcaccactggatcccccatcagttgacccaatgcaagaatctcagacacacatgacgcaccagttacaggggttgtttttaaagaaaaaaacaatcccagcaggagggattgctgggattgttttttctttaaagaagaatgttaatattttacttttacagtcattttcctacatcggaatccaagctaatttctaatggccttccataataattctgctttagatgtgtatacagaaaatgaaagaaactagggtccatatgagggaaaacccaatgtcaagtggcagctcagccaccactcagtgcttctctgtgcaggagccagtcctgattaatatgtgggaattagtgagacatcagggagtaagtgacactttgaactcctcaagggcagagaactgtctttcatttttgaaccctcggtgtacacagaggcgggtctataacaggcaatcaacaaacgtttcttgagctagaccaaggtcagatttgaaaagaacagaaggactgaagaccagctgtgtttcttaactaaatttgtctttcaagtgaaaccagcttccttcatctctaaggctaaggatagggaaagggtggatgctctcaggctgagggaggcagaaagggaaagtattagcatgagctttccagttagggctgttgatttatgctttaacttcagagtgagtgtaggggtggtgatgctaccattactgtgaggacctaccagtgtggctggagcagggactctctcccaggccttttactcctcagcacctccctgcatactgattgttgtttttagtttctgtgaaattatattcatgaaatgaaaatagcgcattttactttgctgtagtttcataaggttttatacaaaaaagcaagtaaatatggcagaaaagcactcatttgcccctgctccctcaaaacaccacagaatgacatagaactaaaggcggcaggaatctacaagaatgaagaaaacacagtgatgccacctgcaaaatcttgggagccagaaagcaaatggacaattgataatagagttacaagatgagagaaaacaaaaatgtaacctgttagttgggggagcctagaaacatcctgttttgtaccacagacccctagaaagtttcaagatgtaaaaacactggatccttctggaaggaggagacaaggggacagagggactgaagacagaagaatggaccaaaagcctgtatggaaacagaattgcagagccccgcctgcagc

SEQ ID NO: 8673 - protein, 1321 aa, Homo sapiens; identical to SEQ ID NO: 668

SEQ ID NO: 8674 - DNA, 698 bp, Homo sapiens
ggttgaagcctccatttccctgtctaggagcttctgtttacactccaccccactctagattgcaagccccttgaataatttttgtttcctagtaccaagaataatggtgacaaatattaggggatgactcctaaaaatggattaagaagctatttagggggaaaatgcccattttgtggttttaaaagatgctacaattgccataaaatgcccaagtttcattgcagaaatcaaatactggagttgtgttttgcttggtcaagaggaaagaatgtacatttagagacaaagaatcgctgtggcagttaactttggtgttacattctgttttcttcctaagcaattctttagtcctctacctcaacggtgcctctgaagaaaggacttacgtggccaatgggatcaccgtgtatttatttcccttccctatcagccatagccctcagggctggaagggcctcattttagtctattcccagactgggtcacccacagtgttgacacacagcatcaaccgacagtgagcttatctggaaaataatgcctttctattttctttgtttcttagcatatattaaatgtttctttccttctctaataatcttttagataaagaaatcatttgctgagctgataataacaaaagtatcctacctacatttttaaatgtcagcagtgaaagacgttttaagggcttt

SEQ ID NO: 8675 - protein, 61 aa, Homo sapiens
MTPKNGLRSYLGGKCPFCGFKRCYNCHKMPKFHCRNQILELCFAWSRGKNVHLETKNRCGS

SEQ ID NO: 8676 - DNA, 2865 bp, Homo sapiens
atctgaaaaattaataattccttaattatcaaatatccattatttaaatttataattgtgtcataaatattgtcataaatagatttgctgttttaaagcttgttccttcattttctctgttttgttttagataaacattgtcataaatagatttgttgttttaaagcttgttccttcattttctctgattgttttgttttagattcagaggttacttatgcttgtttgttacatggatgttacatgtgtaatgggggatattggacttctagtgtactcatcacccatatactgaacactgtactcaaaagggattgaaagaaactaggaaacttggcaggaagatcattcttaagccaggaaaaaaatttttaatgctcacatgtgaacatgtgatggtcataccagaaggagcacccacctccctccctctgtgacagacacattttcttagccttcacctttccttctttcaagttgctgaaaatccacagtgtttctgttcatttgttactttcattctcacctatcttctctcttgctccatctaccagaacaataattccccatataatacttctcacttcacttttcaacgcaggacctcttgttgggtctgatctgtttgtctgtccgctttatcaatattatcagatgtaagtttacatgaatacacacacatattcactaaactgaggggaaaaaatgccttgtaggtcataaaaaagcagggaaattcccaacaattcatatttgatccctggatccaggggtggcagcaataagcctgctttagatatttactccccattttatgatccggtggtttggtttttcaaatgatgatatggctcctttcgcaatgacttgatgtttaggaggtgtgcttcaataaatacattttaaaatcaacaatcaagttagagttgtacaaatggctctgaaatgtcccactacactgttagaccaagggcacagattgtgcttctgtactatttatcctagtatccctcggcatatattaactgctctaaaaatctccttggctacacgctgcatcaaatcaaagttaaatgttataccacctttctattctatttttaatattcaaagagggtgctcagattttagaacaaatttcaatgtttaagtacacacaaaaaaatcattaactcatatatttcaagagtaggaaatgggaactggtgttaaaactcttataacaaatgtcactgtcttaagggacagtgtttaaaaacgcatacctggccgggcgcggtggctcatgcctgtaatcccagcactttgggaggccgaggccggcggatcacaaggaaaacaaactcaggaagaaaaagaaaagcagaagtgatcaaggagagcgctcgagttgcaatattttcctttggctgctgacaggcagttactataaagcattgtgcatggacaccatcttcttgtattatacaagaaaggagtgtacctatcacacacagggggaaaaatgctcttttgggtgctaggcctcctaatcctctgtggttttctgtggactcgtaaaggaaaactaaagattgaagacatcactgataagtacatttttatcactggatgtgactcgggctttggaaacttggcagccagaacttttgataaaaagggatttcatgtaatcgctgcctgtctgactgaatcaggatcaacagctttaaaggcagaaacctcagagagacttcgtactgtgcttctggatgtgaccgacccagagaatgtcaagaggactgcccagtgggtgaagaaccaagttggggagaaaggtctctggggtctgatcaataatgctggtgttcccggcgtgctggctcccactgactggctgacactagaggactacagagaacctattgaagtgaacctgtttggactcatcagtgtgacactaaatatgcttcctttggtcaagaaagctcaagggagagttattaatgtctccagtgttggaggtcgccttgcaatcgttggagggggctatactccatccaaatatgcagtggaaggtttcaatgacagcttaagacgggacatgaaagcttttggtgtgcacgtctcatgcattgaaccaggattgttcaaaacaaacttggcagatccagtaaaggtaattgaaaaaaaactcgccatttgggagcagctgtctccagacatcaaacaacaatatggagaaggttacattgaaaaaagtctagacaaactgaaaggcaataaatcctatgtgaacatggacctctctccggtggtagagtgcatggaccacgctctaacaagtctcttccctaagactcattatgccgctggaaaagatgccaaaattttctggatacctctgtctcacatgccagcagctttgcaagactttttattgttgaaacagaaagcagagctggctaatcccaaggcagtgtgactcagctaaccacaaatgtctcctccaggctatgaaattggccgatttcaagaacacatctccttttcaaccccattccttatctgctccaacctggactcatttagatcgtgcttatttggattgcaaaagggagtcccaccatcgctggtggtatcccagggtccctgctcaagttttctttgaaaaggagggctggaatggtacatcacataggcaagtcctgccctgtatttaggctttgcctgcttggtgtgatgtaagggaaattgaaagacttgcccattcaaaatgatctttaccgtggcctgccccatgcttatggtccccagcatttacagtaacttgtgaatgttaagtatcatctcttatctaaatattaaaagataagtcaaacattt

SEQ ID NO: 8677 - protein, 319 aa, Homo sapiens; identical to SEQ ID NO: 670

SEQ ID NO: 8678 - DNA, 1918 bp, Homo sapiens
aggaagaaaatataaagtacacttttaaaacatgaagtcttcatagcagcttatagtcgttcagagaaacatgttccactgagaatgacttgagagagaggattacatcattatgccagaaggaagaagccactgtgcatgctctatcaccagcctcaccctcctggtcagccttacaagagtgacactggatatactccagaagttggacccaccacagcctgcacactggacttcttggcttttatgagctattcaagagatatttagtcatcacgttgtgtcacaatgggagtgactcacagagcaaggagagaacctgaggattcctcacacatgtagtactcagagctctacggaaacccaggcacctcgacctcaagaggatcagcctggccagggtggcacaactcttccttccccgtgcacagcaggaaagctgccatcagctgagcaagtccaccaacagtttctgtgtcccacttcatctttaataaggacaccatcttcttgtattatacaagaaaggagtgtacctatcacacacagggggaaaaatgctcttttgggtgctaggcctcctaatcctctgtggttttctgtggactcgtaaaggaaaactaaagattgaagacatcactgataagtacatttttatcactggatgtgactcgggctttggaaacttggcagccagaacttttgataaaaagggatttcatgtaatcgctgcctgtctgactgaatcaggatcaacagctttaaaggcagaaacctcagagagacttcgtactgtgcttctggatgtgaccgacccagagaatgtcaagaggactgcccagtgggtgaagaaccaagttggggagaaaggtctctggggtctgatcaataatgctggtgttcccggcgtgctggctcccactgactggctgacactagaggactacagagaacctattgaagtgaacctgtttggactcatcagtgtgacactaaatatgcttcctttggtcaagaaagctcaagggagagttattaatgtctccagtgttggaggtcgccttgcaatcgttggagggggctatactccatccaaatatgcagtggaaggtttcaatgacagcttaagacgggacatgaaagcttttggtgtgcacgtctcatgcattgaaccaggattgttcaaaacaaacttggcagatccagtaaaggtaattgaaaaaaaactcgccatttgggagcagctgtctccagacatcaaacaacaatatggagaaggttacattgaaaaaagtctagacaaactgaaaggcaataaatcctatgtgaacatggacctctctccggtggtagagtgcatggaccacgctctaacaagtctcttccctaagactcattatgccgctggaaaagatgccaaaattttctggatacctctgtctcacatgccagcagctttgcaagactttttattgttgaaacagaaagcagagctggctaatcccaaggcagtgtgactcagctaaccacaaatgtctcctccaggctatgaaattggccgatttcaagaacacatctccttttcaaccccattccttatctgctccaacctggactcatttagatcgtgcttatttggattgcaaaagggagtcccaccatcgctggtggtatcccagggtccctgctcaagttttctttgaaaaggagggctggaatggtacatcacataggcaagtcctgccctgtatttaggctttgcctgcttggtgtgatgtaagggaaattgaaagacttgcccattcaaaatgatctttaccgtggcctgccccatgcttatggtccccagcatttacagtaacttgtgaatgttaagtatcatctcttatctaaatattaaaagataagtcaaacattt

SEQ ID NO: 8679 - protein, 319 aa, Homo sapiens; identical to SEQ ID NO: 670

SEQ ID NO: 8680 - DNA, 581 bp, Homo sapiens
atagcagcttatagtcgttcagagaaacatgttccactgagaatgacttgagagagaggattacatcattatgccagaaggaagaagccactgtgcatgctctatcaccagcctcaccctcctggtcagccttacaagagtgacactggatatactccagaagttggacccaccacagcctgcacactggacttcttggcttttatgagctattcaagagatatttagtcatcacgttgtgtcacaatgggagtgactcacagagcaaggagagaacctgaggattcctcacacatgtagtactcagagctctacggaaacccaggcacctcgacctcaagaggatcagcctggccagggtggcacaactcttccttccccgtgcacagcaggaaagctgccatcagctgagcaagtccaccaacagtttctgtgtcccacttcatctttaataaggacaccatcttcttgtattatacaagaaaggagtgtacctatcacacacagggggaaaaatgctcttttgggtgctaggcctcctaatcctctgtggttttctgtggactcgtaaaggaaaacta

SEQ ID NO: 8681 - protein, 45 aa, Homo sapiens
MPEGRSHCACSITSLTLLVSLTRVTLDILQKLDPPQPAHWTSWLL

SEQ ID NO: 8682 - DNA, 1808 bp, Homo sapiens
aagaaacagaggaaggtgaataagagaagtgaaattaaataatcctattttaacttttttactaggaaaacaaactcaggaagaaaaagaaaagcagaagtgatcaaggagagcgctcgagttgcaatattttcctttggctgctgacaggcagttactataaagcattgtgcatggtaggaaaatggaggctaagaaaagttaatttgtccgagggccctctgatgatagtgaaactgggatggaacctctgcctgcttgcttctgaggtctgggctcctaactactgctctactgcctcgagccaagagatttacgccctattaagcaatttgttgtgcgataaattggaagacacagcagataagcaaacaactcaagcaaccaggacaccatcttcttgtattatacaagaaaggagtgtacctatcacacacagggggaaaaatgctcttttgggtgctaggcctcctaatcctctgtggttttctgtggactcgtaaaggaaaactaaagattgaagacatcactgataagtacatttttatcactggatgtgactcgggctttggaaacttggcagccagaacttttgataaaaagggatttcatgtaatcgctgcctgtctgactgaatcaggatcaacagctttaaaggcagaaacctcagagagacttcgtactgtgcttctggatgtgaccgacccagagaatgtcaagaggactgcccagtgggtgaagaaccaagttggggagaaaggtctctggggtctgatcaataatgctggtgttcccggcgtgctggctcccactgactggctgacactagaggactacagagaacctattgaagtgaacctgtttggactcatcagtgtgacactaaatatgcttcctttggtcaagaaagctcaagggagagttattaatgtctccagtgttggaggtcgccttgcaatcgttggagggggctatactccatccaaatatgcagtggaaggtttcaatgacagcttaagacgggacatgaaagcttttggtgtgcacgtctcatgcattgaaccaggattgttcaaaacaaacttggcagatccagtaaaggtaattgaaaaaaaactcgccatttgggagcagctgtctccagacatcaaacaacaatatggagaaggttacattgaaaaaagtctagacaaactgaaaggcaataaatcctatgtgaacatggacctctctccggtggtagagtgcatggaccacgctctaacaagtctcttccctaagactcattatgccgctggaaaagatgccaaaattttctggatacctctgtctcacatgccagcagctttgcaagactttttattgttgaaacagaaagcagagctggctaatcccaaggcagtgtgactcagctaaccacaaatgtctcctccaggctatgaaattggccgatttcaagaacacatctccttttcaaccccattccttatctgctccaacctggactcatttagatcgtgcttatttggattgcaaaagggagtcccaccatcgctggtggtatcccagggtccctgctcaagttttctttgaaaaggagggctggaatggtacatcacataggcaagtcctgccctgtatttaggctttgcctgcttggtgtgatgtaagggaaattgaaagacttgcccattcaaaatgatctttaccgtggcctgccccatgcttatggtccccagcatttacagtaacttgtgaatgttaagtatcatctcttatctaaatattaaaagataagtcaaacattt

SEQ ID NO: 8683 - protein, 319 aa, Homo sapiens; identical to SEQ ID NO: 670

SEQ ID NO: 8684 - DNA, 1105 bp, Homo sapiens
aaaggtggcaaataagtactgtcttaccacacctcttttccttcctctctgttctaggtctctggggtctgatcaataatgctggtgttcccggcgtgctggctcccactgactggctgacactagaggactacagagaacctattgaagtgaacctgtttggactcatcagtgtgacactaaatatgcttcctttggtcaagaaagctcaagggagagttattaatgtctccagtgttggaggtcgccttgcaatcgttggagggggctatactccatccaaatatgcagtggaaggtttcaatgacagcttaagacgggacatgaaagcttttggtgtgcacgtctcatgcattgaaccaggattgttcaaaacaaacttggcagatccagtaaaggtaattgaaaaaaaactcgccatttgggagcagctgtctccagacatcaaacaacaatatggagaaggttacattgaaaaaagtctagacaaactgaaaggcaataaatcctatgtgaacatggacctctctccggtggtagagtgcatggaccacgctctaacaagtctcttccctaagactcattatgccgctggaaaagatgccaaaattttctggatacctctgtctcacatgccagcagctttgcaagactttttattgttgaaacagaaagcagagctggctaatcccaaggcagtgtgactcagctaaccacaaatgtctcctccaggctatgaaattggccgatttcaagaacacatctccttttcaaccccattccttatctgctccaacctggactcatttagatcgtgcttatttggattgcaaaagggagtcccaccatcgctggtggtatcccagggtccctgctcaagttttctttgaaaaggagggctggaatggtacatcacataggcaagtcctgccctgtatttaggctttgcctgcttggtgtgatgtaagggaaattgaaagacttgcccattcaaaatgatctttaccgtggcctgccccatgcttatggtccccagcatttacagtaacttgtgaatgttaagtatcatctcttatctaaatattaaaagataagtcaaacattt

SEQ ID NO: 8685 - protein, 172 aa, Homo sapiens
MLPLVKKAQGRVINVSSVGGRLAIVGGGYTPSKYAVEGFNDSLRRDMKAFGVHVSCIEPGLFKTNLADPVKVIEKKLAIWEQLSPDIKQQYGEGYIEKSLDKLKGNKSYVNMDLSPVVECMDHALTSLFPKTHYAAGKDAKIFWIPLSHMPAALQDFLLLKQKAELANPKAV

SEQ ID NO: 8686 - DNA, 8192 bp, Homo sapiens
cggtgcggtgtgctacgcgcgcccacctcccggggaaggaacggcgaggccggggaccgtcgcggagatggatcgcgggccggcagcagtggcgtgcacgctgctcctggctctcgtcgcctgcctagcgccggccagtggccaagaatgtgacagtgcgcattttcgctgtggaagtgggcattgcatccctgcagactggaggtgtgatgggaccaaagactgttcagatgacgcggatgaaattggctgcgctgttgtgacctgccagcagggctatttcaagtgccagagtgagggacaatgcatccccaactcctgggtgtgtgaccaagatcaagactgtgatgatggctcagatgaacgtcaagattgctcacaaagtacatgctcaagtcatcagataacatgctccaatggtcagtgtatcccaagtgaatacaggtgcgaccacgtcagagactgccccgatggagctgatgagaatgactgccagtacccaacatgtgagcagcttacttgtgacaatggggcctgctataacaccagtcagaagtgtgattggaaagttgattgcagggactcctcagatgaaatcaactgcactgagatatgcttgcacaatgagttttcatgtggcaatggagagtgtatccctcgtgcttatgtctgtgaccatgacaatgattgccaagacggcagtgacgaacatgcttgcaactatccgacctgcggtggttaccagttcacttgccccagtggccgatgcatttatcaaaactgggtttgtgatggagaagatgactgtaaagataatggagatgaagatggatgtgaaagcggtcctcatgatgttcataaatgttccccaagagaatggtcttgcccagagtcgggacgatgcatctccatttataaagtttgtgatgggattttagattgcccaggaagagaagatgaaaacaacactagtaccggaaaatactgtagtatgactctgtgctctgccttgaactgccagtaccagtgccatgagacgccgtatggaggagcgtgtttttgtcccccaggttatatcatcaaccacaatgacagccgtacctgtgttgagtttgatgattgccagatatggggaatttgtgaccagaagtgtgaaagccgacctggccgtcacctgtgccactgtgaagaagggtatatcttggagcgtggacagtattgcaaagctaatgattcctttggcgaggcctccattatcttctccaatggtcgggatttgttaattggtgatattcatggaaggagcttccggatcctagtggagtctcagaatcgtggagtggccgtgggtgtggctttccactatcacctgcaaagagttttttggacagacaccgtgcaaaataaggttttttcagttgacattaatggtttaaatatccaagaggttctcaatgtttctgttgaaaccccagagaacctggctgtggactgggttaataataaaatctatctagtggaaaccaaggtcaaccgcatagatatggtaaatttggatggaagctatcgggttacccttataactgaaaacttggggcatcctagaggaattgccgtggacccaactgttggttatttatttttctcagattgggagagcctttctggggaacctaagctggaaagggcattcatggatggcagcaaccgtaaagacttggtgaaaacaaagctgggatggcctgctggggtaactctggatatgatatcgaagcgtgtttactgggttgactctcggtttgattacattgaaactgtaacttatgatggaattcaaaggaagactgtagttcatggaggctccctcattcctcatccctttggagtaagcttatttgaaggtcaggtgttctttacagattggacaaagatggccgtgctgaaggcaaacaagttcacagagaccaacccacaagtgtactaccaggcttccctgaggccctatggagtgactgtttaccattccctcagacagccctatgctaccaatccgtgtaaagataacaatgggggctgtgagcaggtctgtgtcctcagccacagaacagataatgatggtttgggtttccgttgcaagtgcacattcggcttccaactggatacagatgagcgccactgcattgctgttcagaatttcctcattttttcatcccaagttgctattcgtgggatcccgttcaccttgtctacccaggaagatgtcatggttccagtttcggggaatccttctttctttgtcgggattgattttgacgcccaggacagcactatctttttttcagatatgtcaaaacacatgatttttaagcaaaagattgatggcacaggaagagaaattctcgcagctaacagggtggaaaatgttgaaagtttggcttttgattggatttcaaagaatctctattggacagactctcattacaagagtatcagtgtcatgaggctagctgataaaacgagacgcacagtagttcagtatttaaataacccacggtcggtggtagttcatccttttgccgggtatctattcttcactgattggttccgtcctgctaaaattatgagagcatggagtgacggatctcacctcttgcctgtaataaacactactcttggatggcccaatggcttggccatcgattgggctgcttcacgattgtactgggtagatgcctattttgataaaattgagcacagcacctttgatggtttagacagaagaagactgggccatatagagcagatgacacatccgtttggacttgccatctttggagagcatttattttttactgactggagactgggtgccattattcgagtcaggaaagcagatggtggagaaatgacagttatccgaagtggcattgcttacatactgcatttgaaatcgtatgatgtcaacatccagactggttctaacgcctgtaatcaacccacgcatcctaacggtgactgcagccacttctgcttcccggtgccaaatttccagcgagtgtgtgggtgcccttatggaatgaggctggcttccaatcacttgacatgcgagggggacccaaccaatgaaccacccacagagcagtgtggcttattttccttcccctgtaaaaatggcagatgtgtgcccaattactatctctgtgatggagtcgatgattgtcatgataacagtgatgagcaactatgtggcacacttaataatacctgttcatcttcggcgttcacctgtggccatggggagtgcattcctgcacactggcgctgtgacaaacgcaacgactgtgtggatggcagtgatgagcacaactgccccacccacgcacctgcttcctgccttgacacccaatacacctgtgataatcaccagtgtatctcaaagaactgggtctgtgacacagacaatgattgtggggatggatctgatgaaaagaactgcaattcgacagagacatgccaacctagtcagtttaattgccccaatcatcgatgtattgacctatcgtttgtctgtgatggtgacaaggattgtgttgatggatctgatgaggttggttgtgtattaaactgtactgcttctcaattcaagtgtgccagtggggataaatgtattggcgtcacaaatcgttgtgatggtgtttttgattgcagtgacaactcggatgaagcaggctgtccaaccaggcctcctggtatgtgccactcagatgaatttcagtgccaagaagatggtatctgcatcccgaacttctgggaatgtgatgggcatccagactgcctctatggatctgatgagcacaatgcctgtgtccccaagacttgcccttcatcatatttccactgtgacaacggaaactgcatccacagggcatggctctgtgatcgggacaatgactgcggggatatgagtgatgagaaggactgccctactcagccctttcgctgtcctagttggcaatggcagtgtcttggccataacatctgtgtgaatctgagtgtagtgtgtgatggcatctttgactgccccaatgggacagatgagtccccactttgcaatgggaacagctgctcagatttcaatggtggttgtactcacgagtgtgttcaagagccctttggggctaaatgcctatgtccattgggattcttacttgccaatgattctaagacctgtgaagacatagatgaatgtgatattctaggctcttgtagccagcactgttacaatatgagaggttctttccggtgctcgtgtgatacaggctacatgttagaaagtgatgggaggacttgcaaagttacagcatctgagagtctgctgttacttgtggcaagtcagaacaaaattattgccgacagtgtcacctcccaggtccacaatatctattcattggtcgagaatggttcttacattgtagctgttgattttgattcaattagtggtcgtatcttttggtctgatgcaactcagggtaaaacctggagtgcgtttcaaaatggaacggacagaagagtggtatttgacagtagcatcatcttgactgaaactattgcaatagattgggtaggtcgtaatctttactggacagactatgctctggaaacaattgaagtctccaaaattgatgggagccacaggactgtgctgattagtaaaaacctaacaaatccaagaggactagcattagatcccagaatgaatgagcatctactgttctggtctgactggggccaccaccctcgcatcgagcgagccagcatggacggcagcatgcgcactgtcattgtccaggacaagatcttctggccctgcggcttaactattgactaccccaacagactgctctacttcatggactcctatcttgattacatggacttttgtgattataatggacaccatcggagacaggtgatagccagtgatttgattatacggcacccctatgccctaactctctttgaagactctgtgtactggactgaccgtgctactcgtcgggttatgcgagccaacaagtggcatggagggaaccagtcagttgtaatgtataatattcaatggccccttgggattgttgcggttcatccttcgaaacaaccaaattccgtgaatccatgtgccttttcccgctgcagccatctctgcctgctttcctcacaggggcctcatttttactcctgtgtttgtccttcaggatggagtctgtctcctgatctcctgaattgcttgagagatgatcaacctttcttaataactgtaaggcaacatataatttttggaatctcccttaatcctgaggtgaagagcaatgatgctatggtccccatagcagggatacagaatggtttagatgttgaatttgatgatgctgagcaatacatctattgggttgaaaatccaggtgaaattcacagagtgaagacagatggcaccaacaggacagtatttgcttctatatctatggtggggccttctatgaacctggccttagattggatttcaagaaacctttattctaccaatcctagaactcagtcaatcgaggttttgacactccacggagatatcagatacagaaaaacattgattgccaatgatgggacagctcttggagttggctttccaattggcataactgttgatcctgctcgtgggaagctgtactggtcagaccaaggaactgacagtggggttcctgccaagatcgccagtgctaacatggatggcacatctgtgaaaactctctttactgggaacctcgaacacctggagtgtgtcactcttgacatcgaagagcagaaactctactgggcagtcactggaagaggagtgattgaaagaggaaacgtggatggaacagatcgaatgatcctggtacaccagctttcccacccctggggaattgcagtccatgattctttcctttattatactgatgaacagtatgaggtcattgaaagagttgataaggccactggggccaacaaaatagtcttgagagataatgttccaaatctgaggggtcttcaagtttatcacagacgcaatgccgccgaatcctcaaatggctgtagcaacaacatgaatgcctgtcagcagatttgcctgcctgtaccaggaggattgttttcctgcgcctgtgccactggatttaaactcaatcctgataatcggtcctgctctccatataactctttcattgttgtttcaatgctgtctgcaatcagaggctttagcttggaattgtcagatcattcagaaaccatggtgccggtggcaggccaaggacgaaacgcactgcatgtggatgtggatgtgtcctctggctttatttattggtgtgattttagcagctcagtggcatctgataatgcgatccgtagaattaaaccagatggatcttctctgatgaacattgtgacacatggaataggagaaaatggagtccggggtattgcagtggattgggtagcaggaaatctttatttcaccaatgcctttgtttctgaaacactgatagaagttctgcggatcaatactacttaccgccgtgttcttcttaaagtcacagtggacatgcctaggcatattgttgtagatcccaagaacagatacctcttctgggctgactatgggcagagaccaaagattgagcgttctttccttgactgtaccaatcgaacagtgcttgtgtcagagggcattgtcacaccacggggcttggcagtggaccgaagtgatggctacgtttattgggttgatgattctttagatataattgcaaggattcgtatcaatggagagaactctgaagtgattcgttatggcagtcgttacccaactccttatggcatcactgtttttgaaaattctatcatatgggtagataggaatttgaaaaagatcttccaagccagcaaggaaccagagaacacagagccacccacagtgataagagacaatatcaactggctaagagatgtgaccatctttgacaagcaagtccagccccggtcaccagcagaggtcaacaacaacccttgcttggaaaacaatggtgggtgctctcatctctgctttgctctgcctggattgcacaccccaaaatgtgactgtgcctttgggaccctgcaaagtgatggcaagaattgtgccatttcaacagaaaatttcctcatctttgccttgtctaattccttgagaagcttacacttggaccctgaaaaccatagcccacctttccaaacaataaatgtggaaagaactgtcatgtctctagactatgacagtgtaagtgatagaatctacttcacacaaaatttagcctctggagttggacagatttcctatgccaccctgtcttcagggatccatactccaactgtcattgcttcaggtatagggactgctgatggcattgcctttgactggattactagaagaatttattacagtgactacctcaaccagatgattaattccatggctgaagatgggtctaaccgcactgtgatagcccgcgttccaaaaccaagagcaattgtgttagatccctgccaagggtacctgtactgggctgactgggatacacatgccaaaatcgagagagccacattgggaggaaacttccgcgtacccattgtgaacagcagtctggtcatgcccagtgggctgactctggactatgaagaggaccttctctactgggtggatgctagtctgcagaggattgaacgcagcactctgacgggcgtggatcgtgaagtcattgtcaatgcagccgttcatgcttttggcttgactctctatggccagtatatttactggactgacttgtacacacaaagaatttaccgagctaacaaatatgacgggtcaggtcagattgcaatgaccacaaatttgctctcccagcccaggggaatcaacactgttgtgaagaaccagaaacaacagtgtaacaatccttgtgaacagtttaatgggggctgcagccatatctgtgcaccaggtccaaatggtgccgagtgccagtgtccacatgagggcaactggtatttggccaacaacaggaagcactgcattgtggacaatggtgaacgatgtggtgcatcttccttcacctgctcca

SEQ ID NO: 8687 - protein, 4000 aa, Homo sapiens
MDRGPAAVACTLLLALVACLAPASGQECDSAHFRCGSGHCIPADWRCDGTKDCSDDADEIGCAVVTCQQGYFKCQSEGQCIPNSWVCDQDQDCDDGSDERQDCSQSTCSSHQITCSNGQCIPSEYRCDHVRDCPDGADENDCQYPTCEQLTCDNGACYNTSQKCDWKVDCRDSSDEINCTEICLHNEFSCGNGECIPRAYVCDHDNDCQDGSDEHACNYPTCGGYQFTCPSGRCIYQNWVCDGEDDCKDNGDEDGCESGPHDVHKCSPREWSCPESGRCISIYKVCDGILDCPGREDENNTSTGKYCSMTLCSALNCQYQCHETPYGGACFCPPGYIINHNDSRTCVEFDDCQIWGICDQKCESRPGRHLCHCEEGYILERGQYCKANDSFGEASIIFSNGRDLLIGDIHGRSFRILVESQNRGVAVGVAFHYHLQRVFWTDTVQNKVFSVDINGLNIQEVLNVSVETPENLAVDWVNNKIYLVETKVNRIDMVNLDGSYRVTLITENLGHPRGIAVDPTVGYLFFSDWESLSGEPKLERAFMDGSNRKDLVKTKLGWPAGVTLDMISKRVYWVDSRFDYIETVTYDGIQRKTVVHGGSLIPHPFGVSLFEGQVFFTDWTKMAVLKANKFTETNPQVYYQASLRPYGVTVYHSLRQPYATNPCKDNNGGCEQVCVLSHRTDNDGLGFRCKCTFGFQLDTDERHCIAVQNFLIFSSQVAIRGIPFTLSTQEDVMVPVSGNPSFFVGIDFDAQDSTIFFSDMSKHMIFKQKIDGTGREILAANRVENVESLAFDWISKNLYWTDSHYKSISVMRLADKTRRTVVQYLNNPRSVVVHPFAGYLFFTDWFRPAKIMRAWSDGSHLLPVINTTLGWPNGLAIDWAASRLYWVDAYFDKIEHSTFDGLDRRRLGHIEQMTHPFGLAIFGEHLFFTDWRLGAIIRVRKADGGEMTVIRSGIAYILHLKSYDVNIQTGSNACNQPTHPNGDCSHFCFPVPNFQRVCGCPYGMRLASNHLTCEGDPTNEPPTEQCGLFSFPCKNGRCVPNYYLCDGVDDCHDNSDEQLCGTLNNTCSSSAFTCGHGECIPAHWRCDKRNDCVDGSDEHNCPTHAPASCLDTQYTCDNHQCISKNWVCDTDNDCGDGSDEKNCNSTETCQPSQFNCPNHRCIDLSFVCDGDKDCVDGSDEVGCVLNCTASQFKCASGDKCIGVTNRCDGVFDCSDNSDEAGCPTRPPGMCHSDEFQCQEDGICIPNFWECDGHPDCLYGSDEHNACVPKTCPSSYFHCDNGNCIHRAWLCDRDNDCGDMSDEKDCPTQPFRCPSWQWQCLGHNICVNLSVVCDGIFDCPNGTDESPLCNGNSCSDFNGGCTHECVQEPFGAKCLCPLGFLLANDSKTCEDIDECDILGSCSQHCYNMRGSFRCSCDTGYMLESDGRTCKVTASESLLLLVASQNKIIADSVTSQVHNIYSLVENGSYIVAVDFDSISGRIFWSDATQGKTWSAFQNGTDRRVVFDSSIILTETIAIDWVGRNLYWTDYALETIEVSKIDGSHRTVLISKNLTNPRGLALDPRMNEHLLFWSDWGHHPRIERASMDGSMRTVIVQDKIFWPCGLTIDYPNRLLYFMDSYLDYMDFCDYNGHHRRQVIASDLIIRHPYALTLFEDSVYWTDRATRRVMRANKWHGGNQSVVMYNIQWPLGIVAVHPSKQPNSVNPCAFSRCSHLCLLSSQGPHFYSCVCPSGWSLSPDLLNCLRDDQPFLITVRQHIIFGISLNPEVKSNDAMVPIAGIQNGLDVEFDDAEQYIYWVENPGEIHRVKTDGTNRTVFASISMVGPSMNLALDWISRNLYSTNPRTQSIEVLTLHGDIRYRKTLIANDGTALGVGFPIGITVDPARGKLYWSDQGTDSGVPAKIASANMDGTSVKTLFTGNLEHLECVTLDIEEQKLYWAVTGRGVIERGNVDGTDRMILVHQLSHPWGIAVHDSFLYYTDEQYEVIERVDKATGANKIVLRDNVPNLRGLQVYHRRNAAESSNGCSNNMNACQQICLPVPGGLFSCACATGFKLNPDNRSCSPYNSFIVVSMLSAIRGFSLELSDHSETMVPVAGQGRNALHVDVDVSSGFIYWCDFSSSVASDNAIRRIKPDGSSLMNIVTHGIGENGVRGIAVDWVAGNLYFTNAFVSETLIEVLRINTTYRRVLLKVTVDMPRHIVVDPKNRYLFWADYGQRPKIERSFLDCTNRTVLVSEGIVTPRGLAVDRSDGYVYWVDDSLDIIARIRINGENSEVIRYGSRYPTPYGITVFENSIIWVDRNLKKIFQASKEPENTEPPTVIRDNINWLRDVTIFDKQVQPRSPAEVNNNPCLENNGGCSHLCFALPGLHTPKCDCAFGTLQSDGKNCAISTENFLIFALSNSLRSLHLDPENHSPPFQTINVERTVMSLDYDSVSDRIYFTQNLASGVGQISYATLSSGIHTPTVIASGIGTADGIAFDWITRRIYYSDYLNQMINSMAEDGSNRTVIARVPKPRAIVLDPCQGYLYWADWDTHAKIERATLGGNFRVPIVNSSLVMPSGLTLDYEEDLLYWVDASLQRIERSTLTGVDREVIVNAAVHAFGLTLYGQYIYWTDLYTQRIYRANKYDGSGQIAMTTNLLSQPRGINTVVKNQKQQCNNPCEQFNGGCSHICAPGPNGAECQCPHEGNWYLANNRKHCIVDNGERCGASSFTCSNGRCISEEWKCDNDNDCGDGSDEMESVCALHTCSPTAFTCANGRCVQYSYRCDYYNDCGDGSDEAGCLFRDCNATTEFMCNNRRCIPREFICNGVDNCHDNNTSDEKNCPDRTCQSGYTKCHNSNICIPRVYLCDGDNDCGDNSDENPTYCTTHTCSSSEFQCASGRCIPQHWYCDQETDCFDASDEPASCGHSERTCLADEFKCDGGRCIPSEWICDGDNDCGDMSDEDKRHQCQNQNCSDSEFLCVNDRPPDRRCIPQSWVCDGDVDCTDGYDENQNCTRRTCSENEFTCGYGLCIPKIFRCDRHNDCGDYSDERGCLYQTCQQNQFTCQNGRCISKTFVCDEDNDCGDGSDELMHLCHTPEPTCPPHEFKCDNGRCIEMMKLCNHLDDCLDNSDEKGCGINECHDPSISGCDHNCTDTLTSFYCSCRPGYKLMSDKRTCVDIDECTEMPFVCSQKCENVIGSYICKCAPGYLREPDGKTCRQNSNIEPYLIFSNRYYLRNLTIDGYFYSLILEGLDNVVALDFDRVEKRLYWIDTQRQVIERMFLNKTNKETIINHRLPAAESLAVDWVSRKLYWLDARLDGLFVSDLNGGHRRMLAQHCVDANNTFCFDNPRGLALHPQYGYLYWADWGHRAYIGRVGMDGTNKSVIISTKLEWPNGITIDYTNDLLYWADAHLGYIEYSDLEGHHRHTVYDGALPHPFAITIFEDTIYWTDWNTRTVEKGNKYDGSNRQTLVNTTHRPFDIHVYHPYRQPIVSNPCGTNNGGCSHLCLIKPGGKGFTCECPDDFRTLQLSGSTYCMPMCSSTQFLCANNEKCIPIWWKCDGQKDCSDGSDELALCPQRFCRLGQFQCSDGNCTSPQTLCNAHQNCPDGSDEDRLLCENHHCDSNEWQCANKRCIPESWQCDTFNDCEDNSDEDSSHCASRTCRPGQFRCANGRCIPQAWKCDVDNDCGDHSDEPIEECMSSAHLCDNFTEFSCKTNYRCIPKWAVCNGVDDCRDNSDEQGCEERTCHPVGDFRCKNHHCIPLRWQCDGQNDCGDNSDEENCAPRECTESEFRCVNQQCIPSRWICDHYNDCGDNSDERDCEMRTCHPEYFQCTSGHCVHSELKCDGSADCLDASDEADCPTRFPDGAYCQATMFECKNHVCIPPYWKCDGDDDCGDGSDEELHLCLDVPCNSPNRFRCDNNRCIYSHEVCNGVDDCGDGTDETEEHCRKPTPKPCTEYEYKCGNGHCIPHDNVCDDADDCGDWSDELGCNKGKERTCAENICEQNCTQLNEGGFICSCTAGFETNVF

SEQ ID NO: 8688 - DNA, 8192 bp, Homo sapiens
gcagacctaaaggagcgttcgctagcagaggcgctgccggtgcggtgtgctacgcgcgcccacctcccggggaaggaacggcgaggccggggaccgtcgcggagatggatcgcgggccggcagcagtggcgtgcacgctgctcctggctctcgtcgcctgcctagcgccggccagtggccaagaatgtgacagtgcgcattttcgctgtggaagtgggcattgcatccctgcagactggaggtgtgatgggaccaaagactgttcagatgacgcggatgaaattggctgcgctgttgtgacctgccagcagggctatttcaagtgccagagtgagggacaatgcatccccaactcctgggtgtgtgaccaagatcaagactgtgatgatggctcagatgaacgtcaagattgctcacaaagtacatgctcaagtcatcagataacatgctccaatggtcagtgtatcccaagtgaatacaggtgcgaccacgtcagagactgccccgatggagctgatgagaatgactgccagtacccaacatgtgagcagcttacttgtgacaatggggcctgctataacaccagtcagaagtgtgattggaaagttgattgcagggactcctcagatgaaatcaactgcactgagatatgcttgcacaatgagttttcatgtggcaatggagagtgtatccctcgtgcttatgtctgtgaccatgacaatgattgccaagacggcagtgacgaacatgcttgcaactatccgacctgcggtggttaccagttcacttgccccagtggccgatgcatttatcaaaactgggtttgtgatggagaagatgactgtaaagataatggagatgaagatggatgtgaaagcggtcctcatgatgttcataaatgttccccaagagaatggtcttgcccagagtcgggacgatgcatctccatttataaagtttgtgatgggattttagattgcccaggaagagaagatgaaaacaacactagtaccggaaaatactgtagtatgactctgtgctctgccttgaactgccagtaccagtgccatgagacgccgtatggaggagcgtgtttttgtcccccaggttatatcatcaaccacaatgacagccgtacctgtgttgagtttgatgattgccagatatggggaatttgtgaccagaagtgtgaaagccgacctggccgtcacctgtgccactgtgaagaagggtatatcttggagcgtggacagtattgcaaagctaatgattcctttggcgaggcctccattatcttctccaatggtcgggatttgttaattggtgatattcatggaaggagcttccggatcctagtggagtctcagaatcgtggagtggccgtgggtgtggctttccactatcacctgcaaagagttttttggacagacaccgtgcaaaataaggttttttcagttgacattaatggtttaaatatccaagaggttctcaatgtttctgttgaaaccccagagaacctggctgtggactgggttaataataaaatctatctagtggaaaccaaggtcaaccgcatagatatggtaaatttggatggaagctatcgggttacccttataactgaaaacttggggcatcctagaggaattgccgtggacccaactgttggttatttatttttctcagattgggagagcctttctggggaacctaagctggaaagggcattcatggatggcagcaaccgtaaagacttggtgaaaacaaagctgggatggcctgctggggtaactctggatatgatatcgaagcgtgtttactgggttgactctcggtttgattacattgaaactgtaacttatgatggaattcaaaggaagactgtagttcatggaggctccctcattcctcatccctttggagtaagcttatttgaaggtcaggtgttctttacagattggacaaagatggccgtgctgaaggcaaacaagttcacagagaccaacccacaagtgtactaccaggcttccctgaggccctatggagtgactgtttaccattccctcagacagccctatgctaccaatccgtgtaaagataacaatgggggctgtgagcaggtctgtgtcctcagccacagaacagataatgatggtttgggtttccgttgcaagtgcacattcggcttccaactggatacagatgagcgccactgcattgctgttcagaatttcctcattttttcatcccaagttgctattcgtgggatcccgttcaccttgtctacccaggaagatgtcatggttccagtttcggggaatccttctttctttgtcgggattgattttgacgcccaggacagcactatctttttttcagatatgtcaaaacacatgatttttaagcaaaagattgatggcacaggaagagaaattctcgcagctaacagggtggaaaatgttgaaagtttggcttttgattggatttcaaagaatctctattggacagactctcattacaagagtatcagtgtcatgaggctagctgataaaacgagacgcacagtagttcagtatttaaataacccacggtcggtggtagttcatccttttgccgggtatctattcttcactgattggttccgtcctgctaaaattatgagagcatggagtgacggatctcacctcttgcctgtaataaacactactcttggatggcccaatggcttggccatcgattgggctgcttcacgattgtactgggtagatgcctattttgataaaattgagcacagcacctttgatggtttagacagaagaagactgggccatatagagcagatgacacatccgtttggacttgccatctttggagagcatttattttttactgactggagactgggtgccattattcgagtcaggaaagcagatggtggagaaatgacagttatccgaagtggcattgcttacatactgcatttgaaatcgtatgatgtcaacatccagactggttctaacgcctgtaatcaacccacgcatcctaacggtgactgcagccacttctgcttcccggtgccaaatttccagcgagtgtgtgggtgcccttatggaatgaggctggcttccaatcacttgacatgcgagggggacccaaccaatgaaccacccacagagcagtgtggcttattttccttcccctgtaaaaatggcagatgtgtgcccaattactatctctgtgatggagtcgatgattgtcatgataacagtgatgagcaactatgtggcacacttaataatacctgttcatcttcggcgttcacctgtggccatggggagtgcattcctgcacactggcgctgtgacaaacgcaacgactgtgtggatggcagtgatgagcacaactgccccacccacgcacctgcttcctgccttgacacccaatacacctgtgataatcaccagtgtatctcaaagaactgggtctgtgacacagacaatgattgtggggatggatctgatgaaaagaactgcaattcgacagagacatgccaacctagtcagtttaattgccccaatcatcgatgtattgacctatcgtttgtctgtgatggtgacaaggattgtgttgatggatctgatgaggttggttgtgtattaaactgtactgcttctcaattcaagtgtgccagtggggataaatgtattggcgtcacaaatcgttgtgatggtgtttttgattgcagtgacaactcggatgaagcaggctgtccaaccaggcctcctggtatgtgccactcagatgaatttcagtgccaagaagatggtatctgcatcccgaacttctgggaatgtgatgggcatccagactgcctctatggatctgatgagcacaatgcctgtgtccccaagacttgcccttcatcatatttccactgtgacaacggaaactgcatccacagggcatggctctgtgatcgggacaatgactgcggggatatgagtgatgagaaggactgccctactcagccctttcgctgtcctagttggcaatggcagtgtcttggccataacatctgtgtgaatctgagtgtagtgtgtgatggcatctttgactgccccaatgggacagatgagtccccactttgcaatgggaacagctgctcagatttcaatggtggttgtactcacgagtgtgttcaagagccctttggggctaaatgcctatgtccattgggattcttacttgccaatgattctaagacctgtgaagacatagatgaatgtgatattctaggctcttgtagccagcactgttacaatatgagaggttctttccggtgctcgtgtgatacaggctacatgttagaaagtgatgggaggacttgcaaagttacagcatctgagagtctgctgttacttgtggcaagtcagaacaaaattattgccgacagtgtcacctcccaggtccacaatatctattcattggtcgagaatggttcttacattgtagctgttgattttgattcaattagtggtcgtatcttttggtctgatgcaactcagggtaaaacctggagtgcgtttcaaaatggaacggacagaagagtggtatttgacagtagcatcatcttgactgaaactattgcaatagattgggtaggtcgtaatctttactggacagactatgctctggaaacaattgaagtctccaaaattgatgggagccacaggactgtgctgattagtaaaaacctaacaaatccaagaggactagcattagatcccagaatgaatgagcatctactgttctggtctgactggggccaccaccctcgcatcgagcgagccagcatggacggcagcatgcgcactgtcattgtccaggacaagatcttctggccctgcggcttaactattgactaccccaacagactgctctacttcatggactcctatcttgattacatggacttttgtgattataatggacaccatcggagacaggtgatagccagtgatttgattatacggcacccctatgccctaactctctttgaagactctgtgtactggactgaccgtgctactcgtcgggttatgcgagccaacaagtggcatggagggaaccagtcagttgtaatgtataatattcaatggccccttgggattgttgcggttcatccttcgaaacaaccaaattccgtgaatccatgtgccttttcccgctgcagccatctctgcctgctttcctcacaggggcctcatttttactcctgtgtttgtccttcaggatggagtctgtctcctgatctcctgaattgcttgagagatgatcaacctttcttaataactgtaaggcaacatataatttttggaatctcccttaatcctgaggtgaagagcaatgatgctatggtccccatagcagggatacagaatggtttagatgttgaatttgatgatgctgagcaatacatctattgggttgaaaatccaggtgaaattcacagagtgaagacagatggcaccaacaggacagtatttgcttctatatctatggtggggccttctatgaacctggccttagattggatttcaagaaacctttattctaccaatcctagaactcagtcaatcgaggttttgacactccacggagatatcagatacagaaaaacattgattgccaatgatgggacagctcttggagttggctttccaattggcataactgttgatcctgctcgtgggaagctgtactggtcagaccaaggaactgacagtggggttcctgccaagatcgccagtgctaacatggatggcacatctgtgaaaactctctttactgggaacctcgaacacctggagtgtgtcactcttgacatcgaagagcagaaactctactgggcagtcactggaagaggagtgattgaaagaggaaacgtggatggaacagatcgaatgatcctggtacaccagctttcccacccctggggaattgcagtccatgattctttcctttattatactgatgaacagtatgaggtcattgaaagagttgataaggccactggggccaacaaaatagtcttgagagataatgttccaaatctgaggggtcttcaagtttatcacagacgcaatgccgccgaatcctcaaatggctgtagcaacaacatgaatgcctgtcagcagatttgcctgcctgtaccaggaggattgttttcctgcgcctgtgccactggatttaaactcaatcctgataatcggtcctgctctccatataactctttcattgttgtttcaatgctgtctgcaatcagaggctttagcttggaattgtcagatcattcagaaaccatggtgccggtggcaggccaaggacgaaacgcactgcatgtggatgtggatgtgtcctctggctttatttattggtgtgattttagcagctcagtggcatctgataatgcgatccgtagaattaaaccagatggatcttctctgatgaacattgtgacacatggaataggagaaaatggagtccggggtattgcagtggattgggtagcaggaaatctttatttcaccaatgcctttgtttctgaaacactgatagaagttctgcggatcaatactacttaccgccgtgttcttcttaaagtcacagtggacatgcctaggcatattgttgtagatcccaagaacagatacctcttctgggctgactatgggcagagaccaaagattgagcgttctttccttgactgtaccaatcgaacagtgcttgtgtcagagggcattgtcacaccacggggcttggcagtggaccgaagtgatggctacgtttattgggttgatgattctttagatataattgcaaggattcgtatcaatggagagaactctgaagtgattcgttatggcagtcgttacccaactccttatggcatcactgtttttgaaaattctatcatatgggtagataggaatttgaaaaagatcttccaagccagcaaggaaccagagaacacagagccacccacagtgataagagacaatatcaactggctaagagatgtgaccatctttgacaagcaagtccagccccggtcaccagcagaggtcaacaacaacccttgcttggaaaacaatggtgggtgctctcatctctgctttgctctgcctggattgcacaccccaaaatgtgactgtgcctttgggaccctgcaaagtgatggcaagaattgtgccatttcaacagaaaatttcctcatctttgccttgtctaattccttgagaagcttacacttggaccctgaaaaccatagcccacctttccaaacaataaatgtggaaagaactgtcatgtctctagactatgacagtgtaagtgatagaatctacttcacacaaaatttagcctctggagttggacagatttcctatgccaccctgtcttcagggatccatactccaactgtcattgcttcaggtatagggactgctgatggcattgcctttgactggattactagaagaatttattacagtgactacctcaaccagatgattaattccatggctgaagatgggtctaaccgcactgtgatagcccgcgttccaaaaccaagagcaattgtgttagatccctgccaagggtacctgtactgggctgactgggatacacatgccaaaatcgagagagccacattgggaggaaacttccgcgtacccattgtgaacagcagtctggtcatgcccagtgggctgactctggactatgaagaggaccttctctactgggtggatgctagtctgcagaggattgaacgcagcactctgacgggcgtggatcgtgaagtcattgtcaatgcagccgttcatgcttttggcttgactctctatggccagtatatttactggactgacttgtacacacaaagaatttaccgagctaacaaatatgacgggtcaggtcagattgcaatgaccacaaatttgctctcccagcccaggggaatcaacactgttgtgaagaaccagaaacaacagtgtaacaatccttgtgaacagtttaatgggggctgcagccatatctgtgcaccaggtccaaatggtgccgagtgccagtgtccacatgagggcaactggtatttggccaacaacaggaagcactgcattgtggacaat

SEQ ID NO: 8689 - protein, 4000 aa, Homo sapiens; identical to SEQ ID NO: 8687

SEQ ID NO: 8690 - DNA, 4150 bp, Homo sapiens
ctagatcgaaagtcctttggtaatgatgtgtcatacattctagtcatcaaagacaccattttctgggcctgaagtgttctgctggtttttggaggaatgagaatccaatctctcataagccggattcagaaaataggtcatcgatgaaacatctgtatggattatttcactataatcctatgatgcttggacttgaatcacttccagatcccacagacacctgggaaattatagagaccattggtaaaggcacctatggcaaagtctacaaggtaactaacaagagagatgggagcctggctgcagtgaaaattctggatccagtcagtgatatggatgaagaaattgaggcagaatacaacattttgcagttccttcctaatcatcccaatgttgtaaagttttatgggatgttttacaaagcggatcactgtgtagggggacagctgtggctggtcctggagctgtgtaatgggggctcagtcactgagcttgtcaaaggtctactcagatgtggccagcggttggatgaagcaatgatctcatacatcttgtacggggccctcttgggccttcagcatttgcacaacaaccgaatcatccaccgtgatgtgaaggggaataacattcttctgacaacagaaggaggagttaagctcgttgactttggtgtttcagctcaactcaccagtacacgtctgcggagaaacacatctgttggcaccccgttctggatggcccctgaggtcattgcctgtgagcagcagtatgactcttcctatgacgctcgctgtgacgtctggtccttggggatcacagctattgaactgggggatggagaccctcccctctttgacatgcatcctgtgaaaacactctttaagattccaagaaatcctccacctactttacttcatccagaaaaatggtgtgaagaattcaaccactttatttcacagtgtcttattaaggattttgaaaggcgaccttccgtcacacatctccttgaccacccatttattaaaggagtacatggaaaagttctgtttctgcaaaaacagctggccaaggttctccaagaccagaagcatcaaaatcctgttgctaaaaccaggcatgagaggatgcataccagaagaccttatcatgtggaagatgctgaaaaatactgccttgaggatgatttggtcaacctagaggttctggatgaggatacaattatccatcagttgcagaaacgttatgcagacttgctaatttacacatatgttggagacatcttaattgccttaaaccccttccagaatctaagcatatactctccacagttttccagactttatcatggggtgaaacgcgcctccaatcccccccacatatttgcatcagcagatgctgcttaccagtgcatggttactctcagcaaagaccagtgcattgtcatcagcggagagagtggctctgggaagacagaaagcgcccacctgattgttcagcatttgactttcttgggaaaggccaataatcagaccttgagagagaaaattctacaagtcaactccctggtggaagcctttgggaactcatgcactgccatcaatgacaactcgagccgttttggaaaatatctggaaatgatgtttacaccaactggagttgtgatgggggcaagaatctctgaatatctcctggaaaaatccagagttataaaacaggcagcgagagagaaaaattttcatatattttactatatttatgctggtcttcatcaccaaaagaagctttctgatttcagacttcctgaggaaaaacctcctaggtacatagctgatgaaactggaagggtgatgcacgacataacttccaaggagtcttacagaagacaattcgaagcaattcagcattgcttcaggattatagggttcacggacaaagaggtgcactcagtgtacagaattttggctgggattttgaatattgggaacattgagttcgcagctatttcctctcaacatcagactgataaaagtgaggtgcccaatgctgaagctttgcaaaatgctgcctctgttctgtgcattagccctgaagagctccaggaggccctcacctcccactgtgtggtcacccggggcgagaccatcatccgtgccaacactgtagacagggctgcggacgttcgagacgccatgtccaaagccctgtatgggaggctcttcagctggattgtgaatcgcattaatacactcctgcagccagacgaaaacatatgtagtgcaggaggtggaatgaatgtggggatcttggatatctttggattcgagaattttcagagaaattcatttgagcagctctgcataaacatcgccaatgagcaaatccagtactatttcaatcagcatgtttttgctcttgagcagatggaatatcagaatgaaggcattgatgctgtacccgtggaatatgaggacaaccgcccgctcttggacatgttcctccagaaacccctgggactgcttgcacttttggatgaggaaagtcggtttccccaagcaactgaccagaccctggttgataaatttgaagataatctacgatgcaaatacttctggaggcccaaaggagtggaactgtgctttggcattcagcattatgctggaaaggtattatatgatgcttctggggttcttgagaaaaatagagacactctccctgccgatgtggttgtggtcctgagaacgtcagaaaacaagcttcttcagcagctcttctcaatccctctgaccaaaacaggtaatttggcccagacaagagctaggataacagtggcctcaagttctttgcctccacatttcagtgctgggaaagccaaggtggacactctggaggtgatacggcatccggaagaaaccaccaacatgaagaggcaaactgtggcttcttacttccggtattctctgatggacctgctctccaaaatggtggttggacagccccactttgtgcgctgcattaaacccaatgatgaccgagaggccctgcagttctctcgagagagggtgctggcccagctccgctccacagggattctggagacagtcagcatccgccgccagggctattcccaccgcatcctttttgaagaatttgtgaaaaggtattattacttggcattcacagcacatcaaacacctcttgctagcaaagagagctgtgtggctatcttggaaaagtccagattagatcactgggtactgggaaaaacaaaggtttttctcaaatattaccatgttgagcaattaaatttgctgcttcgagaagtcataggcagagtggttgtgctgcaggcatataccaaggggtggcttggagccaggagatacaaaagggtcagagagaagagagagaagggagccattgccatccagtcagcctggagaggatatgatgctcggaggaaatttaagaaaataagcaacagaaggaatgagtctgctgctcataatcaagcaggggacacttcaaaccaaagcagtgggccacattcccccgtcgcagcaggtacgaggggaagtgccgaggttcaagactgcagcgagcctggtgaccataaagttctcaggggctctgtacatcgtaggagccattcacaagcagaatccaacaatggccgtacacagacttcaagcaactctcctgctgtcacagagaaaaatgggtgagcattatctgctaagagttccctgttgtaaactcaggtgctccattctaatggataatgaaatggtaatggataatgcaacaagtatttctaccactatggtattttggtgaactggagagagtggaaccaaaaagcgtttccagggctgggcgtggtggctcatgcctgtaatcccagcactttgtgggggccgaggtgggtggatcacctgaggtcaggagtttgagactagcctggcccacatggcaaaaccccgcctctactaaaaatacaaaaatgagctggccatggtggcatgtgcctgtaatcccagctactcaggaggctgaggcaggagaatcacttgaaccatggaggtggaggttgcagtgagccaagattgtgccactgcacttcagcctgggcaacacagcaagactctgtctc

SEQ ID NO: 8691 - protein, 1192 aa, Homo sapiens
MKHLYGLFHYNPMMLGLESLPDPTDTWEIIETIGKGTYGKVYKVTNKRDGSLAAVKILDPVSDMDEEIEAEYNILQFLPNHPNVVKFYGMFYKADHCVGGQLWLVLELCNGGSVTELVKGLLRCGQRLDEAMISYILYGALLGLQHLHNNRIIHRDVKGNNILLTTEGGVKLVDFGVSAQLTSTRLRRNTSVGTPFWMAPEVIACEQQYDSSYDARCDVWSLGITAIELGDGDPPLFDMHPVKTLFKIPRNPPPTLLHPEKWCEEFNHFISQCLIKDFERRPSVTHLLDHPFIKGVHGKVLFLQKQLAKVLQDQKHQNPVAKTRHERMHTRRPYHVEDAEKYCLEDDLVNLEVLDEDTIIHQLQKRYADLLIYTYVGDILIALNPFQNLSIYSPQFSRLYHGVKRASNPPHIFASADAAYQCMVTLSKDQCIVISGESGSGKTESAHLIVQHLTFLGKANNQTLREKILQVNSLVEAFGNSCTAINDNSSRFGKYLEMMFTPTGVVMGARISEYLLEKSRVIKQAAREKNFHIFYYIYAGLHHQKKLSDFRLPEEKPPRYIADETGRVMHDITSKESYRRQFEAIQHCFRIIGFTDKEVHSVYRILAGILNIGNIEFAAISSQHQTDKSEVPNAEALQNAASVLCISPEELQEALTSHCVVTRGETIIRANTVDRAADVRDAMSKALYGRLFSWIVNRINTLLQPDENICSAGGGMNVGILDIFGFENFQRNSFEQLCINIANEQIQYYFNQHVFALEQMEYQNEGIDAVPVEYEDNRPLLDMFLQKPLGLLALLDEESRFPQATDQTLVDKFEDNLRCKYFWRPKGVELCFGIQHYAGKVLYDASGVLEKNRDTLPADVVVVLRTSENKLLQQLFSIPLTKTGNLAQTRARITVASSSLPPHFSAGKAKVDTLEVIRHPEETTNMKRQTVASYFRYSLMDLLSKMVVGQPHFVRCIKPNDDREALQFSRERVLAQLRSTGILETVSIRRQGYSHRILFEEFVKRYYYLAFTAHQTPLASKESCVAILEKSRLDHWVLGKTKVFLKYYHVEQLNLLLREVIGRVVVLQAYTKGWLGARRYKRVREKREKGAIAIQSAWRGYDARRKFKKISNRRNESAAHNQAGDTSNQSSGPHSPVAAGTRGSAEVQDCSEPGDHKVLRGSVHRRSHSQAESNNGRTQTSSNSPAVTEKNG

SEQ ID NO: 8692 - DNA, 4000 bp, Homo sapiens
ctagatcgaaagtcctttggtaatgatgtgtcatacattctagtcatcaaagacaccattttctgggcctgaagtgttctgctggtttttggaggaatgagaatccaatctctcataagccggattcagaaaataggtcatcgatgaaacatctgtatggattatttcactataatcctatgatgcttggacttgaatcacttccagatcccacagacacctgggaaattatagagaccattggtaaaggcacctatggcaaagtctacaaggtaactaacaagagagatgggagcctggctgcagtgaaaattctggatccagtcagtgatatggatgaagaaattgaggcagaatacaacattttgcagttccttcctaatcatcccaatgttgtaaagttttatgggatgttttacaaagcggatcactgtgtagggggacagctgtggctggtcctggagctgtgtaatgggggctcagtcactgagcttgtcaaaggtctactcagatgtggccagcggttggatgaagcaatgatctcatacatcttgtacggggccctcttgggccttcagcatttgcacaacaaccgaatcatccaccgtgatgtgaaggggaataacattcttctgacaacagaaggaggagttaagctcgttgactttggtgtttcagctcaactcaccagtacacgtctgcggagaaacacatctgttggcaccccgttctggatggcccctgaggtcattgcctgtgagcagcagtatgactcttcctatgacgctcgctgtgacgtctggtccttggggatcacagctattgaactgggggatggagaccctcccctctttgacatgcatcctgtgaaaacactctttaagattccaagaaatcctccacctactttacttcatccagaaaaatggtgtgaagaattcaaccactttatttcacagtgtcttattaaggattttgaaaggcgaccttccgtcacacatctccttgaccacccatttattaaaggagtacatggaaaagttctgtttctgcaaaaacagctggccaaggttctccaagaccagaagcatcaaaatcctgttgctaaaaccaggcatgagaggatgcataccagaagaccttatcatgtggaagatgctgaaaaatactgccttgaggatgatttggtcaacctagaggttctggatgaggatacaattatccatcagttgcagaaacgttatgcagacttgctaatttacacatatgttggagacatcttaattgccttaaaccccttccagaatctaagcatatactctccacagttttccagactttatcatggggtgaaacgcgcctccaatcccccccacatatttgcatcagcagatgctgcttaccagtgcatggttactctcagcaaagaccagtgcattgtcatcagcggagagagtggctctgggaagacagaaagcgcccacctgattgttcagcatttgactttcttgggaaaggccaataatcagaccttgagagagaaaattctacaagtcaactccctggtggaagcctttgggaactcatgcactgccatcaatgacaactcgagccgttttggaaaatatctggaaatgatgtttacaccaactggagttgtgatgggggcaagaatctctgaatatctcctggaaaaatccagagttataaaacaggcagcgagagagaaaaattttcatatattttactatatttatgctggtcttcatcaccaaaagaagctttctgatttcagacttcctgaggaaaaacctcctaggtacatagctgatgaaactggaagggtgatgcacgacataacttccaaggagtcttacagaagacaattcgaagcaattcagcattgcttcaggattatagggttcacggacaaagaggtgcactcagtgtacagaattttggctgggattttgaatattgggaacattgagttcgcagctatttcctctcaacatcagactgataaaagtgaggtgcccaatgctgaagctttgcaaaatgctgcctctgttctgtgcattagccctgaagagctccaggaggccctcacctcccactgtgtggtcacccggggcgagaccatcatccgtgccaacactgtagacagggctgcggacgttcgagacgccatgtccaaagccctgtatgggaggctcttcagctggattgtgaatcgcattaatacactcctgcagccagacgaaaacatatgtagtgcaggaggtggaatgaatgtggggatcttggatatctttggattcgagaattttcagagaaattcatttgagcagctctgcataaacatcgccaatgagcaaatccagtactatttcaatcagcatgtttttgctcttgagcagatggaatatcagaatgaaggcattgatgctgtacccgtggaatatgaggacaaccgcccgctcttggacatgttcctccagaaacccctgggactgcttgcacttttggatgaggaaagtcggtttccccaagcaactgaccagaccctggttgataaatttgaagataatctacgatgcaaatacttctggaggcccaaaggagtggaactgtgctttggcattcagcattatgctggaaaggtattatatgatgcttctggggttcttgagaaaaatagagacactctccctgccgatgtggttgtggtcctgagaacgtcagaaaacaagcttcttcagcagctcttctcaatccctctgaccaaaacaggtaatttggcccagacaagagctaggataacagtggcctcaagttctttgcctccacatttcagtgctgggaaagccaaggtggacactctggaggtgatacggcatccggaagaaaccaccaacatgaagaggcaaactgtggcttcttacttccggtattctctgatggacctgctctccaaaatggtggttggacagccccactttgtgcgctgcattaaacccaatgatgaccgagaggccctgcagttctctcgagagagggtgctggcccagctccgctccacagggattctggagacagtcagcatccgccgccagggctattcccaccgcatcctttttgaagaatttgtgaaaaggtattattacttggcattcacagcacatcaaacacctcttgctagcaaagagagctgtgtggctatcttggaaaagtccagattagatcactgggtactgggaaaaacaaaggtttttctcaaatattaccatgttgagcaattaaatttgctgcttcgagaagtcataggcagagtggttgtgctgcaggcatataccaaggggtggcttggagccaggagatacaaaagggtcagagagaagagagagaagggagccattgccatccagtcagcctggagaggatatgatgctcggaggaaatttaagaaaataagcaacagaaggaatgagtctgctgctcataatcaagcaggggacacttcaaaccaaagcagtgggccacattcccccgtcgcagcaggtacgaggggaagtgccgaggttcaagactgcagcgagcctggtgaccataaagttctcaggggctctgtacatcgtaggagccattcacaagcagaatccaacaatggccgtacacagacttcaagcaactctcctgctgtcacagagaaaaatggatggagtttcactctgttgctcaggctggagtgcaatagcatgatctcagctgactgcaacctccgccctctgggttcaagtgattctcctgcctcagcctcccgagtagctgggattacaggcattcacaagcccagagttctccaaaagggtgcgatatcttcgcaggacatgcaaacaagcactcggtttctgggactgatttgctgtcttctcggatatgccatcctgctccagatcagcaaggattgagtctctggggagcccctcaaaagcctggt

SEQ ID NO: 8693 - protein, 1275 aa, Homo sapiens
MKHLYGLFHYNPMMLGLESLPDPTDTWEIIETIGKGTYGKVYKVTNKRDGSLAAVKILDPVSDMDEEIEAEYNILQFLPNHPNVVKFYGMFYKADHCVGGQLWLVLELCNGGSVTELVKGLLRCGQRLDEAMISYILYGALLGLQHLHNNRIIHRDVKGNNILLTTEGGVKLVDFGVSAQLTSTRLRRNTSVGTPFWMAPEVIACEQQYDSSYDARCDVWSLGITAIELGDGDPPLFDMHPVKTLFKIPRNPPPTLLHPEKWCEEFNHFISQCLIKDFERRPSVTHLLDHPFIKGVHGKVLFLQKQLAKVLQDQKHQNPVAKTRHERMHTRRPYHVEDAEKYCLEDDLVNLEVLDEDTIIHQLQKRYADLLIYTYVGDILIALNPFQNLSIYSPQFSRLYHGVKRASNPPHIFASADAAYQCMVTLSKDQCIVISGESGSGKTESAHLIVQHLTFLGKANNQTLREKILQVNSLVEAFGNSCTAINDNSSRFGKYLEMMFTPTGVVMGARISEYLLEKSRVIKQAAREKNFHIFYYIYAGLHHQKKLSDFRLPEEKPPRYIADETGRVMHDITSKESYRRQFEAIQHCFRIIGFTDKEVHSVYRILAGILNIGNIEFAAISSQHQTDKSEVPNAEALQNAASVLCISPEELQEALTSHCVVTRGETIIRANTVDRAADVRDAMSKALYGRLFSWIVNRINTLLQPDENICSAGGGMNVGILDIFGFENFQRNSFEQLCINIANEQIQYYFNQHVFALEQMEYQNEGIDAVPVEYEDNRPLLDMFLQKPLGLLALLDEESRFPQATDQTLVDKFEDNLRCKYFWRPKGVELCFGIQHYAGKVLYDASGVLEKNRDTLPADVVVVLRTSENKLLQQLFSIPLTKTGNLAQTRARITVASSSLPPHFSAGKAKVDTLEVIRHPEETTNMKRQTVASYFRYSLMDLLSKMVVGQPHFVRCIKPNDDREALQFSRERVLAQLRSTGILETVSIRRQGYSHRILFEEFVKRYYYLAFTAHQTPLASKESCVAILEKSRLDHWVLGKTKVFLKYYHVEQLNLLLREVIGRVVVLQAYTKGWLGARRYKRVREKREKGAIAIQSAWRGYDARRKFKKISNRRNESAAHNQAGDTSNQSSGPHSPVAAGTRGSAEVQDCSEPGDHKVLRGSVHRRSHSQAESNNGRTQTSSNSPAVTEKNGWSFTLLLRLECNSMISADCNLRPLGSSDSPASASRVAGITGIHKPRVLQKGAISSQDMQTSTRFLGLICCLLGYAILLQISKD

SEQ ID NO: 8694 - DNA, 5440 bp, Homo sapiens
ctagatcgaaagtcctttggtaatgatgtgtcatacattctagtcatcaaagacaccattttctgggcctgaagtgttctgctggtttttggaggaatgagaatccaatctctcataagccggattcagaaaataggtcatcgatgaaacatctgtatggattatttcactataatcctatgatgcttggacttgaatcacttccagatcccacagacacctgggaaattatagagaccattggtaaaggcacctatggcaaagtctacaaggtaactaacaagagagatgggagcctggctgcagtgaaaattctggatccagtcagtgatatggatgaagaaattgaggcagaatacaacattttgcagttccttcctaatcatcccaatgttgtaaagttttatgggatgttttacaaagcggatcactgtgtagggggacagctgtggctggtcctggagctgtgtaatgggggctcagtcactgagcttgtcaaaggtctactcagatgtggccagcggttggatgaagcaatgatctcatacatcttgtacggggccctcttgggccttcagcatttgcacaacaaccgaatcatccaccgtgatgtgaaggggaataacattcttctgacaacagaaggaggagttaagctcgttgactttggtgtttcagctcaactcaccagtacacgtctgcggagaaacacatctgttggcaccccgttctggatggcccctgaggtcattgcctgtgagcagcagtatgactcttcctatgacgctcgctgtgacgtctggtccttggggatcacagctattgaactgggggatggagaccctcccctctttgacatgcatcctgtgaaaacactctttaagattccaagaaatcctccacctactttacttcatccagaaaaatggtgtgaagaattcaaccactttatttcacagtgtcttattaaggattttgaaaggcgaccttccgtcacacatctccttgaccacccatttattaaaggagtacatggaaaagttctgtttctgcaaaaacagctggccaaggttctccaagaccagaagcatcaaaatcctgttgctaaaaccaggcatgagaggatgcataccagaagaccttatcatgtggaagatgctgaaaaatactgccttgaggatgatttggtcaacctagaggttctggatgaggatacaattatccatcagttgcagaaacgttatgcagacttgctaatttacacatatgttggagacatcttaattgccttaaaccccttccagaatctaagcatatactctccacagttttccagactttatcatggggtgaaacgcgcctccaatcccccccacatatttgcatcagcagatgctgcttaccagtgcatggttactctcagcaaagaccagtgcattgtcatcagcggagagagtggctctgggaagacagaaagcgcccacctgattgttcagcatttgactttcttgggaaaggccaataatcagaccttgagagagaaaattctacaagtcaactccctggtggaagcctttgggaactcatgcactgccatcaatgacaactcgagccgttttggaaaatatctggaaatgatgtttacaccaactggagttgtgatgggggcaagaatctctgaatatctcctggaaaaatccagagttataaaacaggcagcgagagagaaaaattttcatatattttactatatttatgctggtcttcatcaccaaaagaagctttctgatttcagacttcctgaggaaaaacctcctaggtacatagctgatgaaactggaagggtgatgcacgacataacttccaaggagtcttacagaagacaattcgaagcaattcagcattgcttcaggattatagggttcacggacaaagaggtgcactcagtgtacagaattttggctgggattttgaatattgggaacattgagttcgcagctatttcctctcaacatcagactgataaaagtgaggtgcccaatgctgaagctttgcaaaatgctgcctctgttctgtgcattagccctgaagagctccaggaggccctcacctcccactgtgtggtcacccggggcgagaccatcatccgtgccaacactgtagacagggctgcggacgttcgagacgccatgtccaaagccctgtatgggaggctcttcagctggattgtgaatcgcattaatacactcctgcagccagacgaaaacatatgtagtgcaggaggtggaatgaatgtggggatcttggatatctttggattcgagaattttcagagaaattcatttgagcagctctgcataaacatcgccaatgagcaaatccagtactatttcaatcagcatgtttttgctcttgagcagatggaatatcagaatgaaggcattgatgctgtacccgtggaatatgaggacaaccgcccgctcttggacatgttcctccagaaacccctgggactgcttgcacttttggatgaggaaagtcggtttccccaagcaactgaccagaccctggttgataaatttgaagataatctacgatgcaaatacttctggaggcccaaaggagtggaactgtgctttggcattcagcattatgctggaaaggtattatatgatgcttctggggttcttgagaaaaatagagacactctccctgccgatgtggttgtggtcctgagaacgtcagaaaacaagcttcttcagcagctcttctcaatccctctgaccaaaacaggtaatttggcccagacaagagctaggataacagtggcctcaagttctttgcctccacatttcagtgctgggaaagccaaggtggacactctggaggtgatacggcatccggaagaaaccaccaacatgaagaggcaaactgtggcttcttacttccggtattctctgatggacctgctctccaaaatggtggttggacagccccactttgtgcgctgcattaaacccaatgatgaccgagaggccctgcagttctctcgagagagggtgctggcccagctccgctccacagggattctggagacagtcagcatccgccgccagggctattcccaccgcatcctttttgaagaatttgtgaaaaggtattattacttggcattcacagcacatcaaacacctcttgctagcaaagagagctgtgtggctatcttggaaaagtccagattagatcactgggtactgggaaaaacaaaggtttttctcaaatattaccatgttgagcaattaaatttgctgcttcgagaagtcataggcagagtggttgtgctgcaggcatataccaaggggtggcttggagccaggagatacaaaagggtcagagagaagagagagaagggagccattgccatccagtcaggggacacttcaaaccaaagcagtgggccacattcccccgtcgcagcaggtacgaggggaagtgccgaggttcaagactgcagcgagcctggtgaccataaagttctcaggggctctgtacatcgtaggagccattcacaagcagaatccaacaatggccgtacacagacttcaagcaactctcctgctgtcacagagaaaaatgggcattcacaagcccagagttctccaaaagggtgcgatatcttcgcaggacatgcaaacaagcactcggtttctgggactgatttgctgtcttctcggatatgccatcctgctccagatcagcaaggattgagtctctggggagcccctcaaaagcctggttcagaaaatggtcttgcacagaagcatcgaacacctcgccgacgatgtcagcagcccaaaatgctgagtagccctgaggacaccatgtactataaccagttaaatggaactctagaatatcaagggagcaagaggaagccaagaaaacttggccaaatcaaagtacttgatggggaagatgaatattacaaatctctgtcaccagtggactgtatccctgaggagaacaactcagcccacccttcctttttttcttcatcctcaaaaggagactcttttgctcaacattaaattgtgcttcctaaccctaaatctgtccagagtaggaacattcatggtaatcgactgtctgtcattgcgtaagaaagcactgatatggggtcagcttctttggacatatggtccatgcctgaaccttactgaaccacttgcagattccaaaacatcttatcctatcctctaccactctcccacatgtgttgtgcagcctgagctgggcgctgccttcctttctcatcccatggggccctgtgggacactgagaacacctttacaatagtttaaacagtcattcatgcccccagtgtctaggaagataacagccagtctcaccccagtctaatcatggaccctgataatattgcttgatttttcctatcaagttacttttcaatccattcagaatctgccccagtggagacccaggagttcctttcctgcactcttctccatcctcccacctttgctgggcttttctatcactcccacctcccccagagtcagggctccattgctgagtgccccatcctggaggattggccccaagatctcctagaacaggataattgcctgtgtttaggcagataggcctaaatctttcagattctttctacaaggcaaataacccctctcttgttaattatgatgctgagaaagcctctgtctctttatttcaccttgccaagacacccacactactttggtgatgaaaagaaaggaatgagagggaaagtttggacctgtcactttggtgacagggaaagtccaggtcactttattctgtaactctccattcactggtcaaataactccatgaggctatcagtggctacagtggaaggacctgatcttgtccatctttgtgtgcacagagcctagcacagggcttggtagagggtatatctagtgaatggagaatacatggagaaacttaactaagttacacaagcatatctgacaggaatgttaccttcaattgtatgttacatatgattagtcacttttcatacactataacctctgatttttcactcaagtttgggctgattatattgtaatgatgttagataatactcaacatgattcagtatgacaaacttttttgagcacctactttatataaaacatgacaaattgcagtgtgatgtaatcaaaaacaaagaagccctataagaccatttctctagaacagatgttcttaatatttttcttactctaaaatatgtggtagatagtatgcaagaaaagccgggtgcggtggctcaggcctgtaatcccagcactttgggaggccaagatgggcggatcatgaagtcaggagttcgagaccagcctgaccaacatggtgaaaccccgtctctact

SEQ ID NO: 8695 - protein, 1314 aa, Homo sapiens
MKHLYGLFHYNPMMLGLESLPDPTDTWEIIETIGKGTYGKVYKVTNKRDGSLAAVKILDPVSDMDEEIEAEYNILQFLPNHPNVVKFYGMFYKADHCVGGQLWLVLELCNGGSVTELVKGLLRCGQRLDEAMISYILYGALLGLQHLHNNRIIHRDVKGNNILLTTEGGVKLVDFGVSAQLTSTRLRRNTSVGTPFWMAPEVIACEQQYDSSYDARCDVWSLGITAIELGDGDPPLFDMHPVKTLFKIPRNPPPTLLHPEKWCEEFNHFISQCLIKDFERRPSVTHLLDHPFIKGVHGKVLFLQKQLAKVLQDQKHQNPVAKTRHERMHTRRPYHVEDAEKYCLEDDLVNLEVLDEDTIIHQLQKRYADLLIYTYVGDILIALNPFQNLSIYSPQFSRLYHGVKRASNPPHIFASADAAYQCMVTLSKDQCIVISGESGSGKTESAHLIVQHLTFLGKANNQTLREKILQVNSLVEAFGNSCTAINDNSSRFGKYLEMMFTPTGVVMGARISEYLLEKSRVIKQAAREKNFHIFYYIYAGLHHQKKLSDFRLPEEKPPRYIADETGRVMHDITSKESYRRQFEAIQHCFRIIGFTDKEVHSVYRILAGILNIGNIEFAAISSQHQTDKSEVPNAEALQNAASVLCISPEELQEALTSHCVVTRGETIIRANTVDRAADVRDAMSKALYGRLFSWIVNRINTLLQPDENICSAGGGMNVGILDIFGFENFQRNSFEQLCINIANEQIQYYFNQHVFALEQMEYQNEGIDAVPVEYEDNRPLLDMFLQKPLGLLALLDEESRFPQATDQTLVDKFEDNLRCKYFWRPKGVELCFGIQHYAGKVLYDASGVLEKNRDTLPADVVVVLRTSENKLLQQLFSIPLTKTGNLAQTRARITVASSSLPPHFSAGKAKVDTLEVIRHPEETTNMKRQTVASYFRYSLMDLLSKMVVGQPHFVRCIKPNDDREALQFSRERVLAQLRSTGILETVSIRRQGYSHRILFEEFVKRYYYLAFTAHQTPLASKESCVAILEKSRLDHWVLGKTKVFLKYYHVEQLNLLLREVIGRVVVLQAYTKGWLGARRYKRVREKREKGAIAIQSGDTSNQSSGPHSPVAAGTRGSAEVQDCSEPGDHKVLRGSVHRRSHSQAESNNGRTQTSSNSPAVTEKNGHSQAQSSPKGCDIFAGHANKHSVSGTDLLSSRICHPAPDQQGLSLWGAPQKPGSENGLAQKHRTPRRRCQQPKMLSSPEDTMYYNQLNGTLEYQGSKRKPRKLGQIKVLDGEDEYYKSLSPVDCIPEENNSAHPSFFSSSSKGDSFAQH

SEQ ID NO: 8696 - DNA, 5552 bp, Homo sapiens
ctagatcgaaagtcctttggtaatgatgtgtcatacattctagtcatcaaagacaccattttctgggcctgaagtgttctgctggtttttggaggaatgagaatccaatctctcataagccggattcagaaaataggtcatcgatgaaacatctgtatggattatttcactataatcctatgatgcttggacttgaatcacttccagatcccacagacacctgggaaattatagagaccattggtaaaggcacctatggcaaagtctacaaggtaactaacaagagagatgggagcctggctgcagtgaaaattctggatccagtcagtgatatggatgaagaaattgaggcagaatacaacattttgcagttccttcctaatcatcccaatgttgtaaagttttatgggatgttttacaaagcggatcactgtgtagggggacagctgtggctggtcctggagctgtgtaatgggggctcagtcactgagcttgtcaaaggtctactcagatgtggccagcggttggatgaagcaatgatctcatacatcttgtacggggccctcttgggccttcagcatttgcacaacaaccgaatcatccaccgtgatgtgaaggggaataacattcttctgacaacagaaggaggagttaagctcgttgactttggtgtttcagctcaactcaccagtacacgtctgcggagaaacacatctgttggcaccccgttctggatggcccctgaggtcattgcctgtgagcagcagtatgactcttcctatgacgctcgctgtgacgtctggtccttggggatcacagctattgaactgggggatggagaccctcccctctttgacatgcatcctgtgaaaacactctttaagattccaagaaatcctccacctactttacttcatccagaaaaatggtgtgaagaattcaaccactttatttcacagtgtcttattaaggattttgaaaggcgaccttccgtcacacatctccttgaccacccatttattaaaggagtacatggaaaagttctgtttctgcaaaaacagctggccaaggttctccaagaccagaagcatcaaaatcctgttgctaaaaccaggcatgagaggatgcataccagaagaccttatcatgtggaagatgctgaaaaatactgccttgaggatgatttggtcaacctagaggttctggatgaggatacaattatccatcagttgcagaaacgttatgcagacttgctaatttacacatatgttggagacatcttaattgccttaaaccccttccagaatctaagcatatactctccacagttttccagactttatcatggggtgaaacgcgcctccaatcccccccacatatttgcatcagcagatgctgcttaccagtgcatggttactctcagcaaagaccagtgcattgtcatcagcggagagagtggctctgggaagacagaaagcgcccacctgattgttcagcatttgactttcttgggaaaggccaataatcagaccttgagagagaaaattctacaagtcaactccctggtggaagcctttgggaactcatgcactgccatcaatgacaactcgagccgttttggaaaatatctggaaatgatgtttacaccaactggagttgtgatgggggcaagaatctctgaatatctcctggaaaaatccagagttataaaacaggcagcgagagagaaaaattttcatatattttactatatttatgctggtcttcatcaccaaaagaagctttctgatttcagacttcctgaggaaaaacctcctaggtacatagctgatgaaactggaagggtgatgcacgacataacttccaaggagtcttacagaagacaattcgaagcaattcagcattgcttcaggattatagggttcacggacaaagaggtgcactcagtgtacagaattttggctgggattttgaatattgggaacattgagttcgcagctatttcctctcaacatcagactgataaaagtgaggtgcccaatgctgaagctttgcaaaatgctgcctctgttctgtgcattagccctgaagagctccaggaggccctcacctcccactgtgtggtcacccggggcgagaccatcatccgtgccaacactgtagacagggctgcggacgttcgagacgccatgtccaaagccctgtatgggaggctcttcagctggattgtgaatcgcattaatacactcctgcagccagacgaaaacatatgtagtgcaggaggtggaatgaatgtggggatcttggatatctttggattcgagaattttcagagaaattcatttgagcagctctgcataaacatcgccaatgagcaaatccagtactatttcaatcagcatgtttttgctcttgagcagatggaatatcagaatgaaggcattgatgctgtacccgtggaatatgaggacaaccgcccgctcttggacatgttcctccagaaacccctgggactgcttgcacttttggatgaggaaagtcggtttccccaagcaactgaccagaccctggttgataaatttgaagataatctacgatgcaaatacttctggaggcccaaaggagtggaactgtgctttggcattcagcattatgctggaaaggtattatatgatgcttctggggttcttgagaaaaatagagacactctccctgccgatgtggttgtggtcctgagaacgtcagaaaacaagcttcttcagcagctcttctcaatccctctgaccaaaacaggtaatttggcccagacaagagctaggataacagtggcctcaagttctttgcctccacatttcagtgctgggaaagccaaggtggacactctggaggtgatacggcatccggaagaaaccaccaacatgaagaggcaaactgtggcttcttacttccggtattctctgatggacctgctctccaaaatggtggttggacagccccactttgtgcgctgcattaaacccaatgatgaccgagaggccctgcagttctctcgagagagggtgctggcccagctccgctccacagggattctggagacagtcagcatccgccgccagggctattcccaccgcatcctttttgaagaatttgtgaaaaggtattattacttggcattcacagcacatcaaacacctcttgctagcaaagagagctgtgtggctatcttggaaaagtccagattagatcactgggtactgggaaaaacaaaggtttttctcaaatattaccatgttgagcaattaaatttgctgcttcgagaagtcataggcagagtggttgtgctgcaggcatataccaaggggtggcttggagccaggagatacaaaagggtcagagagaagagagagaagggagccattgccatccagtcagcctggagaggatatgatgctcggaggaaatttaagaaaataagcaacagaaggaatgagtctgctgctcataatcaagcaggggacacttcaaaccaaagcagtgggccacattcccccgtcgcagcaggtacgaggggaagtgccgaggttcaagactgcagcgagcctggtgaccataaagttctcaggggctctgtacatcgtaggagccattcacaagcagaatccaacaatggccgtacacagacttcaagcaactctcctgctgtcacagagaaaaatgggcattcacaagcccagagttctccaaaagggtgcgatatcttcgcaggacatgcaaacaagcactcggtttctgggactgatttgctgtcttctcggatatgccatcctgctccagatcagcaaggattgagtctctggggagcccctcaaaagcctgcctttccacattacggatgtaacttttatgggttcagaaaatggtcttgcacagaagcatcgaacacctcgccgacgatgtcagcagcccaaaatgctgagtagccctgaggacaccatgtactataaccagttaaatggaactctagaatatcaagggagcaagaggaagccaagaaaacttggccaaatcaaagtacttgatggggaagatgaatattacaaatctctgtcaccagtggactgtatccctgaggagaacaactcagcccacccttcctttttttcttcatcctcaaaaggagactcttttgctcaacattaaattgtgcttcctaaccctaaatctgtccagagtaggaacattcatggtaatcgactgtctgtcattgcgtaagaaagcactgatatggggtcagcttctttggacatatggtccatgcctgaaccttactgaaccacttgcagattccaaaacatcttatcctatcctctaccactctcccacatgtgttgtgcagcctgagctgggcgctgccttcctttctcatcccatggggccctgtgggacactgagaacacctttacaatagtttaaacagtcattcatgcccccagtgtctaggaagataacagccagtctcaccccagtctaatcatggaccctgataatattgcttgatttttcctatcaagttacttttcaatccattcagaatctgccccagtggagacccaggagttcctttcctgcactcttctccatcctcccacctttgctgggcttttctatcactcccacctcccccagagtcagggctccattgctgagtgccccatcctggaggattggccccaagatctcctagaacaggataattgcctgtgtttaggcagataggcctaaatctttcagattctttctacaaggcaaataacccctctcttgttaattatgatgctgagaaagcctctgtctctttatttcaccttgccaagacacccacactactttggtgatgaaaagaaaggaatgagagggaaagtttggacctgtcactttggtgacagggaaagtccaggtcactttattctgtaactctccattcactggtcaaataactccatgaggctatcagtggctacagtggaaggacctgatcttgtccatctttgtgtgcacagagcctagcacagggcttggtagagggtatatctagtgaatggagaatacatggagaaacttaactaagttacacaagcatatctgacaggaatgttaccttcaattgtatgttacatatgattagtcacttttcatacactataacctctgatttttcactcaagtttgggctgattatattgtaatgatgttagataatactcaacatgattcagtatgacaaacttttttgagcacctactttatataaaacatgacaaattgcagtgtgatgtaatcaaaaacaaagaagccctataagaccatttctctagaacagatgttcttaatatttttcttactctaaaatatgtggtagatagtatgcaagaaaagccgggtgcggtggctcaggcctgtaatcccagcactttgggaggccaagatgggcggatcatgaagtcaggagttcgagaccagcctgaccaacatggtgaaaccccgtctctact

SEQ ID NO: 8697 - protein, 1278 aa, Homo sapiens
MKHLYGLFHYNPMMLGLESLPDPTDTWEIIETIGKGTYGKVYKVTNKRDGSLAAVKILDPVSDMDEEIEAEYNILQFLPNHPNVVKFYGMFYKADHCVGGQLWLVLELCNGGSVTELVKGLLRCGQRLDEAMISYILYGALLGLQHLHNNRIIHRDVKGNNILLTTEGGVKLVDFGVSAQLTSTRLRRNTSVGTPFWMAPEVIACEQQYDSSYDARCDVWSLGITAIELGDGDPPLFDMHPVKTLFKIPRNPPPTLLHPEKWCEEFNHFISQCLIKDFERRPSVTHLLDHPFIKGVHGKVLFLQKQLAKVLQDQKHQNPVAKTRHERMHTRRPYHVEDAEKYCLEDDLVNLEVLDEDTIIHQLQKRYADLLIYTYVGDILIALNPFQNLSIYSPQFSRLYHGVKRASNPPHIFASADAAYQCMVTLSKDQCIVISGESGSGKTESAHLIVQHLTFLGKANNQTLREKILQVNSLVEAFGNSCTAINDNSSRFGKYLEMMFTPTGVVMGARISEYLLEKSRVIKQAAREKNFHIFYYIYAGLHHQKKLSDFRLPEEKPPRYIADETGRVMHDITSKESYRRQFEAIQHCFRIIGFTDKEVHSVYRILAGILNIGNIEFAAISSQHQTDKSEVPNAEALQNAASVLCISPEELQEALTSHCVVTRGETIIRANTVDRAADVRDAMSKALYGRLFSWIVNRINTLLQPDENICSAGGGMNVGILDIFGFENFQRNSFEQLCINIANEQIQYYFNQHVFALEQMEYQNEGIDAVPVEYEDNRPLLDMFLQKPLGLLALLDEESRFPQATDQTLVDKFEDNLRCKYFWRPKGVELCFGIQHYAGKVLYDASGVLEKNRDTLPADVVVVLRTSENKLLQQLFSIPLTKTGNLAQTRARITVASSSLPPHFSAGKAKVDTLEVIRHPEETTNMKRQTVASYFRYSLMDLLSKMVVGQPHFVRCIKPNDDREALQFSRERVLAQLRSTGILETVSIRRQGYSHRILFEEFVKRYYYLAFTAHQTPLASKESCVAILEKSRLDHWVLGKTKVFLKYYHVEQLNLLLREVIGRVVVLQAYTKGWLGARRYKRVREKREKGAIAIQSAWRGYDARRKFKKISNRRNESAAHNQAGDTSNQSSGPHSPVAAGTRGSAEVQDCSEPGDHKVLRGSVHRRSHSQAESNNGRTQTSSNSPAVTEKNGHSQAQSSPKGCDIFAGHANKHSVSGTDLLSSRICHPAPDQQGLSLWGAPQKPAFPHYGCNFYGFRKWSCTEASNTSPTMSAAQNAE

SEQ ID NO: 8698 - DNA, 5471 bp, Homo sapiens
ctagatcgaaagtcctttggtaatgatgtgtcatacattctagtcatcaaagacaccattttctgggcctgaagtgttctgctggtttttggaggaatgagaatccaatctctcataagccggattcagaaaataggtcatcgatgaaacatctgtatggattatttcactataatcctatgatgcttggacttgaatcacttccagatcccacagacacctgggaaattatagagaccattggtaaaggcacctatggcaaagtctacaaggtaactaacaagagagatgggagcctggctgcagtgaaaattctggatccagtcagtgatatggatgaagaaattgaggcagaatacaacattttgcagttccttcctaatcatcccaatgttgtaaagttttatgggatgttttacaaagcggatcactgtgtagggggacagctgtggctggtcctggagctgtgtaatgggggctcagtcactgagcttgtcaaaggtctactcagatgtggccagcggttggatgaagcaatgatctcatacatcttgtacggggccctcttgggccttcagcatttgcacaacaaccgaatcatccaccgtgatgtgaaggggaataacattcttctgacaacagaaggaggagttaagctcgttgactttggtgtttcagctcaactcaccagtacacgtctgcggagaaacacatctgttggcaccccgttctggatggcccctgaggtcattgcctgtgagcagcagtatgactcttcctatgacgctcgctgtgacgtctggtccttggggatcacagctattgaactgggggatggagaccctcccctctttgacatgcatcctgtgaaaacactctttaagattccaagaaatcctccacctactttacttcatccagaaaaatggtgtgaagaattcaaccactttatttcacagtgtcttattaaggattttgaaaggcgaccttccgtcacacatctccttgaccacccatttattaaaggagtacatggaaaagttctgtttctgcaaaaacagctggccaaggttctccaagaccagaagcatcaaaatcctgttgctaaaaccaggcatgagaggatgcataccagaagaccttatcatgtggaagatgctgaaaaatactgccttgaggatgatttggtcaacctagaggttctggatgaggatacaattatccatcagttgcagaaacgttatgcagacttgctaatttacacatatgttggagacatcttaattgccttaaaccccttccagaatctaagcatatactctccacagttttccagactttatcatggggtgaaacgcgcctccaatcccccccacatatttgcatcagcagatgctgcttaccagtgcatggttactctcagcaaagaccagtgcattgtcatcagcggagagagtggctctgggaagacagaaagcgcccacctgattgttcagcatttgactttcttgggaaaggccaataatcagaccttgagagagaaaattctacaagtcaactccctggtggaagcctttgggaactcatgcactgccatcaatgacaactcgagccgttttggaaaatatctggaaatgatgtttacaccaactggagttgtgatgggggcaagaatctctgaatatctcctggaaaaatccagagttataaaacaggcagcgagagagaaaaattttcatatattttactatatttatgctggtcttcatcaccaaaagaagctttctgatttcagacttcctgaggaaaaacctcctaggtacatagctgatgaaactggaagggtgatgcacgacataacttccaaggagtcttacagaagacaattcgaagcaattcagcattgcttcaggattatagggttcacggacaaagaggtgcactcagtgtacagaattttggctgggattttgaatattgggaacattgagttcgcagctatttcctctcaacatcagactgataaaagtgaggtgcccaatgctgaagctttgcaaaatgctgcctctgttctgtgcattagccctgaagagctccaggaggccctcacctcccactgtgtggtcacccggggcgagaccatcatccgtgccaacactgtagacagggctgcggacgttcgagacgccatgtccaaagccctgtatgggaggctcttcagctggattgtgaatcgcattaatacactcctgcagccagacgaaaacatatgtagtgcaggaggtggaatgaatgtggggatcttggatatctttggattcgagaattttcagagaaattcatttgagcagctctgcataaacatcgccaatgagcaaatccagtactatttcaatcagcatgtttttgctcttgagcagatggaatatcagaatgaaggcattgatgctgtacccgtggaatatgaggacaaccgcccgctcttggacatgttcctccagaaacccctgggactgcttgcacttttggatgaggaaagtcggtttccccaagcaactgaccagaccctggttgataaatttgaagataatctacgatgcaaatacttctggaggcccaaaggagtggaactgtgctttggcattcagcattatgctggaaaggtattatatgatgcttctggggttcttgagaaaaatagagacactctccctgccgatgtggttgtggtcctgagaacgtcagaaaacaagcttcttcagcagctcttctcaatccctctgaccaaaacaggtaatttggcccagacaagagctaggataacagtggcctcaagttctttgcctccacatttcagtgctgggaaagccaaggtggacactctggaggtgatacggcatccggaagaaaccaccaacatgaagaggcaaactgtggcttcttacttccggtattctctgatggacctgctctccaaaatggtggttggacagccccactttgtgcgctgcattaaacccaatgatgaccgagaggccctgcagttctctcgagagagggtgctggcccagctccgctccacagggattctggagacagtcagcatccgccgccagggctattcccaccgcatcctttttgaagaatttgtgaaaaggtattattacttggcattcacagcacatcaaacacctcttgctagcaaagagagctgtgtggctatcttggaaaagtccagattagatcactgggtactgggaaaaacaaaggtttttctcaaatattaccatgttgagcaattaaatttgctgcttcgagaagtcataggcagagtggttgtgctgcaggcatataccaaggggtggcttggagccaggagatacaaaagggtcagagagaagagagagaagggagccattgccatccagtcaggggacacttcaaaccaaagcagtgggccacattcccccgtcgcagcaggtacgaggggaagtgccgaggttcaagactgcagcgagcctggtgaccataaagttctcaggggctctgtacatcgtaggagccattcacaagcagaatccaacaatggccgtacacagacttcaagcaactctcctgctgtcacagagaaaaatgggcattcacaagcccagagttctccaaaagggtgcgatatcttcgcaggacatgcaaacaagcactcggtttctgggactgatttgctgtcttctcggatatgccatcctgctccagatcagcaaggattgagtctctggggagcccctcaaaagcctgcctttccacattacggatgtaacttttatgggttcagaaaatggtcttgcacagaagcatcgaacacctcgccgacgatgtcagcagcccaaaatgctgagtagccctgaggacaccatgtactataaccagttaaatggaactctagaatatcaagggagcaagaggaagccaagaaaacttggccaaatcaaagtacttgatggggaagatgaatattacaaatctctgtcaccagtggactgtatccctgaggagaacaactcagcccacccttcctttttttcttcatcctcaaaaggagactcttttgctcaacattaaattgtgcttcctaaccctaaatctgtccagagtaggaacattcatggtaatcgactgtctgtcattgcgtaagaaagcactgatatggggtcagcttctttggacatatggtccatgcctgaaccttactgaaccacttgcagattccaaaacatcttatcctatcctctaccactctcccacatgtgttgtgcagcctgagctgggcgctgccttcctttctcatcccatggggccctgtgggacactgagaacacctttacaatagtttaaacagtcattcatgcccccagtgtctaggaagataacagccagtctcaccccagtctaatcatggaccctgataatattgcttgatttttcctatcaagttacttttcaatccattcagaatctgccccagtggagacccaggagttcctttcctgcactcttctccatcctcccacctttgctgggcttttctatcactcccacctcccccagagtcagggctccattgctgagtgccccatcctggaggattggccccaagatctcctagaacaggataattgcctgtgtttaggcagataggcctaaatctttcagattctttctacaaggcaaataacccctctcttgttaattatgatgctgagaaagcctctgtctctttatttcaccttgccaagacacccacactactttggtgatgaaaagaaaggaatgagagggaaagtttggacctgtcactttggtgacagggaaagtccaggtcactttattctgtaactctccattcactggtcaaataactccatgaggctatcagtggctacagtggaaggacctgatcttgtccatctttgtgtgcacagagcctagcacagggcttggtagagggtatatctagtgaatggagaatacatggagaaacttaactaagttacacaagcatatctgacaggaatgttaccttcaattgtatgttacatatgattagtcacttttcatacactataacctctgatttttcactcaagtttgggctgattatattgtaatgatgttagataatactcaacatgattcagtatgacaaacttttttgagcacctactttatataaaacatgacaaattgcagtgtgatgtaatcaaaaacaaagaagccctataagaccatttctctagaacagatgttcttaatatttttcttactctaaaatatgtggtagatagtatgcaagaaaagccgggtgcggtggctcaggcctgtaatcccagcactttgggaggccaagatgggcggatcatgaagtcaggagttcgagaccagcctgaccaacatggtgaaaccccgtctctact

SEQ ID NO: 8699 - protein, 1251 aa, Homo sapiens
MKHLYGLFHYNPMMLGLESLPDPTDTWEIIETIGKGTYGKVYKVTNKRDGSLAAVKILDPVSDMDEEIEAEYNILQFLPNHPNVVKFYGMFYKADHCVGGQLWLVLELCNGGSVTELVKGLLRCGQRLDEAMISYILYGALLGLQHLHNNRIIHRDVKGNNILLTTEGGVKLVDFGVSAQLTSTRLRRNTSVGTPFWMAPEVIACEQQYDSSYDARCDVWSLGITAIELGDGDPPLFDMHPVKTLFKIPRNPPPTLLHPEKWCEEFNHFISQCLIKDFERRPSVTHLLDHPFIKGVHGKVLFLQKQLAKVLQDQKHQNPVAKTRHERMHTRRPYHVEDAEKYCLEDDLVNLEVLDEDTIIHQLQKRYADLLIYTYVGDILIALNPFQNLSIYSPQFSRLYHGVKRASNPPHIFASADAAYQCMVTLSKDQCIVISGESGSGKTESAHLIVQHLTFLGKANNQTLREKILQVNSLVEAFGNSCTAINDNSSRFGKYLEMMFTPTGVVMGARISEYLLEKSRVIKQAAREKNFHIFYYIYAGLHHQKKLSDFRLPEEKPPRYIADETGRVMHDITSKESYRRQFEAIQHCFRIIGFTDKEVHSVYRILAGILNIGNIEFAAISSQHQTDKSEVPNAEALQNAASVLCISPEELQEALTSHCVVTRGETIIRANTVDRAADVRDAMSKALYGRLFSWIVNRINTLLQPDENICSAGGGMNVGILDIFGFENFQRNSFEQLCINIANEQIQYYFNQHVFALEQMEYQNEGIDAVPVEYEDNRPLLDMFLQKPLGLLALLDEESRFPQATDQTLVDKFEDNLRCKYFWRPKGVELCFGIQHYAGKVLYDASGVLEKNRDTLPADVVVVLRTSENKLLQQLFSIPLTKTGNLAQTRARITVASSSLPPHFSAGKAKVDTLEVIRHPEETTNMKRQTVASYFRYSLMDLLSKMVVGQPHFVRCIKPNDDREALQFSRERVLAQLRSTGILETVSIRRQGYSHRILFEEFVKRYYYLAFTAHQTPLASKESCVAILEKSRLDHWVLGKTKVFLKYYHVEQLNLLLREVIGRVVVLQAYTKGWLGARRYKRVREKREKGAIAIQSGDTSNQSSGPHSPVAAGTRGSAEVQDCSEPGDHKVLRGSVHRRSHSQAESNNGRTQTSSNSPAVTEKNGHSQAQSSPKGCDIFAGHANKHSVSGTDLLSSRICHPAPDQQGLSLWGAPQKPAFPHYGCNFYGFRKWSCTEASNTSPTMSAAQNAE

SEQ ID NO: 8700 - DNA, 5521 bp, Homo sapiens
ctagatcgaaagtcctttggtaatgatgtgtcatacattctagtcatcaaagacaccattttctgggcctgaagtgttctgctggtttttggaggaatgagaatccaatctctcataagccggattcagaaaataggtcatcgatgaaacatctgtatggattatttcactataatcctatgatgcttggacttgaatcacttccagatcccacagacacctgggaaattatagagaccattggtaaaggcacctatggcaaagtctacaaggtaactaacaagagagatgggagcctggctgcagtgaaaattctggatccagtcagtgatatggatgaagaaattgaggcagaatacaacattttgcagttccttcctaatcatcccaatgttgtaaagttttatgggatgttttacaaagcggatcactgtgtagggggacagctgtggctggtcctggagctgtgtaatgggggctcagtcactgagcttgtcaaaggtctactcagatgtggccagcggttggatgaagcaatgatctcatacatcttgtacggggccctcttgggccttcagcatttgcacaacaaccgaatcatccaccgtgatgtgaaggggaataacattcttctgacaacagaaggaggagttaagctcgttgactttggtgtttcagctcaactcaccagtacacgtctgcggagaaacacatctgttggcaccccgttctggatggcccctgaggtcattgcctgtgagcagcagtatgactcttcctatgacgctcgctgtgacgtctggtccttggggatcacagctattgaactgggggatggagaccctcccctctttgacatgcatcctgtgaaaacactctttaagattccaagaaatcctccacctactttacttcatccagaaaaatggtgtgaagaattcaaccactttatttcacagtgtcttattaaggattttgaaaggcgaccttccgtcacacatctccttgaccacccatttattaaaggagtacatggaaaagttctgtttctgcaaaaacagctggccaaggttctccaagaccagaagcatcaaaatcctgttgctaaaaccaggcatgagaggatgcataccagaagaccttatcatgtggaagatgctgaaaaatactgccttgaggatgatttggtcaacctagaggttctggatgaggatacaattatccatcagttgcagaaacgttatgcagacttgctaatttacacatatgttggagacatcttaattgccttaaaccccttccagaatctaagcatatactctccacagttttccagactttatcatggggtgaaacgcgcctccaatcccccccacatatttgcatcagcagatgctgcttaccagtgcatggttactctcagcaaagaccagtgcattgtcatcagcggagagagtggctctgggaagacagaaagcgcccacctgattgttcagcatttgactttcttgggaaaggccaataatcagaccttgagagagaaaattctacaagtcaactccctggtggaagcctttgggaactcatgcactgccatcaatgacaactcgagccgttttggaaaatatctggaaatgatgtttacaccaactggagttgtgatgggggcaagaatctctgaatatctcctggaaaaatccagagttataaaacaggcagcgagagagaaaaattttcatatattttactatatttatgctggtcttcatcaccaaaagaagctttctgatttcagacttcctgaggaaaaacctcctaggtacatagctgatgaaactggaagggtgatgcacgacataacttccaaggagtcttacagaagacaattcgaagcaattcagcattgcttcaggattatagggttcacggacaaagaggtgcactcagtgtacagaattttggctgggattttgaatattgggaacattgagttcgcagctatttcctctcaacatcagactgataaaagtgaggtgcccaatgctgaagctttgcaaaatgctgcctctgttctgtgcattagccctgaagagctccaggaggccctcacctcccactgtgtggtcacccggggcgagaccatcatccgtgccaacactgtagacagggctgcggacgttcgagacgccatgtccaaagccctgtatgggaggctcttcagctggattgtgaatcgcattaatacactcctgcagccagacgaaaacatatgtagtgcaggaggtggaatgaatgtggggatcttggatatctttggattcgagaattttcagagaaattcatttgagcagctctgcataaacatcgccaatgagcaaatccagtactatttcaatcagcatgtttttgctcttgagcagatggaatatcagaatgaaggcattgatgctgtacccgtggaatatgaggacaaccgcccgctcttggacatgttcctccagaaacccctgggactgcttgcacttttggatgaggaaagtcggtttccccaagcaactgaccagaccctggttgataaatttgaagataatctacgatgcaaatacttctggaggcccaaaggagtggaactgtgctttggcattcagcattatgctggaaaggtattatatgatgcttctggggttcttgagaaaaatagagacactctccctgccgatgtggttgtggtcctgagaacgtcagaaaacaagcttcttcagcagctcttctcaatccctctgaccaaaacaggtaatttggcccagacaagagctaggataacagtggcctcaagttctttgcctccacatttcagtgctgggaaagccaaggtggacactctggaggtgatacggcatccggaagaaaccaccaacatgaagaggcaaactgtggcttcttacttccggtattctctgatggacctgctctccaaaatggtggttggacagccccactttgtgcgctgcattaaacccaatgatgaccgagaggccctgcagttctctcgagagagggtgctggcccagctccgctccacagggattctggagacagtcagcatccgccgccagggctattcccaccgcatcctttttgaagaatttgtgaaaaggtattattacttggcattcacagcacatcaaacacctcttgctagcaaagagagctgtgtggctatcttggaaaagtccagattagatcactgggtactgggaaaaacaaaggtttttctcaaatattaccatgttgagcaattaaatttgctgcttcgagaagtcataggcagagtggttgtgctgcaggcatataccaaggggtggcttggagccaggagatacaaaagggtcagagagaagagagagaagggagccattgccatccagtcagcctggagaggatatgatgctcggaggaaatttaagaaaataagcaacagaaggaatgagtctgctgctcataatcaagcaggggacacttcaaaccaaagcagtgggccacattcccccgtcgcagcaggtacgaggggaagtgccgaggttcaagactgcagcgagcctggtgaccataaagttctcaggggctctgtacatcgtaggagccattcacaagcagaatccaacaatggccgtacacagacttcaagcaactctcctgctgtcacagagaaaaatgggcattcacaagcccagagttctccaaaagggtgcgatatcttcgcaggacatgcaaacaagcactcggtttctgggactgatttgctgtcttctcggatatgccatcctgctccagatcagcaaggattgagtctctggggagcccctcaaaagcctggttcagaaaatggtcttgcacagaagcatcgaacacctcgccgacgatgtcagcagcccaaaatgctgagtagccctgaggacaccatgtactataaccagttaaatggaactctagaatatcaagggagcaagaggaagccaagaaaacttggccaaatcaaagtacttgatggggaagatgaatattacaaatctctgtcaccagtggactgtatccctgaggagaacaactcagcccacccttcctttttttcttcatcctcaaaaggagactcttttgctcaacattaaattgtgcttcctaaccctaaatctgtccagagtaggaacattcatggtaatcgactgtctgtcattgcgtaagaaagcactgatatggggtcagcttctttggacatatggtccatgcctgaaccttactgaaccacttgcagattccaaaacatcttatcctatcctctaccactctcccacatgtgttgtgcagcctgagctgggcgctgccttcctttctcatcccatggggccctgtgggacactgagaacacctttacaatagtttaaacagtcattcatgcccccagtgtctaggaagataacagccagtctcaccccagtctaatcatggaccctgataatattgcttgatttttcctatcaagttacttttcaatccattcagaatctgccccagtggagacccaggagttcctttcctgcactcttctccatcctcccacctttgctgggcttttctatcactcccacctcccccagagtcagggctccattgctgagtgccccatcctggaggattggccccaagatctcctagaacaggataattgcctgtgtttaggcagataggcctaaatctttcagattctttctacaaggcaaataacccctctcttgttaattatgatgctgagaaagcctctgtctctttatttcaccttgccaagacacccacactactttggtgatgaaaagaaaggaatgagagggaaagtttggacctgtcactttggtgacagggaaagtccaggtcactttattctgtaactctccattcactggtcaaataactccatgaggctatcagtggctacagtggaaggacctgatcttgtccatctttgtgtgcacagagcctagcacagggcttggtagagggtatatctagtgaatggagaatacatggagaaacttaactaagttacacaagcatatctgacaggaatgttaccttcaattgtatgttacatatgattagtcacttttcatacactataacctctgatttttcactcaagtttgggctgattatattgtaatgatgttagataatactcaacatgattcagtatgacaaacttttttgagcacctactttatataaaacatgacaaattgcagtgtgatgtaatcaaaaacaaagaagccctataagaccatttctctagaacagatgttcttaatatttttcttactctaaaatatgtggtagatagtatgcaagaaaagccgggtgcggtggctcaggcctgtaatcccagcactttgggaggccaagatgggcggatcatgaagtcaggagttcgagaccagcctgaccaacatggtgaaaccccgtctctact

SEQ ID NO: 8701 - protein, 1341 aa, Homo sapiens
MKHLYGLFHYNPMMLGLESLPDPTDTWEIIETIGKGTYGKVYKVTNKRDGSLAAVKILDPVSDMDEEIEAEYNILQFLPNHPNVVKFYGMFYKADHCVGGQLWLVLELCNGGSVTELVKGLLRCGQRLDEAMISYILYGALLGLQHLHNNRIIHRDVKGNNILLTTEGGVKLVDFGVSAQLTSTRLRRNTSVGTPFWMAPEVIACEQQYDSSYDARCDVWSLGITAIELGDGDPPLFDMHPVKTLFKIPRNPPPTLLHPEKWCEEFNHFISQCLIKDFERRPSVTHLLDHPFIKGVHGKVLFLQKQLAKVLQDQKHQNPVAKTRHERMHTRRPYHVEDAEKYCLEDDLVNLEVLDEDTIIHQLQKRYADLLIYTYVGDILIALNPFQNLSIYSPQFSRLYHGVKRASNPPHIFASADAAYQCMVTLSKDQCIVISGESGSGKTESAHLIVQHLTFLGKANNQTLREKILQVNSLVEAFGNSCTAINDNSSRFGKYLEMMFTPTGVVMGARISEYLLEKSRVIKQAAREKNFHIFYYIYAGLHHQKKLSDFRLPEEKPPRYIADETGRVMHDITSKESYRRQFEAIQHCFRIIGFTDKEVHSVYRILAGILNIGNIEFAAISSQHQTDKSEVPNAEALQNAASVLCISPEELQEALTSHCVVTRGETIIRANTVDRAADVRDAMSKALYGRLFSWIVNRINTLLQPDENICSAGGGMNVGILDIFGFENFQRNSFEQLCINIANEQIQYYFNQHVFALEQMEYQNEGIDAVPVEYEDNRPLLDMFLQKPLGLLALLDEESRFPQATDQTLVDKFEDNLRCKYFWRPKGVELCFGIQHYAGKVLYDASGVLEKNRDTLPADVVVVLRTSENKLLQQLFSIPLTKTGNLAQTRARITVASSSLPPHFSAGKAKVDTLEVIRHPEETTNMKRQTVASYFRYSLMDLLSKMVVGQPHFVRCIKPNDDREALQFSRERVLAQLRSTGILETVSIRRQGYSHRILFEEFVKRYYYLAFTAHQTPLASKESCVAILEKSRLDHWVLGKTKVFLKYYHVEQLNLLLREVIGRVVVLQAYTKGWLGARRYKRVREKREKGAIAIQSAWRGYDARRKFKKISNRRNESAAHNQAGDTSNQSSGPHSPVAAGTRGSAEVQDCSEPGDHKVLRGSVHRRSHSQAESNNGRTQTSSNSPAVTEKNGHSQAQSSPKGCDIFAGHANKHSVSGTDLLSSRICHPAPDQQGLSLWGAPQKPGSENGLAQKHRTPRRRCQQPKMLSSPEDTMYYNQLNGTLEYQGSKRKPRKLGQIKVLDGEDEYYKSLSPVDCIPEENNSAHPSFFSSSSKGDSFAQH

SEQ ID NO: 8702 - DNA, 3320 bp, Homo sapiens
gtgcatgctgcagagtgctttactttcaacaaggaaacatctgtatggattatttcactataatcctatgatgcttggacttgaatcacttccagatcccacagacacctgggaaattatagagaccattggtaaaggcacctatggcaaagtctacaaggtaactaacaagagagatgggagcctggctgcagtgaaaattctggatccagtcagtgatatggatgaagaaattgaggcagaatacaacattttgcagttccttcctaatcatcccaatgttgtaaagttttatgggatgttttacaaagcggatcactgtgtagggggacagctgtggctggtcctggagctgtgtaatgggggctcagtcactgagcttgtcaaaggtctactcagatgtggccagcggttggatgaagcaatgatctcatacatcttgtacggggccctcttgggccttcagcatttgcacaacaaccgaatcatccaccgtgatgtgaaggggaataacattcttctgacaacagaaggaggagttaagctcgttgactttggtgtttcagctcaactcaccagtacacgtctgcggagaaacacatctgttggcaccccgttctggatggcccctgaggtcattgcctgtgagcagcagtatgactcttcctatgacgctcgctgtgacgtctggtccttggggatcacagctattgaactgggggatggagaccctcccctctttgacatgcatcctgtgaaaacactctttaagattccaagaaatcctccacctactttacttcatccagaaaaatggtgtgaagaattcaaccactttatttcacagtgtcttattaaggattttgaaaggcgaccttccgtcacacatctccttgaccacccatttattaaaggagtacatggaaaagttctgtttctgcaaaaacagctggccaaggttctccaagaccagaagcatcaaaatcctgttgctaaaaccaggcatgagaggatgcataccagaagaccttatcatgtggaagatgctgaaaaatactgccttgaggatgatttggtcaacctagaggttctggatgaggatacaattatccatcagttgcagaaacgttatgcagacttgctaatttacacatatgttggagacatcttaattgccttaaaccccttccagaatctaagcatatactctccacagttttccagactttatcatggggtgaaacgcgcctccaatcccccccacatatttgcatcagcagatgctgcttaccagtgcatggttactctcagcaaagaccagtgcattgtcatcagcggagagagtggctctgggaagacagaaagcgcccacctgattgttcagcatttgactttcttgggaaaggccaataatcagaccttgagagagaaaattctacaagtcaactccctggtggaagcctttgggaactcatgcactgccatcaatgacaactcgagccgttttggaaaatatctggaaatgatgtttacaccaactggagttgtgatgggggcaagaatctctgaatatctcctggaaaaatccagagttataaaacaggcagcgagagagaaaaattttcatatattttactatatttatgctggtcttcatcaccaaaagaagctttctgatttcagacttcctgaggaaaaacctcctaggtacatagctgatgaaactggaagggtgatgcacgacataacttccaaggagtcttacagaagacaattcgaagcaattcagcattgcttcaggattatagggttcacggacaaagaggtgcactcagtgtacagaattttggctgggattttgaatattgggaacattgagttcgcagctatttcctctcaacatcagactgataaaagtgaggtgcccaatgctgaagctttgcaaaatgctgcctctgttctgtgcattagccctgaagagctccaggaggccctcacctcccactgtgtggtcacccggggcgagaccatcatccgtgccaacactgtagacagggctgcggacgttcgagacgccatgtccaaagccctgtatgggaggctcttcagctggattgtgaatcgcattaatacactcctgcagccagacgaaaacatatgtagtgcaggaggtggaatgaatgtggggatcttggatatctttggattcgagaattttcagagaaattcatttgagcagctctgcataaacatcgccaatgagcaaatccagtactatttcaatcagcatgtttttgctcttgagcagatggaatatcagaatgaaggcattgatgctgtacccgtggaatatgaggacaaccgcccgctcttggacatgttcctccagaaacccctgggactgcttgcacttttggatgaggaaagtcggtttccccaagcaactgaccagaccctggttgataaatttgaagataatctacgatgcaaatacttctggaggcccaaaggagtggaactgtgctttggcattcagcattatgctggaaaggtattatatgatgcttctggggttcttgagaaaaatagagacactctccctgccgatgtggttgtggtcctgagaacgtcagaaaacaagcttcttcagcagctcttctcaatccctctgaccaaaacaggtaatttggcccagacaagagctaggataacagtggcctcaagttctttgcctccacatttcagtgctgggaaagccaaggtggacactctggaggtgatacggcatccggaagaaaccaccaacatgaagaggcaaactgtggcttcttacttccggtattctctgatggacctgctctccaaaatggtggttggacagccccactttgtgcgctgcattaaacccaatgatgaccgagaggccctgcagttctctcgagagagggtgctggcccagctccgctccacagggattctggagacagtcagcatccgccgccagggctattcccaccgcatcctttttgaagaatttgtgaaaaggtattattacttggcattcacagcacatcaaacacctcttgctagcaaagagagctgtgtggctatcttggaaaagtccagattagatcactgggtactgggaaaaacaaaggtttttctcaaatattaccatgttgagcaattaaatttgctgcttcgagaagtcataggcagagtggttgtgctgcaggcatataccaaggggtggcttggagccaggagatacaaaagggtcagagagaagagagagaagggagccattgccatccagtcag

SEQ ID NO: 8703 - protein, 1104 aa, Homo sapiens
MLQSALLSTRKHLYGLFHYNPMMLGLESLPDPTDTWEIIETIGKGTYGKVYKVTNKRDGSLAAVKILDPVSDMDEEIEAEYNILQFLPNHPNVVKFYGMFYKADHCVGGQLWLVLELCNGGSVTELVKGLLRCGQRLDEAMISYILYGALLGLQHLHNNRIIHRDVKGNNILLTTEGGVKLVDFGVSAQLTSTRLRRNTSVGTPFWMAPEVIACEQQYDSSYDARCDVWSLGITAIELGDGDPPLFDMHPVKTLFKIPRNPPPTLLHPEKWCEEFNHFISQCLIKDFERRPSVTHLLDHPFIKGVHGKVLFLQKQLAKVLQDQKHQNPVAKTRHERMHTRRPYHVEDAEKYCLEDDLVNLEVLDEDTIIHQLQKRYADLLIYTYVGDILIALNPFQNLSIYSPQFSRLYHGVKRASNPPHIFASADAAYQCMVTLSKDQCIVISGESGSGKTESAHLIVQHLTFLGKANNQTLREKILQVNSLVEAFGNSCTAINDNSSRFGKYLEMMFTPTGVVMGARISEYLLEKSRVIKQAAREKNFHIFYYIYAGLHHQKKLSDFRLPEEKPPRYIADETGRVMHDITSKESYRRQFEAIQHCFRIIGFTDKEVHSVYRILAGILNIGNIEFAAISSQHQTDKSEVPNAEALQNAASVLCISPEELQEALTSHCVVTRGETIIRANTVDRAADVRDAMSKALYGRLFSWIVNRINTLLQPDENICSAGGGMNVGILDIFGFENFQRNSFEQLCINIANEQIQYYFNQHVFALEQMEYQNEGIDAVPVEYEDNRPLLDMFLQKPLGLLALLDEESRFPQATDQTLVDKFEDNLRCKYFWRPKGVELCFGIQHYAGKVLYDASGVLEKNRDTLPADVVVVLRTSENKLLQQLFSIPLTKTGNLAQTRARITVASSSLPPHFSAGKAKVDTLEVIRHPEETTNMKRQTVASYFRYSLMDLLSKMVVGQPHFVRCIKPNDDREALQFSRERVLAQLRSTGILETVSIRRQGYSHRILFEEFVKRYYYLAFTAHQTPLASKESCVAILEKSRLDHWVLGKTKVFLKYYHVEQLNLLLREVIGRVVVLQAYTKGWLGARRYKRVREKREKGAIAIQ

SEQ ID NO: 8704 - DNA, 1726 bp, Homo sapiens
caaccaggaaacatctgtatggattatttcactataatcctatgatgcttggacttgaatcacttccagatcccacagacacctgggaaattatagagaccattggtaaaggcacctatggcaaagtctacaaggtaactaacaagagagatgggagcctggctgcagtgaaaattctggatccagtcagtgatatggatgaagaaattgaggcagaatacaacattttgcagttccttcctaatcatcccaatgttgtaaagttttatgggatgttttacaaagcggatcactgtgtagggggacagctgtggctggtcctggagctgtgtaatgggggctcagtcactgagcttgtcaaaggtctactcagatgtggccagcggttggatgaagcaatgatctcatacatcttgtacggggccctcttgggccttcagcatttgcacaacaaccgaatcatccaccgtgatgtgaaggggaataacattcttctgacaacagaaggaggagttaagctcgttgactttggtgtttcagctcaactcaccagtacacgtctgcggagaaacacatctgttggcaccccgttctggatggcccctgaggtcattgcctgtgagcagcagtatgactcttcctatgacgctcgctgtgacgtctggtccttggggatcacagctattgaactgggggatggagaccctcccctctttgacatgcatcctgtgaaaacactctttaagattccaagaaatcctccacctactttacttcatccagaaaaatggtgtgaagaattcaaccactttatttcacagtgtcttattaaggattttgaaaggcgaccttccgtcacacatctccttgaccacccatttattaaaggagtacatggaaaagttctgtttctgcaaaaacagctggccaaggttctccaagaccagaagcatcaaaatcctgttgctaaaaccaggcatgagaggatgcataccagaagaccttatcatgtggaagatgctgaaaaatactgccttgaggatgatttggtcaacctagaggttctggatgaggtactaaatatttagtagacaattctcattgaagacatttgtttcatgtgaatggtctgaactttctgttgtagaccatgtcctcctaaggtcatttgaaaatttaattgtttgtgtagctatgggatgaagttcagggagcattcagttgctgtgactatgatcctgtgctgtgtttatttagatagcccctagaatgatgaagagaaaaggatttggatttttgcaataaagctctttatattgtagccttaatgatggattatatcagctgaaaatattttgtttgataaaatttgataaaatatttcaattaacccttaagaagttgtttgttcttcataagaaagagcttcatttagggaaatagtgaagttaatatagcttgaattctaaatttgaagtctgtgataatccccatttaaaatatgcatgtttaatagagctgttaattgcactggacctgtttatgctgagtctaactctggggattgttaccttcaatgtctaaatcactaaagtgtaatacaaagtggttaattctgtatttatgccacctaggttttaagtgcagtgctttgagaaattaacttaccattctgtcggtgctctatcagtaggaacagcctattaaataaaattttaaatacaac

SEQ ID NO: 8705 - protein, 348 aa, Homo sapiens
MMLGLESLPDPTDTWEIIETIGKGTYGKVYKVTNKRDGSLAAVKILDPVSDMDEEIEAEYNILQFLPNHPNVVKFYGMFYKADHCVGGQLWLVLELCNGGSVTELVKGLLRCGQRLDEAMISYILYGALLGLQHLHNNRIIHRDVKGNNILLTTEGGVKLVDFGVSAQLTSTRLRRNTSVGTPFWMAPEVIACEQQYDSSYDARCDVWSLGITAIELGDGDPPLFDMHPVKTLFKIPRNPPPTLLHPEKWCEEFNHFISQCLIKDFERRPSVTHLLDHPFIKGVHGKVLFLQKQLAKVLQDQKHQNPVAKTRHERMHTRRPYHVEDAEKYCLEDDLVNLEVLDEVLNI

SEQ ID NO: 8706 - DNA, 5271 bp, Homo sapiens
gacttgaatcacttccagatcccacagacacctgggaaattatagagaccattggtaaaggcacctatggcaaagtctacaaggtaactaacaagagagatgggagcctggctgcagtgaaaattctggatccagtcagtgatatggatgaagaaattgaggcagaatacaacattttgcagttccttcctaatcatcccaatgttgtaaagttttatgggatgttttacaaagcggatcactgtgtagggggacagctgtggctggtcctggagctgtgtaatgggggctcagtcactgagcttgtcaaaggtctactcagatgtggccagcggttggatgaagcaatgatctcatacatcttgtacggggccctcttggtgtttcagctcaactcaccagtacacgtctgcggagaaacacatctgttggcaccccgttctggatggcccctgaggtcattgcctgtgagcagcagtatgactcttcctatgacgctcgctgtgacgtctggtccttggggatcacagctattgaactgggggatggagaccctcccctctttgacatgcatcctgtgaaaacactctttaagattccaagaaatcctccacctactttacttcatccagaaaaatggtgtgaagaattcaaccactttatttcacagtgtcttattaaggattttgaaaggcgaccttccgtcacacatctccttgaccacccatttattaaaggagtacatggaaaagttctgtttctgcaaaaacagctggccaaggttctccaagaccagaagcatcaaaatcctgttgctaaaaccaggcatgagaggatgcataccagaagaccttatcatgtggaagatgctgaaaaatactgccttgaggatgatttggtcaacctagaggttctggatgaggatacaattatccatcagttgcagaaacgttatgcagacttgctaatttacacatatgttggagacatcttaattgccttaaaccccttccagaatctaagcatatactctccacagttttccagactttatcatggggtgaaacgcgcctccaatcccccccacatatttgcatcagcagatgctgcttaccagtgcatggttactctcagcaaagaccagtgcattgtcatcagcggagagagtggctctgggaagacagaaagcgcccacctgattgttcagcatttgactttcttgggaaaggccaataatcagaccttgagagagaaaattctacaagtcaactccctggtggaagcctttgggaactcatgcactgccatcaatgacaactcgagccgttttggaaaatatctggaaatgatgtttacaccaactggagttgtgatgggggcaagaatctctgaatatctcctggaaaaatccagagttataaaacaggcagcgagagagaaaaattttcatatattttactatatttatgctggtcttcatcaccaaaagaagctttctgatttcagacttcctgaggaaaaacctcctaggtacatagctgatgaaactggaagggtgatgcacgacataacttccaaggagtcttacagaagacaattcgaagcaattcagcattgcttcaggattatagggttcacggacaaagaggtgcactcagtgtacagaattttggctgggattttgaatattgggaacattgagttcgcagctatttcctctcaacatcagactgataaaagtgaggtgcccaatgctgaagctttgcaaaatgctgcctctgttctgtgcattagccctgaagagctccaggaggccctcacctcccactgtgtggtcacccggggcgagaccatcatccgtgccaacactgtagacagggctgcggacgttcgagacgccatgtccaaagccctgtatgggaggctcttcagctggattgtgaatcgcattaatacactcctgcagccagacgaaaacatatgtagtgcaggaggtggaatgaatgtggggatcttggatatctttggattcgagaattttcagagaaattcatttgagcagctctgcataaacatcgccaatgagcaaatccagtactatttcaatcagcatgtttttgctcttgagcagatggaatatcagaatgaaggcattgatgctgtacccgtggaatatgaggacaaccgcccgctcttggacatgttcctccagaaacccctgggactgcttgcacttttggatgaggaaagtcggtttccccaagcaactgaccagaccctggttgataaatttgaagataatctacgatgcaaatacttctggaggcccaaaggagtggaactgtgctttggcattcagcattatgctggaaaggtattatatgatgcttctggggttcttgagaaaaatagagacactctccctgccgatgtggttgtggtcctgagaacgtcagaaaacaagcttcttcagcagctcttctcaatccctctgaccaaaacaggtaatttggcccagacaagagctaggataacagtggcctcaagttctttgcctccacatttcagtgctgggaaagccaaggggacacttcaaaccaaagcagtgggccacattcccccgtcgcagcaggtacgaggggaagtgccgaggttcaagactgcagcgagcctggtgaccataaagttctcaggggctctgtacatcgtaggagccattcacaagcagaatccaacaatggccgtacacagacttcaagcaactctcctgctgtcacagagaaaaatgggcattcacaagcccagagttctccaaaagggtgcgatatcttcgcaggacatgcaaacaagcactcggtttctgggactgatttgctgtcttctcggatatgccatcctgctccagatcagcaaggattgagtctctggggagcccctcaaaagcctggttcagaaaatggtcttgcacagaagcatcgaacacctcgccgacgatgtcagcagcccaaaatgctgagtagccctgaggacaccatgtactataaccagttaaatggaactctagaatatcaagggagcaagaggaagccaagaaaacttggccaaatcaaagtacttgatggggaagatgaatattacaaatctctgtcaccagtggactgtatccctgaggagaacaactcagcccacccttcctttttttcttcatcctcaaaaggagactcttttgctcaacattaaattgtgcttcctaaccctaaatctgtccagagtaggaacattcatggtaatcgactgtctgtcattgcgtaagaaagcactgatatggggtcagcttctttggacatatggtccatgcctgaaccttactgaaccacttgcagattccaaaacatcttatcctatcctctaccactctcccacatgtgttgtgcagcctgagctgggcgctgccttcctttctcatcccatggggccctgtgggacactgagaacacctttacaatagtttaaacagtcattcatgcccccagtgtctaggaagataacagccagtctcaccccagtctaatcatggaccctgataatattgcttgatttttcctatcaagttacttttcaatccattcagaatctgccccagtggagacccaggagttcctttcctgcactcttctccatcctcccacctttgctgggcttttctatcactcccacctcccccagagtcagggctccattgctgagtgccccatcctggaggattggccccaagatctcctagaacaggataattgcctgtgtttaggcagataggcctaaatctttcagattctttctacaaggcaaataacccctctcttgttaattatgatgctgagaaagcctctgtctctttatttcaccttgccaagacacccacactactttggtgatgaaaagaaaggaatgagagggaaagtttggacctgtcactttggtgacagggaaagtccaggtcactttattctgtaactctccattcactggtcaaataactccatgaggctatcagtggctacagtggaaggacctgatcttgtccatctttgtgtgcacagagcctagcacagggcttggtagagggtatatctagtgaatggagaatacatggagaaacttaactaagttacacaagcatatctgacaggaatgttaccttcaattgtatgttacatatgattagtcacttttcatacactataacctctgatttttcactcaagtttgggctgattatattgtaatgatgttagataatactcaacatgattcagtatgacaaacttttttgagcacctactttatataaaacatgacaaattgcagtgtgatgtaatcaaaaacaaagaagccctataagaccatttctctagaacagatgttcttaatatttttcttactctaaaatatgtggtagatagtatgcaagaaaagccgggtgcggtggctcaggcctgtaatcccagcactttgggaggccaagatgggcggatcatgaagtcaggagttcgagaccagcctgaccaacatggtgaaaccccgtctctactaaaaaaaataatgataatacaaaaattagcccagcatggtggtgcatacctgtaatcccagctactcaggaggctgacgcaggagaatcacttgaacccgggaagcaaaggttgcagtcagctgagagcgcaccactgcactccagcctgggcgacagggcaagactctgtctcaaaaaaaaaaaaaaaaaaaaaaaaaagagatagtatgcaagaagacacctaaattttgagagaaataaccttgaagaaaatcttgttatcagagttttgaaagggagcacattaataggccttttatgaagataaataatgaaatgaggtatttaaagatctcagaaattgtaattttacaagtaaaataaatatagccaatttttcaatagctgaacttcacccaaaaggtaatgtttataagtagagcagaaaaaatgcagataaattttattttattgtttaaaaaataatgtgtagaatatataaattttttatgttactgttaatatacgagtgcttttggaagtttcacttttgtcactgattgtctacttttggtttgataatatgagctgcttttcaaattgttgaatggaaatgttcataactccctgcttgtccgtgcacaatgtaattctaaacctggcttgtttctcatttaaatatatctataaataaactt

SEQ ID NO: 8707 - protein, 824 aa, Homo sapiens
MAPEVIACEQQYDSSYDARCDVWSLGITAIELGDGDPPLFDMHPVKTLFKIPRNPPPTLLHPEKWCEEFNHFISQCLIKDFERRPSVTHLLDHPFIKGVHGKVLFLQKQLAKVLQDQKHQNPVAKTRHERMHTRRPYHVEDAEKYCLEDDLVNLEVLDEDTIIHQLQKRYADLLIYTYVGDILIALNPFQNLSIYSPQFSRLYHGVKRASNPPHIFASADAAYQCMVTLSKDQCIVISGESGSGKTESAHLIVQHLTFLGKANNQTLREKILQVNSLVEAFGNSCTAINDNSSRFGKYLEMMFTPTGVVMGARISEYLLEKSRVIKQAAREKNFHIFYYIYAGLHHQKKLSDFRLPEEKPPRYIADETGRVMHDITSKESYRRQFEAIQHCFRIIGFTDKEVHSVYRILAGILNIGNIEFAAISSQHQTDKSEVPNAEALQNAASVLCISPEELQEALTSHCVVTRGETIIRANTVDRAADVRDAMSKALYGRLFSWIVNRINTLLQPDENICSAGGGMNVGILDIFGFENFQRNSFEQLCINIANEQIQYYFNQHVFALEQMEYQNEGIDAVPVEYEDNRPLLDMFLQKPLGLLALLDEESRFPQATDQTLVDKFEDNLRCKYFWRPKGVELCFGIQHYAGKVLYDASGVLEKNRDTLPADVVVVLRTSENKLLQQLFSIPLTKTGNLAQTRARITVASSSLPPHFSAGKAKGTLQTKAVGHIPPSQQVRGEVPRFKTAASLVTIKFSGALYIVGAIHKQNPTMAVHRLQATLLLSQRKMGIHKPRVLQKGAISSQDMQTSTRFLGLICCLLGYAILLQISKD

SEQ ID NO: 8708 - DNA, 965 bp, Homo sapiens
ggtgttacctgggccaggtggggaaggtttgtttgcagagcaaagaagtgaaggaagtattaaccctttgcatggcctcctgagaatccgacaagacgtaaatagccaagaatatctgtgaaacttcatcactgagttacaatatttatcactgcaagtgtgttgttcattgacactataaagccatgtggaattaagcagccttgaaacacaaaatggagaaaggctaagagctgagaattgttgccttcagggaaatacaatcaatgtcaagcaaacaaccaccccaaaatggttagctttatcagcattcaggcctacagtgaacgcaaatgttccagatctgagtttcaatttttaaagaataaacatatgcaaatgaccattagtcttagtagttttagggctcagaatgatcttatcttgttaacattcagggcaactgcttatacccatttgaatgtcatttagagggctaggaaagactgcttcaacatttgatgactaaatggcagggctcagccacaatgctcactccgagaaatgagaaatagacacaccagtatgctagatgctgatgcagttcaggaaatgctaccccaaaatatggcccctcagcatactgagtattttaagcagaaggcaattaagaaaaccacaaaaacagaaaggtccctctgaccttctcccaccctctctctcttgaagatcctcatgtgacaggtgacctgccatataatcagaaggaagaaatgttacacagagaggctgagaagaatctgaggacttgctaagttttccccagtttattaccattagatcatatgccttttttgttcaatcatacttctatacaactgtccatcattcattaaacctaaccacaaaagtagttttcactcggtttttgagtgaaggctcctgtgtcacataaaacttacattaaataaatttgttccactttt

SEQ ID NO: 8709 - protein, 59 aa, Homo sapiens [sequence omitted]

SEQ ID NO: 8710 - DNA, 208 bp, Homo sapiens
aagcactgtggattctgcctctcagtgtccagacacccattttccttcccactgttccttccccatggagaagcctgtggctggctgacagcagagagagatgctcaacttggagaaggtgttacctgggccaggtggggaaggtttgtttgcagagcaaagaagtgaagatcctcatgtgacaggtgacctgccatataatcagaag

SEQ ID NO: 8711 - protein, 35 aa, Homo sapiens
MLNLEKVLPGPGGEGLFAEQRSEDPHVTGDLPYNQ

SEQ ID NO: 8712 - DNA, 385 bp, Homo sapiens
tttggaaaagtataaacctaaggcatcacctttacagaaaatatcttccacggaaacatctaaaggccacagatcagccctggggttcagagggatcctgacagctactcctcaagatcctctctgttgtgattcatccccccggggccctacagtttctccttcctgactcttacatttctttggatggcatcattatttacctgtctcctcccatagttaggtgccaagcactgtggattctgcctctcagtgtccagacacccattttccttcccactgttccttccccatggagaagcctgtggctggctgacagcagagagagatgctcaacttggagaaggtgttacctgggccaggtggggaaggtttgtttgcagag

SEQ ID NO: 8713 - protein, 93 aa, Homo sapiens
QLLLKILSVVIHPPGALQFLLPDSYISLDGIIIYLSPPIVRCQALWILPLSVQTPIFLPTVPSPWRSLWLADSRERCSTWRRCYLGQVGKVCL

SEQ ID NO: 8714 - DNA, 786 bp, Homo sapiens
ccttccttcctgccttccttcttccttcctcccttttttcttttctcccttccttccttcttaatatgtttttggccttttctttatatatgtggcctagcaatatcctgtgtttggaaaagtataaacctaaggcatcacctttacagaaaatatcttccacggaaacatctaaaggcaaaaatccttcaaattcaaatttatccaatcatttcttctgcttactaccatcctaaatcatttttctttagtaagatctattagtgtgaagctattaagctattaatgtatgtatcatattaatgtattaagacattaagtgaggaagtaaagttgcattcacaggccttgaacttttccacatctcgatttttacccatcatctctgcatagttccctaaggcagccttcaaatggtgatgtttcttataatccagagttcagaagtggcttctcttcaatctttctgtggaattctaaaccacgtgataaaggagctggtggctggtctcaaactcaggctcaaatgatccacccatcttggcctcccaaagtgttacgtgtgaaccactgcacctggccaaaaatattttactaagaaaaaggagtcacctattgtatgattccatttatatgaaatatccaaaataggccacagatcagccctggggttcagagggatcctgacagctactcctcaagatcctctctgttgtgattcatccccccggggccctacagtttctccttcctgactcttacatttctttggatggcatcattatt

SEQ ID NO: 8715 - protein, 38 aa, Homo sapiens
MVMFLIIQSSEVASLQSFCGILNHVIKELVAGLKLRLK

SEQ ID NO: 8716 - DNA, 840 bp, Homo sapiens
tctggggttcttgagaaaaatagagacactctccctgccgatgtggttgtggtcctgagaacgtcagaaaacaagcttcttcagcagctcttctcaatccctctgaccaaaacagctcccactttccagactattgaagagattaaaaagcatgaggagtagaataaggaggcccaaggtcaccaggagacagggctcctcccaggtttctgcagcccccttctgcttacacctggctgcatctggctgtggagctgcctgtgcctgagaggcacactctcactgcaaggttctcagtgaccttgtggtaaaaggaggcagccacagtcaatatgaattctctctgttctcttctcatgcttatgcagccagccttttgcctgcagatgggccacttcagacatgatgaaatgttctttgtaatacttcctattgataggaaatcctctgaagattttaggtgtgaaaatttgaagtagcagcaacactgctttctaacccttcggctgagacttttcaaactgaatgatctagatagaaaaacattaaaaggaaggatgttataacatggtttcaaggcatattttcctgtttgggtaatgttccacttgcaactagtaaactgagagaaaagcttaaaaggctcaggggaagaaagaaacagagtttcaaaaagaacttgaaaattcatttttgtctttgaatcatgaattctgacttccaaatagtagtttggggtgttaaagaagttatgaacttgggagaaactaggaaaaataagaatagcaccagagggaacattctctgaacctcaaagtttgatttttgcttcagaaccta

SEQ ID NO: 8717 - protein, 48 aa, Homo sapiens
MNSLCSLLMLMQPAFCLQMGHFRHDEMFFVILPIDRKSSEDFRCENLK

SEQ ID NO: 8718 - DNA, 453 bp, Homo sapiens
caggtggtgggccttttgatgacagctatggaaaagtctttccagaaaaatgcacgtgcacataaaattagaatgtttccaagatacgcatggaccctgtgaaacccactgaagattccatggccccagtctttctcaggctaacctctcaagctcttgaaggttataagagggattgatagtccatgattcaggtcttgagataaaaggcacgaacgtccctcccaaggggaaaccatgttgtgagagacccatgtatggctgaactaaacctgtgtgcatgtgagtgaagcagagcctcaagctccagatggatcttgagatggctgcagcctggcttgactgaaacctcatggatgacctcgagccagaacaaccgggctaaactgcttccagattcctgaccctcagaaacagtgaaataataaacgcttgttgttttaaactgctaaa

SEQ ID NO: 8719 - DNA, 630 bp, Homo sapiens
agcttgtccagagcatgctcatgtcttcatccagccctggaggtaccattgtcttaaagaaatctctgcgacagagtcaacatcatacactctaagctctagagctatattttgtaaaaacaaaaaaggtttccctgcttcactttgcctgcggacccccttctgatgaactccactcaggccttgttcctggagccctcttcctctggctgcaatccagagcaagttgctgtctggacttgttgaaaagctgttgtcctgagacttctcttcaaattctaaggaaaaatttactttttctcaggattctaaacccaatcaaataatcaagtgtaaaggcaaaatagatacaaaatgtaccttgcaaatactctaggaagctactggaagaaaggcttcagcaaataaaggaagtgtatgaagaaagaaagaagcatggcacattgctaccttaactaataaaaatctctgaactttccggtcccatctgaggaagcaaaaatgctacttgctgcaaaaacgacaccatttatcacactgcaacaaaagcaatgtataggcatgccttggggatatgtgagtttgattccagactacttcaataaaatgaatactgcaatgaagtcacac

SEQ ID NO: 8720 - protein, 42 aa, Homo sapiens
MLLAAKTTPFITLQQKQCIGMPWGYVSLIPDYFNKMNTAMKS

SEQ ID NO: 8721 - DNA, 653 bp, Homo sapiens
cctgagaatgtttcaaggtcaccaaaagctttctgaaaatgcctttctgcaaagaaggtttccaggtaccattgtcttaaagaaatctctgcgacagagtcaacatcatacactctaagctctagagctatattttgtaaaaacaaaaaaggtttccctgcttcactttgcctgcggacccccttctgatgaactccactcaggccttgttcctggagccctcttcctctggctgcaatccagagcaagttgctgtctggacttgttgaaaagctgttgtcctgagacttctcttcaaattctaaggaaaaatttactttttctcaggattctaaacccaatcaaataatcaagtgtaaaggcaaaatagatacaaaatgtaccttgcaaatactctaggaagctactggaagaaaggcttcagcaaataaaggaagtgtatgaagaaagaaagaagcatggcacattgctaccttaactaataaaaatctctgaactttccggtcccatctgaggaagcaaaaatgctacttgctgcaaaaacgacaccatttatcacactgcaacaaaagcaatgtataggcatgccttggggatatgtgagtttgattccagactacttcaataaaatgaatactgcaatgaagtcacac

SEQ ID NO: 8722 - protein, 36 aa, Homo sapiens
MFQGHQKLSENAFLQRRFPGTIVLKKSLRQSQHHTL

SEQ ID NO: 8723 - DNA, 4619 bp, Homo sapiens
cctgtctcccggacgaggacctcaaccccttcccccgctcggggaccccggccacccgcagcccggccgcgctgcgcccagaaacccatgagtcttcctcagcagctgtcgaaacttgccggcggttgcttgctcacctttgctgtctccccttcagaaaaggctggaggggagggcgaggaaggcttggcgtggggacgcccgtcgagtctctcagtgaggaatgagaggccagcttctcctgcggggtatgaaggaggaactgtatctcctatatatattaagtttcatttataaagacatcagagagcacctgagaatgtttcaaggtcaccaaaagctttctgaaaatgcctttctgcaaagaaggtttccagagatagaagataactcaggaagcttagaagaggtcaacctgggaagacaggattctttctccccacccgtggctctgcaggaagcaataccctcccctctgggcaaggtcgaccctccaagtccagatgagaagagttccctctgtctgctctttcctctgcctgatgacccagaggctttgcagctgtgatcctggcagcccctggccacctcagggagctgcagaattcaaaccctggaaatggagctctgcttgcagctgcacctggggcctgacctgcttaggacaggcctgtctggacctaagagaaccccactgccacccactcagctactccctaacagactgcagagaccaagtctttttcatttctttatatccattgatttctcgagttattgaaactcaatatttactgagcacctacaatgtgccaggcactgtgataggcactgaagaaagggcaaaggacgagcagataaatttcctacttgcagggaacaccgtggtagtgagtaaaatgagacattgcaaataaacacataaatatataatatgtcaactggcaataattgatgcgaagaatgattaagcaaaacaaggaaatgcagagacagggaaggagcatctatctggtatgaagtagtcagagaaggcctctctggtcagatgacatttgggcagaacctggggcctgtctcagcaccacctgttccttcctcggccacttgctccctgcagccaccaaaggcccctgtggttttcccgcctgaggctcaccagccacaggcctagaatatctggcttctctccccacgtccaaactcagctgaaatgccaaactgcaggaccttgtttcctgagcaactgccaatggggctgaatgatgcaactcggaaaggaagaggatttcattccccctgaatggactttgcaccagtgggagacaggaaacaggagattggaggatactgggcagctgaactgcctcaccctttccccctgccccgtctggtgcacaatttctccacacagcctgctgtgtgtggccaagcctgtgcgccgactgagtgttatgggttgaactatgttcctcagaaagatatgtcgaagtcctaacccccagtaactgtgaatgtggctttatagtatttggaaacagggtctttgctgatgcaatcaagttaagatgaagtcattaagggggtaggggcctaatccaatctcttgtccttagaaggagaaagacagagacacatcaggggaagatggtgaggtgacaatggaggcagagattggagcaatttatctaaatgctaggcaacgccacagagagctgcaaacaccaaggctagaagaggcagggaaggagcctcccctacaggtttcagagggagcatggcctcaccatacctttacttcagacttctagcatccagaactgtgacacaacacatttctgttgttctgagtgacaacagtgtgtggtgtgttattacagctgctctagaaactaacatatcgagcagccagctgtgtgggattgtacctcccaagtaaccctctaagacttaacctttgcccagggctctgtctctagagaactgtgacaatgataggtagacctgaataaagcgaaggatgatatctgcagggatatttgaggacagggagtgctgacaagggaggagccagtgcaaaggccccgaggtggcagtatgcttggtgtgttggaggagcaggaaggtgaccagggtgtttggggagtgaataaggggaagagtgctcagaggagaagtcagaggaggggccaaagacatgttctctagggccagaaaggcctttggatcttttcgacattatcttcttgacatgtaatttatatagtagtaaaatgaacaaaatgggtgactattttgtgaattttttagatacataaaaccacgtgatcactatccagatcaaatgttgaacatttccatcaccccagagagttcactcctgctaccttccagtcaatacaacttaccaatcctgaggcaaccagtactctctcttttatcatcataaatttgttttaacctgttccttaatggcatataaatgaaactacatagcatgcttttgctcaaaatagtgcttgtgaggttcatccaggttgctgtatgtatacttcaattattattattgctgagtagtattccattgcctggatatatcacaaattatttatccattcttctgctgaatatttgagttatttgcagtttaggcctataataaatgaagccgctaggaacatttatgtgttcctcttattttggttgcatgcaatcatttctcttggtataaacctagcagtgtattttctgggtcaactggcttaggtttaggttaactgtattcgtttacaccattttatactcccgtcagcaatatatgagttccaggtattctgcatcctcaccaacacttggagcctttctggtaggtgtgtagtggcattgcattgtgctttcaatatgcatttttctgctgactaatgcactcctttttatatgcctattattcacatatctccttttatgaagtaggtattcaagtcttttattcacattttatgttttgttatggccacatctcacttccagaatctgtattggttatctatcgcgcattaaaaaagtactctaaagcttgacagctaaaaacaacaaacattcattctctcacacagtctctgcaggtcaggaacctgggtgcagcttcatggggtggttctggctcagggtctcaggttgcatttgagctgctgtctgaggttacagccctacctatcaaagctgaaccagagccagactccatgtctaaactcacttatgtgagcttcagtgtgagaaatgtatgaattttgtttgatgaaatattgaaaagcttaacaacttcctcctactctcattggcctcttggtgcccagtatctgagtctgaaaaatctcatctataggaatcaatggcagcaaagacagaaccaaggtcccacggctattggggaggttggcagatgagtgaggaaaaaggggtgtcagcaatctaaaaatattcaggctcacagaaatataactgtttgaaatgactcacttttattaagatcctgccatctcacttaccagcttaaaaaaaaatagatcacagcagaatgtttcaaattctccataaatggccatttgatccagcaacctacctgtggaaatttatgccaagattagaatctacaaaatacatacagagatgcacattgaagtattatttattaggaatctaaattgtggaatcattaaagagaatacatattccctcaaaagaataccatggtgttattaaaagtagtcattatgagtggttaggatataatataatattacaggaaattcttaggatataccatcaagtagaaaaacttttcttcccagcttttcaatgtgaaaatgtttaaacctacaggaaagttgtaaggccagaacaataaatgcttgtatagccttcatctagattctccaacagtgaccacagttgccacatctctttaagtgtaatgctcatcctttgagagtaagtgcagacattttgataccatgctctaagtactacaacacctatctaaaattgtagaaggaaactcttctatgattttcacactcaagacatttaacactgatataaagtttatattcaaatttctccaaaagatttaaaactatctctttggcttgtgttatccaggactcaatggaggattgagcattgcatttagttgttgtgcctctttagttttttttgatctaaaacaatccctcaaccatttttaaaaattctttcatgacattgacatttttaaaagactctggaacagtcattttacagaatatccttcaatttggatgtgtctgtttcctcaagattagaaattacatgaacttcttggctaacttctccattttattttgtgttcaaaatatattactctttcccatgtcctgtgaaaataaaaaatctctaatgtgtttgtgaaaaagattaagctaagattttgtttggatgcagtgtgatttggacttaggtgtgtgtatctgaacttcatcctttgtcatcaaaagaatagtataataactaagaacatgtagcttaagaaatccaggcacttgagagccactgtaagtaaactctaattcccacagcag

SEQ ID NO: 8724 - protein, 114 aa, Homo sapiens
MRGQLLLRGMKEELYLLYILSFIYKDIREHLRMFQGHQKLSENAFLQRRFPEIEDNSGSLEEVNLGRQDSFSPPVALQEAIPSPLGKVDPPSPDEKSSLCLLFPLPDDPEALQL

SEQ ID NO: 8725 - DNA, 449 bp, Homo sapiens
aatgctactaaaatggctgctgcctctctgtttccttagaaacccatgagtcttcctcagcagctgtcgaaacttgccggcggttgcttgctcacctttgctgtctccccttcagaaaaggctggaggggagggcgaggaaggcttggcgtggggacgcccgtcgagtctctcagtgaggaatgagaggccagcttctcctgcggggtatgaaggaggaactgtatctcctatatatattaagtttcatttataaagacatcagagagcacctgagaatgtttcaaggtcaccaaaagctttctgaaaatgcctttctgcaaagaaggtttccagtactttcagggagagtgttaattggattggaaggaagacactgatgagctgctgggagtgagagtgagaccctcgaggagtccacagtgcattttaaggagtgtagctctgatg

SEQ ID NO: 8726 - protein, 69 aa, Homo sapiens
MSLPQQLSKLAGGCLLTFAVSPSEKAGGEGEEGLAWGRPSSLSVRNERPASPAGYEGGTVSPIYIKFHL

SEQ ID NO: 8727 - DNA, 4311 bp, Homo sapiens
gcggggagggcgggcctgtcgcagccgcgctggtcgccaggcgtccgggaggagcggggtccgcgcggcggacgaggcgggggcggaggcgcaggcagagcgagcgcgggaggtcgccgcagccagggacaccgcgcgccgccgctcaacatggtcgctgcgcacgctgcccattcttcctcctctgccgagtggatcgcctgcctggataaaagaccactggagcgatccagcgaagatgtggatataatcttcactcgactgaaagaagttaaagcttttgagaaatttcacccaaatctccttcatcagatttgcttatgtggttattatgagaatctggaaaagggaataacattatttcgccagggtgatattggaacaaactggtatgctgtcctggcagggtctttggatgttaaagtatctgagaccagcagtcaccaggatgctgtgaccatctgtaccctgggaattgggacggcctttggagagtccattctggacaacacaccccgccatgcaaccatcgttaccagggagagcagtgaactgctccgcatcgagcagaaggacttcaaggcactatgggagaaatatcgacagtatatggcaggacttctggctcctccttatggtgttatggaaacgggctctaacaatgacaggattcctgacaaggagaacacacctctcattgaacctcacgttcctcttcgtcctgctaacaccattaccaaggtcccttcagagaagatcctcagagctggaaaaattttacgaaatgccattctctctcgagcacctcacatgataagagatagaaaataccacctaaagacatacagacaatgctgtgtgggaactgaactggtggactggatgatgcagcagacaccatgtgttcactcccggactcaagctgttggcatgtggcaagtcctgttagaagatggtgttctcaaccacgtggaccaggagcaccatttccaagacaaatatttattctatcgatttctggatgatgagcacgaggatgcccctttgcctactgaggaggagaagaaggagtgtgatgaggagctccaggacaccatgctgctgctgtcacagatgggccccgacgcccacatgaggatgatccttcgcaaaccacctggccagaggactgtggatgacctagagattatctatgaggagcttcttcatattaaagccttatcccatctttctaccacagtgaaacgagagttagcaggtgttctcatttttgagtctcacgccaaaggagggactgtgttgtttaaccagggggaagaaggtacctcctggtacattattctaaaaggatcagtgaatgtagtcatttacggcaagggtgtggtctgcaccctgcatgaaggagatgacttcggcaagttagcactagtgaatgatgccccacgagctgcctctatcgtcttacgagaagataactgccatttcttaagagtagacaaggaggatttcaaccggatcctaagggacgtggaggcgaatacagtcagacttaaagaacatgaccaagatgtcttggtgctggagaaggtcccagcagggaacagagcttctaatcaaggaaactcacagcctcagcaaaagtatactgtgatgtcaggaacacctgaaaaaattttagagcattttctagaaacaatacgccttgaggcaactttaaatgaagcaacagattctgttttaaatgactttattatgatgcactgtgtttttatgccaaatacccagctttgcccggcactggtggcacctaccacgcacagccttcacaaggtacagaacaggagaaaatggattatgccctcaacaataagaggcgagtcatccgcctggttctacagtgggctgccatgtatggagacctcctgcaagaggatgacgtgtctatggccttcctggaggagttttatgtatctgtatcagatgatgcccggatgattgctgccctcaaggagcaactgccagagttggagaagattgtcaagcaaatctcagaagatgcaaaggcaccacaaaagaagcacaaggttcttttgcaacagttcaatacgggcgatgagagagcccagaagcgccagcctatccgcggctctgatgaagttctgtttaaggtctattgcatggaccacacctacacaaccattcgggtgccagtggccacttcggtgaaggaagtcatcagtgcagttgccgacaagctgggctccggggagggcctgatcatagtcaagatgagttccggaggagaaaaggtggtgctcaaacctaatgatgtttcagtatttacgacgctcaccattaatggacgcctgtttgcttgcccgcgagagcaattcgattcactgactcccttaccagaacaggaaggcccaactgttggaacagtgggaacttttgaactgatgagctccaaagatttagcataccagatgacaatttatgattgggaactcttcaactgcgtgcatgagctggagctaatctatcacacatttggaaggcataattttaaaaagaccacagcaaacttggatttgttcctgaggagatttaatgaaattcagttttgggtcgtcactgagatctgcctttgttctcagctcagcaagcgtgttcagctattaaaaaaatttattaagatagcagcccactgtaaggagtataaaaatctgaattccttttttgccatcgtcatgggactaagtaacgttgctgtgagccgcttggcactaacgtgggagaaactgccaagcaagttcaagaagttctatgcggagtttgaaagtttaatggacccttcaaggaaccacagggcctacaggctgacagtagctaagctggaacctcctctcatccccttcatgcctttgctcattaaagatatgacatttactcatgaggggaacaagacgttcattgacaatctagtaaactttgaaaaaatgcgcatgattgcaaatacggccagaacagtgagatactacaggagccaacccttcaatcctgatgcagctcaagctaataagaaccatcaggatgtccggagttatgtacggcaattaaatgtgattgacaaccagagaactttatcacagatgtcacacagattagagcctcgtcgaccatagacatttcaaatgcccaaagcaacagtttgtctccagtccacaatctttcaaaaatgccatttatgctactactgactgtattgccactagagaattctacaaaacaagcaaaaacacatcctgagacacctcagggctgcattcagcttaccagctacctagcaagagaaggaattatttgacatgcctaaagcttacacactctagcttaggaatccccagtttgtggctaccctgtttcatttccacttgtgccatcttctttgctgaagtgttgaataaggcccacgtgaagagtttggtagaaatagccttgtcaagagaactagcaagcccctgacatttttttctaagagtgtttatgggatgagatgtgctacaaatgggatagatttggataaaattttaactcaacatcttgatttggagcctggggtttcgggaaggtgttgaggaatctatagaagtccaaattataggttgtattcttccatcttcattgtcttacctctgaaggaatagaacctgaccacattattatgaaacattatggctgtttatgtaatttagggaggactggtctgtaatttctgaatgtatatagaataatatttatgtttacaatgtaacttttcaaaatttacaaatcaggattatatacataagaattccactaagaaatgccaagattcttaaatttgccagcgttaaagtagaaaataacatttcagaagagcacaatatgcataaaacatttttcaaaattgaaatattttcctgggcattaaaaacctttactattggctacaaatttattgtacctgatgaaaacatattttctggacttaaatgttattacaaatatcttaattttcagtaattgttttgcactttcaaagattgtaaatagttcattcaatcaatggtatggagttatttatttgctacataatagatactgtgccaaataattactttttatttattttatttagtacgtaattttgaagtacattttttcctgttttcacaattagactacatttaatgtgtaggaattgtatgtatgtatatcttctgtaaataacatctagtatcttcactaaatataattgtcgacaagaaa

SEQ ID NO: 8728 - protein, 614 aa, Homo sapiens
MVAAHAAHSSSSAEWIACLDKRPLERSSEDVDIIFTRLKEVKAFEKFHPNLLHQICLCGYYENLEKGITLFRQGDIGTNWYAVLAGSLDVKVSETSSHQDAVTICTLGIGTAFGESILDNTPRHATIVTRESSELLRIEQKDFKALWEKYRQYMAGLLAPPYGVMETGSNNDRIPDKENTPLIEPHVPLRPANTITKVPSEKILRAGKILRNAILSRAPHMIRDRKYHLKTYRQCCVGTELVDWMMQQTPCVHSRTQAVGMWQVLLEDGVLNHVDQEHHFQDKYLFYRFLDDEHEDAPLPTEEEKKECDEELQDTMLLLSQMGPDAHMRMILRKPPGQRTVDDLEIIYEELLHIKALSHLSTTVKRELAGVLIFESHAKGGTVLFNQGEEGTSWYIILKGSVNVVIYGKGVVCTLHEGDDFGKLALVNDAPRAASIVLREDNCHFLRVDKEDFNRILRDVEANTVRLKEHDQDVLVLEKVPAGNRASNQGNSQPQQKYTVMSGTPEKILEHFLETIRLEATLNEATDSVLNDFIMMHCVFMPNTQLCPALVAPTTHSLHKVQNRRKWIMPSTIRGESSAWFYSGLPCMETSCKRMTCLWPSWRSFMYLYQMMPG

SEQ ID NO: 8729 - DNA, 4107 bp, Homo sapiens
cttttaaaccaagcggaagcctgcttcgatgacttggacttatgtctgcaccagggtctcattcctgtgtcttcaagcttttccatggagtggcaaaatgattcaaatccagaaaggaagggagtgaagttattaggagctaactaaagttaaaaaaaaaaaaaaaaaaaaaaaaggaagtgttttcttattgccttagactgcctgagctttcctggagaaccatcagcaccagtttcctttctgtggactgagagccactcagtagtagacacgaacagggaatgaacggcaatgaaggtacattttgctgatcaaataaaggatagatgctcactggatgtctgagaactttgagagaccgaaaaagaaggacgtatgctctacaagaaatatcgacagtatatggcaggacttctggctcctccttatggtgttatggaaacgggctctaacaatgacaggattcctgacaaggagaacacacctctcattgaacctcacgttcctcttcgtcctgctaacaccattaccaaggtcccttcagagaagatcctcagagctggaaaaattttacgaaatgccattctctctcgagcacctcacatgataagagatagaaaataccacctaaagacatacagacaatgctgtgtgggaactgaactggtggactggatgatgcagcagacaccatgtgttcactcccggactcaagctgttggcatgtggcaagtcctgttagaagatggtgttctcaaccacgtggaccaggagcaccatttccaagacaaatatttattctatcgatttctggatgatgagcacgaggatgcccctttgcctactgaggaggagaagaaggagtgtgatgaggagctccaggacaccatgctgctgctgtcacagatgggccccgacgcccacatgaggatgatccttcgcaaaccacctggccagaggactgtggatgacctagagattatctatgaggagcttcttcatattaaagccttatcccatctttctaccacagtgaaacgagagttagcaggtgttctcatttttgagtctcacgccaaaggagggactgtgttgtttaaccagggggaagaaggtacctcctggtacattattctaaaaggatcagtgaatgtagtcatttacggcaagggtgtggtctgcaccctgcatgaaggagatgacttcggcaagttagcactagtgaatgatgccccacgagctgcctctatcgtcttacgagaagataactgccatttcttaagagtagacaaggaggatttcaaccggatcctaagggacgtggaggcgaatacagtcagacttaaagaacatgaccaagatgtcttggtgctggagaaggtcccagcagggaacagagcttctaatcaaggaaactcacagcctcagcaaaagtatactgtgatgtcaggaacacctgaaaaaattttagagcattttctagaaacaatacgccttgaggcaactttaaatgaagcaacagattctgttttaaatgactttattatgatgcactgtgtttttatgccaaatacccagctttgcccggcactggtggcacctaccacgcacagccttcacaaggtacagaacaggagaaaatggattatgccctcaacaataagaggcgagtcatccgcctggttctacagtgggctgccatgtatggagacctcctgcaagaggatgacgtgtctatggccttcctggaggagttttatgtatctgtatcagatgatgcccggatgattgctgccctcaaggagcaactgccagagttggagaagattgtcaagcaaatctcagaagatgcaaaggcaccacaaaagaagcacaaggttcttttgcaacagttcaatacgggcgatgagagagcccagaagcgccagcctatccgcggctctgatgaagttctgtttaaggtctattgcatggaccacacctacacaaccattcgggtgccagtggccacttcggtgaaggaagtcatcagtgcagttgccgacaagctgggctccggggagggcctgatcatagtcaagatgagttccggaggagaaaaggtggtgctcaaacctaatgatgtttcagtatttacgacgctcaccattaatggacgcctgtttgcttgcccgcgagagcaattcgattcactgactcccttaccagaacaggaaggcccaactgttggaacagtgggaacttttgaactgatgagctccaaagatttagcataccagatgacaatttatgattgggaactcttcaactgcgtgcatgagctggagctaatctatcacacatttggaaggcataattttaaaaagaccacagcaaacttggatttgttcctgaggagatttaatgaaattcagttttgggtcgtcactgagatctgcctttgttctcagctcagcaagcgtgttcagctattaaaaaaatttattaagatagcagcccactgtaaggagtataaaaatctgaattccttttttgccatcgtcatgggactaagtaacgttgctgtgagccgcttggcactaacgtgggagaaactgccaagcaagttcaagaagttctatgcggagtttgaaagtttaatggacccttcaaggaaccacagggcctacaggctgacagtagctaagctggaacctcctctcatccccttcatgcctttgctcattaaagatatgacatttactcatgaggggaacaagacgttcattgacaatctagtaaactttgaaaaaatgcgcatgattgcaaatacggccagaacagtgagatactacaggagccaacccttcaatcctgatgcagctcaagctaataagaaccatcaggatgtccggagttatgtacggcaattaaatgtgattgacaaccagagaactttatcacagatgtcacacagattagagcctcgtcgaccatagacatttcaaatgcccaaagcaacagtttgtctccagtccacaatctttcaaaaatgccatttatgctactactgactgtattgccactagagaattctacaaaacaagcaaaaacacatcctgagacacctcagggctgcattcagcttaccagctacctagcaagagaaggaattatttgacatgcctaaagcttacacactctagcttaggaatccccagtttgtggctaccctgtttcatttccacttgtgccatcttctttgctgaagtgttgaataaggcccacgtgaagagtttggtagaaatagccttgtcaagagaactagcaagcccctgacatttttttctaagagtgtttatgggatgagatgtgctacaaatgggatagatttggataaaattttaactcaacatcttgatttggagcctggggtttcgggaaggtgttgaggaatctatagaagtccaaattataggttgtattcttccatcttcattgtcttacctctgaaggaatagaacctgaccacattattatgaaacattatggctgtttatgtaatttagggaggactggtctgtaatttctgaatgtatatagaataatatttatgtttacaatgtaacttttcaaaatttacaaatcaggattatatacataagaattccactaagaaatgccaagattcttaaatttgccagcgttaaagtagaaaataacatttcagaagagcacaatatgcataaaacatttttcaaaattgaaatattttcctgggcattaaaaacctttactattggctacaaatttattgtacctgatgaaaacatattttctggacttaaatgttattacaaatatcttaattttcagtaattgttttgcactttcaaagattgtaaatagttcattcaatcaatggtatggagttatttatttgctacataatagatactgtgccaaataattactttttatttattttatttagtacgtaattttgaagtacattttttcctgttttcacaattagactacatttaatgtgtaggaattgtatgtatgtatatcttctgtaaataacatctagtatcttcactaaatataattgtcgacaagaaa

SEQ ID NO: 8730 - protein, 470 aa, Homo sapiens
MLYKKYRQYMAGLLAPPYGVMETGSNNDRIPDKENTPLIEPHVPLRPANTITKVPSEKILRAGKILRNAILSRAPHMIRDRKYHLKTYRQCCVGTELVDWMMQQTPCVHSRTQAVGMWQVLLEDGVLNHVDQEHHFQDKYLFYRFLDDEHEDAPLPTEEEKKECDEELQDTMLLLSQMGPDAHMRMILRKPPGQRTVDDLEIIYEELLHIKALSHLSTTVKRELAGVLIFESHAKGGTVLFNQGEEGTSWYIILKGSVNVVIYGKGVVCTLHEGDDFGKLALVNDAPRAASIVLREDNCHFLRVDKEDFNRILRDVEANTVRLKEHDQDVLVLEKVPAGNRASNQGNSQPQQKYTVMSGTPEKILEHFLETIRLEATLNEATDSVLNDFIMMHCVFMPNTQLCPALVAPTTHSLHKVQNRRKWIMPSTIRGESSAWFYSGLPCMETSCKRMTCLWPSWRSFMYLYQMMPG

SEQ ID NO: 8731 - DNA, 1781 bp, Homo sapiens
caaaaatgtgaaggtagaatattttgacttgctgttcagccaataaaatctcatacctcattagtgagtcttatttactgtgaggaacttgataagctaacccttctccacatctaggatagttacagattctcttacaaattcatggcaacctcaagaaaggatggtgaaaaagcactaatgtacagtctcaggcatgatagatgttttttacatcatggggaatatgccaacaattatgagagttatgccattaatattccttacctgaaaatgccttgtatgtatgtgggtacccctttgaaataattaaacaagttatacatcagctagttgccttcagatagtcaacatctcagaacatgtcacttctcatggtaccaagtattgcagaaatggtttgttttcctttttggattgtactctacgcttacttgaatttctatctttcttttttctatattccttttagcgcatgattgcaaatacggccagaacagtgagatactacaggagccaacccttcaatcctgatgcagctcaagctaataagaaccatcaggatgtccggagttatgtacggcaattaaatgtgattgacaaccagagaactttatcacagatgtcacacagattagagcctcgtcgaccatagacatttcaaatgcccaaagcaacagtttgtctccagtccacaatctttcaaaaatgccatttatgctactactgactgtattgccactagagaattctacaaaacaagcaaaaacacatcctgagacacctcagggctgcattcagcttaccagctacctagcaagagaaggaattatttgacatgcctaaagcttacacactctagcttaggaatccccagtttgtggctaccctgtttcatttccacttgtgccatcttctttgctgaagtgttgaataaggcccacgtgaagagtttggtagaaatagccttgtcaagagaactagcaagcccctgacatttttttctaagagtgtttatgggatgagatgtgctacaaatgggatagatttggataaaattttaactcaacatcttgatttggagcctggggtttcgggaaggtgttgaggaatctatagaagtccaaattataggttgtattcttccatcttcattgtcttacctctgaaggaatagaacctgaccacattattatgaaacattatggctgtttatgtaatttagggaggactggtctgtaatttctgaatgtatatagaataatatttatgtttacaatgtaacttttcaaaatttacaaatcaggattatatacataagaattccactaagaaatgccaagattcttaaatttgccagcgttaaagtagaaaataacatttcagaagagcacaatatgcataaaacatttttcaaaattgaaatattttcctgggcattaaaaacctttactattggctacaaatttattgtacctgatgaaaacatattttctggacttaaatgttattacaaatatcttaattttcagtaattgttttgcactttcaaagattgtaaatagttcattcaatcaatggtatggagttatttatttgctacataatagatactgtgccaaataattactttttatttattttatttagtacgtaattttgaagtacattttttcctgttttcacaattagactacatttaatgtgtaggaattgtatgtatgtatatcttctgtaaataacatctagtatcttcactaaatataattgtcgacaagaaa

SEQ ID NO: 8732 - protein, 59 aa, Homo sapiens
MIANTARTVRYYRSQPFNPDAAQANKNHQDVRSYVRQLNVIDNQRTLSQMSHRLEPRRP

SEQ ID NO: 8733 - DNA, 7182 bp, Homo sapiens
gactgtcttcctcattggcgccgtgcagagaggcggaatgttcaactcctaactgcagcggaaacgtgggagccgcgcgggccgctgtcgtcccaacccccgccgccctcgtcgcgcgcggggcctccgcgcccccggctgctgctcacgccccgcccgggagccagattttgtggaagtataatactttgtcattatgagatgtcgtctctcggtgcctcctttgtgcaaattaaatttgatgacttgcagttttttgaaaactgcggtggaggaagttttgggagtgtttatcgagccaaatggatatcacaggacaaggaggtggctgtaaagaagctcctcaaaatagagaaagaggcagaaatactcagtgtcctcagtcacagaaacatcatccagttttatggagtaattcttgaacctcccaactatggcattgtcacagaatatgcttctctgggatcactctatgattacattaacagtaacagaagtgaggagatggatatggatcacattatgacctgggccactgatgtagccaaaggaatgcattatttacatatggaggctcctgtcaaggtgattcacagagacctcaagtcaagaaacgttgttatagctgctgatggagtattgaagatctgtgactttggtgcctctcggttccataaccatacaacacacatgtccttggttggaactttcccatggatggctccagaagttatccagagtctccctgtgtcagaaacttgtgacacatattcctatggtgtggttctctgggagatgctaacaagggaggtcccctttaaaggtttggaaggattacaagtagcttggcttgtagtggaaaaaaacgagagattaaccattccaagcagttgccccagaagttttgctgaactgttacatcagtgttgggaagctgatgccaagaaacggccatcattcaagcaaatcatttcaatcctggagtccatgtcaaatgacacgagccttcctgacaagtgtaactcattcctacacaacaaggcggagtggaggtgcgaaattgaggcaactcttgagaggctaaagaaactagagcgtgatctcagctttaaggagcaggagcttaaagaacgagaaagacgtttaaagatgtgggagcaaaagctgacagagcagtccaacaccccgcttctcttgcctcttgctgcaagaatgtctgaggagtcttactttgaatctaaaacagaggagtcaaacagtgcagagatgtcatgtcagatcacagcaacaagtaacggggagggccatggcatgaacccaagtctgcaggccatgatgctgatgggctttggggatatcttctcaatgaacaaagcaggagctgtgatgcattctgggatgcagataaacatgcaagccaagcagaattcttccaaaaccacatctaagagaagggggaagaaagtcaacatggctctggggttcagtgattttgacttgtcagaaggtgacgatgatgatgatgatgacggtgaggaggaggataatgacatggataatagtgaatgaaagcagaaagcaaagtaataaaatcacaaatgtttggaaaacacaaaagtaacttgtttatctcagtctgtacaaaaacagtaaggaggcagaaagccaagcactgcatttttaggccaatcacatttacatgaccgtaatttcttatcaattctacttttatttttgcttacagaaaaacggggggagaattaagccaaagaagtatatttatgaatcagcaaatgtggtgcctgattatagaaatttgtgatcctatatacaatataggacttttaaagttgtgacattctggctttttcttttaatgaatactttttagtttgtatttgactttatttcctttattcaaatcatttttaaaaacttacattttgaacaaacactcttaactcctaattgttctttgacacgtagtaattctgtgacatactttttttttcttatagcaatacactgtaatatcagaaatggttggcctgagcaacctagtaagacctcgtctctactaataattaaaaaactagctggcatggtagcacacacctgtagtcccagatacttgggaggccaaggcaggaggattgcttgagacctagcaatcagtcagggctgcagtgagccatgatggcaccactgcactctagcctgggcaagagaacaagatcctgtctcaaaaaacaaaaaaaagaaagaattgatagtacaaaatccaacaacaatactgagatgatctaagaaggttataacaaaatgctcttcagaaatacctaagtgctgagaatttttagtactaaagagcacagctgctcaaagtaaagcctgagcagtgttctcagtaatgtatttgaaggaaaaataccctgatttgaaaccaacagcagatgttgcaaactttcataccactgctggccatggaagcctcttaacaacacactgtcatttaaggctgtgcttgtgctttatacaaagagaaagaggtggtcttaaggggatgcttccaggggggtgagttcatgcctctcctgtattttccagcaagtggggtatgtgtggtggtttgttttttagaggggcataataatccaggattctaagcatatgctcagctattttaaagaggaaattaaatattataaaagaaatagtaaagataagttatcctcacttaggcaaaagcacaggtcctttccatatcaagtttagcctaccagggttgttttttgttttaaccctgcttaataatgttggtgttttagaagtagatacaggcactgctctgaaaacctggctagccaaggatattctcagaatgttatcacctgtttgtcaaagcttgtttaaattataaaacacttttaattatatatatgaggcaaaagaactaagacttttttcaaactaaattagaaaggagtgtcattatttgactgttaaaccaaaatatttttggtgggtctttttatggaagtttaaagaaaggacatcatcatagatatgatctaacagtatttctaactatatttgatcattaaaagcctcttggaatttgaagcgtgacgtgtttctaatgccccttgagaggtgaaaaataccacataatgatcagtatgctgtgccagcttcatttggggagaaataactagtagaaagttctgggtgtgaggtgtacagcagtctaggtggcatagtgatgaagaaagggatcagagtctgactgtcactcagaatcctgggctcagttgcttgacaaccttgggaaaattgttttatctttgtgcgtctgtttgctgatcttcagcgtgggaataataacagtacctacttgaaaggatcattgtgcggattaaaagaaataatatatgtaaagcactttaacacagcaccaggcccacggaaagtggctaatgttagctactatgaatggtgccagtgaagacactgaaaaataagtgatttcagtaaccttctggaaagctatcagtttcaaataatattttctctgtagtatgagatgaaattaaaagtggatagctttcaggaaagataaagagaacatgcttagaatgtaagctaaacagattttttctgttgctctttgaaaactatgagccctggccagcttaacctggtctgaggtgagactaaacacaaaaacagtagataaatctctccctaaaagatggattcccccacatacccatgctactagtttctctgtctattcacacatatgtacaaatacatgaacacagcctgtctgtgctcagacatagagaagtactacctgacttgagtcaatgcacccaagaagaaaagcttggagtagagcagaagggagggcttgggactcctgtctttccagcatgccctggggtgcagtggtcagccacctgaagagagagccaatagcatggggtttacaaggcaaagatagtcattcattcaacacatattcatagagctccttctctgtgccagacactgttctggaagatagctagatgaaaatctttgcactcacagagcttacatgccagtgagtgaagatcgatgataaataaagcaaatgcatcatatgttcacatttgataagtatatgccaaaaaatgaagccgggaaggaggacaaggcccatgggtgggtgttgaggtttttaaagtgtggtcaggaaaggccccactgataaggtaacatttgagcaagtctgaaaaaggcaaggggatctttggggctaacttcgggatccctgcactttatgtaagaatgtaaacctggagtctcatttaagaatgatcagcaatacgtttagaacatatgaactgaatgaaatggacattttttcttaatttatgtataaatccatatgattatacataaagttctgatgcattaataaaagcagccaaatagggccaaagagaaaaataacaggactctgtactggacctaactttatcattaattaggtaatattttcctcatttctttactgctgccattttcctcaccagtattccagagatggtcatagctcattactctaccaccaagaacctaaaaggaattagaatacagcagaattggcctcagtgaagagcttaaaattgttctcctcgtagaactggactattgatcattaccacgtgacgttggctctattactttctgttcccaatgtccttctagtggtttgaaaatgttaaaacatccctaaaatctaaatcatataatcagaattctatagtgtcccactctatctgtaaagatcatttggaagactttagactctattaattttaaaaggaatatttattagccatatgcagaatttctaatgatgatattgtacagcttctaattcacttttcagatcagtgtttgaaatggcaattatcagtgttggatttagttccaactacttgatttacaaaaatgtacatttagaggttaaaagaaacagtgagaaatgtaaacattcaaaatgataattgaatctctcagttgtgggaataattatcagagacatgcaactgaaaatgtctcacctttcatctttttttcttaattcataaagttatcttgtagaatttgatgagaccctccctagtcattctcaactggggcggtgctgtcaccgaatggtgtttgagagtgttggggctagggcacatttttggttgtcacagcaactggggtggcatttgctgcccagtgccaggaatagtaacattatgaatgccagggacagtgtgctcagtaaagtcttccatccaaaaggggcagggcacggtggctcacgcctgtaatcccagcactttgggaggccaaggtgggcggatcacctgatgtcaggggttcgagaccagcctggccaacatggtgaaaccctgttgctactaaaaatacaaaaattggctgggtgtggtgtcacatgccagtaaccccagctactagggaggctgaggcaggagaatcacttgaacccgggaggcagaggttgcagtgagctgagattgcaccactacactccagcctggatgacagagtgagacttcatctcaaaaaaaaaaaaaaacaaaaaaaaacaacccggtagcattgtcccttccccactgacaaacttatcaaatccagaagctttagagtttcgtctctaattatttttctcctgaacaaaattacccaagtcaaaacaaaatgtatttttagaattacggcagcatacgacctgaattttgtgagtttcgtggctttatcttaaatcaccatttccctaaaaatggtttctttctccttagaaatgctggtggcaacttgatgaaacagccaaatgcaccagggcaggtcactttcccattacactgattccacaattaaaaaaaaaaaagaaaaaaaactcattgagatagctacagttctataggttaatttaaagcctcctttttctactcatttttgaaagcaaaattacattttactattttacataaccagtgaaaagacgttgaaagcctacagctcactgtttttggtgctctggaaatgttgagggtgggtttttaaccagtgatttttaacgtgcagtgaatttgttagacttttaaacaccagctaaggtagtcaaacttgatccccattaaaaatcaaggaattaggggtcgggggagggtttaggagtgatccagaatgacctcccagaattactgtgcgtacaactttatttttcagagttttcattggaatggtaagagttttatgaaagacagttttaaaacttattctgagttaaatattaatactttaaaaaattattgtactagacttattgcagccttttgaaagtagcagagtttcatcataccacatatataacagagcataaattttctataatcaggcaccttttgctgcttttgagtaagactgttttcctgtttaagtgttaagcatcgccagacataaaaatctattctctcctctcgattgtagcatagcctgacagctctagatacagcatttctatgatgaaaaatgagtatccatcaggaaatctagaagactagccgtgttttctcagactccacctttgtttgcactctgttgcctgtgaggagctttctggcatgtgattatttacttcaaaactagagttccaagcacctacattaattattttatattgtgtgcagaatagtatatcttttaatgtcagatatgatacactgcacatattgcttttgcactcttaaaatttttgtactaaataatagaaaatatttatattctttgagtgtgagctttgaatagatggcattatcactttattgtttttttaacaaaaactttttctcaattattctattgcaatgttattctgagcaagtcctatgccaaatatcttgtataatgtttgtatggaagattaaattttactcttgtgtggtaagactatttcagttactgattttatagttggaatttgatattccagcacaaagtccacagtgtattcagaaatccaagttggtgtcatacatttcattttgatgtgaacttttctttgctttcctttgttctaagactccattttgcaataaacgttttgacagt

SEQ ID NO: 8734 - protein, 455 aa, Homo sapiens; identical to SEQ ID NO: 682

SEQ ID NO: 8735 - DNA, 7197 bp, Homo sapiens
gactgtcttcctcattggcgccgtgcagagaggcggaatgttcaactcctaactgcagcggaaacgtgggagccgcgcgggccgctgtcgtcccaacccccgccgccctcgtcgcgcgcggggcctccgcgcccccggctgctgctcacgccccgcccgggagccagattttgtggaagtataatactttgtcattatgagatgtcgtctctcggtgcctcctttgtgcaaattaaatttgatgacttgcagttttttgaaaactgcggtggaggaagttttgggagtgtttatcgagccaaatggatatcacaggacaaggaggtggctgtaaagaagctcctcaaaatagagaaagaggcagaaatactcagtgtcctcagtcacagaaacatcatccagttttatggagtaattcttgaacctcccaactatggcattgtcacagaatatgcttctctgggatcactctatgattacattaacagtaacagaagtgaggagatggatatggatcacattatgacctgggccactgatgtagccaaaggaatgcattatttacatatggaggctcctgtcaaggtgattcacagagacctcaagtcaagaaacgttgttatagctgctgatggagtattgaagatctgtgactttggtgcctctcggttccataaccatacaacacacatgtccttggttggaactttcccatggatggctccagaagttatccagagtctccctgtgtcagaaacttgtgacacatattcctatggtgtggttctctgggagatgctaacaagggaggtcccctttaaaggtttggaaggattacaagtagcttggcttgtagtggaaaaaaacgagagattaaccattccaagcagttgccccagaagttttgctgaactgttacatcagtgttgggaagctgatgccaagaaacggccatcattcaagcaaatcatttcaatcctggagtccatgtcaaatgacacgagccttcctgacaagtgtaactcattcctacacaacaaggcggagtggaggtgcgaaattgaggcaactcttgagaggctaaagaaactagagcgtgatctcagctttaaggagcaggagcttaaagaacgagaaagacgtttaaagatgtgggagcaaaagctgacagagcagtccaacaccccgcttctcttgcctcttgctgcaagaatgtctgaggagtcttactttgaatctaaaacagaggagtcaaacagtgcagagatgtcatgtcagatcacagcaacaagtaacggggagggccatggcatgaacccaagtctgcaggccatgatgctgatgggctttggggatatcttctcaatgaacaaagcaggagctgtgatgcattctgggatgcagataaacatgcaagccaagcagaattcttccaaaaccacatctaagagaagggggaagaaagtcaacatggctctggggttcagtgattttgacttgtcagaaggtgacgatgatgatgatgatgacggtgaggaggaggataatgacatggataatagtgaatgaaagcagaaagcaaagtaataaaatcacaaatgtttggaaaacacaaaagtaacttgtttatctcagtctgtacaaaaacagtaaggaggcagaaagccaagcactgcatttttaggccaatcacatttacatgaccgtaatttcttatcaattctacttttatttttgcttacagaaaaacggggggagaattaagccaaagaagtatatttatgaatcagcaaatgtggtgcctgattatagaaatttgtgatcctatatacaatataggacttttaaagttgtgacattctggctttttcttttaatgaatactttttagtttgtatttgactttatttcctttattcaaatcatttttaaaaacttacattttgaacaaacactcttaactcctaattgttctttgacacgtagtaattctgtgacatactttttttttcttatagcaatacactgtaatatcagaaatggttggcctgagcaacctagtaagacctcgtctctactaataattaaaaaactagctggcatggtagcacacacctgtagtcccagatacttgggaggccaaggcaggaggattgcttgagacctagcaatcagtcagggctgcagtgagccatgatggcaccactgcactctagcctgggcaagagaacaagatcctgtctcaaaaaacaaaaaaaagaaagaattgatagtacaaaatccaacaacaatactgagatgatctaagaaggttataacaaaatgctcttcagaaatacctaagtgctgagaatttttagtactaaagagcacagctgctcaaagtaaagcctgagcagtgttctcagtaatgtatttgaaggaaaaataccctgatttgaaaccaacagcagatgttgcaaactttcataccactgctggccatggaagcctcttaacaacacactgtcatttaaggctgtgcttgtgctttatacaaagagaaagaggtggtcttaaggggatgcttccaggggggtgagttcatgcctctcctgtattttccagcaagtggggtatgtgtggtggtttgttttttagaggggcataataatccaggattctaagcatatgctcagctattttaaagaggaaattaaatattataaaagaaatagtaaagataagttatcctcacttaggcaaaagcacaggtcctttccatatcaagtttagcctaccagggttgttttttgttttaaccctgcttaataatgttggtgttttagaagtagatacaggcactgctctgaaaacctggctagccaaggatattctcagaatgttatcacctgtttgtcaaagcttgtttaaattataaaacacttttaattatatatatgaggcaaaagaactaagacttttttcaaactaaattagaaaggagtgtcattatttgactgttaaaccaaaatatttttggtgggtctttttatggaagtttaaagaaaggacatcatcatagatatgatctaacagtatttctaactatatttgatcattaaaagcctcttggaatttgaagcgtgacgtgtttctaatgccccttgagaggtgaaaaataccacataatgatcagtatgctgtgccagcttcatttggggagaaataactagtagaaagttctgggtgtgaggtgtacagcagtctaggtggcatagtgatgaagaaagggatcagagtctgactgtcactcagaatcctgggctcagttgcttgacaaccttgggaaaattgttttatctttgtgcgtctgtttgctgatcttcagcgtgggaataataacagtacctacttgaaaggatcattgtgcggattaaaagaaataatatatgtaaagcactttaacacagcaccaggcccacggaaagtggctaatgttagctactatgaatggtgccagtgaagacactgaaaaataagtgatttcagtaaccttctggaaagctatcagtttcaaataatattttctctgtagtatgagatgaaattaaaagtggatagctttcaggaaagataaagagaacatgcttagaatgtaagctaaacagattttttctgttgctctttgaaaactatgagccctggccagcttaacctggtctgaggtgagactaaacacaaaaacagtagataaatctctccctaaaagatggattcccccacatacccatgctactagtttctctgtctattcacacatatgtacaaatacatgaacacagcctgtctgtgctcagacatagagaagtactacctgacttgagtcaatgcacccaagaagaaaagcttggagtagagcagaagggagggcttgggactcctgtctttccagcatgccctggggtgcagtggtcagccacctgaagagagagccaatagcatggggtttacaaggcaaagatagtcattcattcaacacatattcatagagctccttctctgtgccagacactgttctggaagatagctagatgaaaatctttgcactcacagagcttacatgccagtgagtgaagatcgatgataaataaagcaaatgcatcatatgttcacatttgataagtatatgccaaaaaatgaagccgggaaggaggacaaggcccatgggtgggtgttgaggtttttaaagtgtggtcaggaaaggccccactgataaggtaacatttgagcaagtctgaaaaaggcaaggggatctttggggctaacttcgggatccctgcactttatgtaagaatgtaaacctggagtctcatttaagaatgatcagcaatacgtttagaacatatgaactgaatgaaatggacattttttcttaatttatgtataaatccatatgattatacataaagttctgatgcattaataaaagcagccaaatagggccaaagagaaaaataacaggactctgtactggacctaactttatcattaattaggtaatattttcctcatttctttactgctgccattttcctcaccagtattccagagatggtcatagctcattactctaccaccaagaacctaaaaggaattagaatacagcagaattggcctcagtgaagagcttaaaattgttctcctcgtagaactggactattgatcattaccacgtgacgttggctctattactttctgttcccaatgtccttctagtggtttgaaaatgttaaaacatccctaaaatctaaatcatataatcagaattctatagtgtcccactctatctgtaaagatcatttggaagactttagactctattaattttaaaaggaatatttattagccatatgcagaatttctaatgatgatattgtacagcttctaattcacttttcagatcagtgtttgaaatggcaattatcagtgttggatttagttccaactacttgatttacaaaaatgtacatttagaggttaaaagaaacagtgagaaatgtaaacattcaaaatgataattgaatctctcagttgtgggaataattatcagagacatgcaactgaaaatgtctcacctttcatctttttttcttaattcataaagttatcttgtagaatttgatgagaccctccctagtcattctcaactggggcggtgctgtcaccgaatggtgtttgagagtgttggggctagggcacatttttggttgtcacagcaactggggtggcatttgctgcccagtgccaggaatagtaacattatgaatgccagggacagtgtgctcagtaaagtcttccatccaaaaggggcagggcacggtggctcacgcctgtaatcccagcactttgggaggccaaggtgggcggatcacctgatgtcaggggttcgagaccagcctggccaacatggtgaaaccctgttgctactaaaaatacaaaaattggctgggtgtggtgtcacatgccagtaaccccagctactagggaggctgaggcaggagaatcacttgaacccgggaggcagaggttgcagtgagctgagattgcaccactacactccagcctggatgacagagtgagacttcatctcaaaaaaaaaaaaaaacaaaaaaaaacaacccggtagcattgtcccttccccactgacaaacttatcaaatccagaagctttagagtttcgtctctaattatttttctcctgaacaaaattacccaagtcaaaacaaaatgtatttttagaattacggcagcatacgacctgaattttgtgagtttcgtggctttatcttaaatcaccatttccctaaaaatggtttctttctccttagaaatgctggtggcaacttgatgaaacagccaaatgcaccagggcaggtcactttcccattacactgattccacaattaaaaaaaaaaaagaaaaaaaactcattgagatagctacagttctataggttaatttaaagcctcctttttctactcatttttgaaagcaaaattacattttactattttacataaccagtgaaaagacgttgaaagcctacagctcactgtttttggtgctctggaaatgttgagggtgggtttttaaccagtgatttttaacgtgcagtgaatttgttagacttttaaacaccagctaaggtagtcaaacttgatccccattaaaaatcaaggaattaggggtcgggggagggtttaggagtgatccagaatgacctcccagaattactgtgcgtacaactttatttttcagagttttcattggaatggtaagagttttatgaaagacagttttaaaacttattctgagttaaatattaatactttaaaaaattattgtactagacttattgcagccttttgaaagtagcagagtttcatcataccacatatataacagagcataaattttctataatcaggcaccttttgctgcttttgagtaagactgttttcctgtttaagtgttaagcatcgccagacataaaaatctattctctcctctcgattgtagcatagcctgacagctctagatacagcatttctatgatgaaaaatgagtatccatcaggaaatctagaagactagccgtgttttctcagactccacctttgtttgcactctgttgcctgtgaggagctttctggcatgtgattatttacttcaaaactagagttccaagcacctacattaattattttatattgtgtgcagaatagtatatcttttaatgtcagatatgatacactgcacatattgcttttgcactcttaaaatttttgtactaaataatagaaaatatttatattctttgagtgtgagctttgaatagatggcattatcactttattgtttttttaacaaaaactttttctcaattattctattgcaatgttattctgagcaagtcctatgccaaatatcttgtataatgtttgtatggaagattaaattttactcttgtgtggtaagactatttcagttactgattttatagttggaatttgatattccagcacaaagtccacagtgtattcagaaatccaagttggtgtcatacatttcattttgatgtgaacttttctttgctttcctttgttctaagactccattttgcaataaacgttttgacagtaaatccctttgttac

SEQ ID NO: 8736 - protein, 455 aa, Homo sapiens; identical to SEQ ID NO: 682

SEQ ID NO: 8737 - DNA, 4009 bp, Homo sapiens
tcttcctcattggcgccgtgcagagaggcggaatgttcaactcctaactgcagcggaaacgtgggagccgcgcgggccgctgtcgtcccaacccccgccgccctcgtcgcgcgcggggcctccgcgcccccggctgctgctcacgccccgcccgggagccagattttgtggaagtataatactttgtcattatgagatgtcgtctctcggtgcctcctttgtgcaaattaaatttgatgacttgcagttttttgaaaactgcggtggaggaagttttgggagtgtttatcgagccaaatggatatcacaggacaaggaggtggctgtaaagaagctcctcaaaatagagaaagaggcagaaatactcagtgtcctcagtcacagaaacatcatccagttttatggagtaattcttgaacctcccaactatggcattgtcacagaatatgcttctctgggatcactctatgattacattaacagtaacagaagtgaggagatggatatggatcacattatgacctgggccactgatgtagccaaaggaatgcattatttacatatggaggctcctgtcaaggtgattcacagagacctcaagtcaagaaacgttgttatagctgctgatggagtattgaagatctgtgactttggtgcctctcggttccataaccatacaacacacatgtccttggttggaactttcccatggatggctccagaagttatccagagtctccctgtgtcagaaacttgtgacacatattcctatggtgtggttctctgggagatgctaacaagggaggtcccctttaaaggtttggaaggattacaagtagcttggcttgtagtggaaaaaaacgagagattaaccattccaagcagttgccccagaagttttgctgaactgttacatcagtgttgggaagctgatgccaagaaacggccatcattcaagcaaatcatttcaatcctggagtccatgtcaaatgacacgagccttcctgacaagtgtaactcattcctacacaacaaggcggagtggaggtgggtagccccgacagcaggccacagcgtctggctttcaaagaccatcactcgtctcaatgaagaagtgaaccagagatctgaatgacagtcctgatttctgaccatagcttagggaaaaagaaaaggttttttttatgattttggaactcttataagtcctgcatttcataagcaagaaatagtgtttctccaagcttgttgccttgtgtaagtatttgaaaagaatattgaggccggtcgcggtggctcacgcctgtaatcccagctctttgggaggccaaggcaggcagatcacctgaggtcaggagtttgagaccaccttgaccaacatggagaaaccctgtctctactaaaaatacaaaaaattagccaggtgtggtggcacatgcctgtaatcccagctactcaggaggctgaggcaggagaatcacttgaacctggaggcagaggttgcagtgagccgagatcatgccattgcactccagcctgagcaacaagagtgaaaaactccatctcaaaaaaaaaaaaattgaaatcctgtcttctgagacaaaagatggttaccagacatttctctgtgtttactttgttaggaagctttgtcctctgttgtgtaagaaacaagaatactgtttaccttgaaattcgctgagcactgtgtctgctagtgaagggggatagggagacatcaaaaatactcttaaaagaaaacttgatatcataaatcctattaaagcttgttaaataaatttagtaatgagaaaattgtattgcatgagtggaagagtaaacccaggatgaaacatttgagccaggtcacatgatgcatgactataaatagcatgtttggaagctgacattattccccccctgactcagcggagatttaggtaacttcatctctgctcccgatagccgtgggcagtaacatgacgccttacgccatctgctgatgccaaatgaatactgcatgcactttgaaaattactgcgttgtttactcctgttactagatacttctttgggctttctgtttgttgttttacaataaccttatttatttttattcctttgaaatatcttatctagggctagtgaggtaaatgaatttttatttagggatacaaaaattatacagtgagctcaagtctaggtataagggacttttttctgggctgagataattaacaaaacagaacatttaagtaatatttgttttttgcagtaagagatcagtatacatgtcatcagatcattctcctttaaaatccatatatgagttcccattactcttaagacaaagaccagaatacttggcacagtggctcatgcctgtaatcccagcacttcaggaggccaaggctggtggattacttgagcccaggagttcaagcccagcctggtgacagagcaagaatcattctcaagaaatgaaaaggaccagaatacttaagaagactcaccagaccctcattactgtggcctcaccagtgtcagcttaagaagatcattctccccttaatttctggctttcagtccctcaacagatgcgtatttctccccttttcaggatctttacaagcagtttcctctctttgaagcttatcccatttcagctgtgtaccacgcctgccgtcacaccccaccttaactcctgttcatcattcacatggcagttgaataacacgtctgcagggaaacacttcctgaccccaggccagatcaggttccactttatgtgctctgagagcatctccttcataggctttgctgctattggaattaagaagtaattcgggccaggcacagtggctcacgcctgtaatcccagcactttgggaggccaagtcaggtggatcaacgtcaggagatcgagaccatactggctaacacggtgaaaccccatctctactaaaaatacaaaaaattagccaggcatggtggcgggtgcctgtagtcccagctacttgggaggctgaggcaggagaatggcgtgaacccgggaggcagaggttgcagtgagctgagatcgcgccactgcactccagcctgggcgacacagcaagactccgtctcaaaaaaaaagaagtaattcggcagttagttgtttaatgtgtgtctcacgggctgaaatataagagaggcagacaatcacgtttgttcatcactcacagcatcaaaatgtgccttgaacacagcatttgctccgtaaatatttggggaagcaagagagaaaattaccatggtggtaataatataaaaagagattgtgatattatacaagagaatataaatatgtatgtttgccatgacaaaagtacttcttatgttcattcattcattatccattcattgaacttctgctggtgtgagaacgactgttgccattcgggtactgggctgtagcgatgagcacaagagtcccagggcatgtggagctctccagcccgagtgtccaatgttaaactattaaatatattcaaaactatcgcatttctattttgacaagtattatgacagagaaatatactagatgtctgagagcatatggccatgaaatctgatctagtccaaggacatagtaaaaggattttggagaaaatgctatttgatctattaccgaagggattagtaagattttaataccaagatagggagtcttttaaagtatgtcaacaaggccaggcgtggtagctcacacctgtaatcccaacactttgggaggccgaagtgaaagactgcttgagcccagaagttcaagactagcctgagcaacgtagacctcatctctactcacaatttaaaaattagctgggcattgtgactctaacctgtggtcccagttactcaactcgggaggctgaggtgggaggatcacttgagctggggaggtcaaagctgcattgagccgagatctggccacgacactccagcctgggctacagagtgagatcctattc

SEQ ID NO: 8738 - protein, 312 aa, Homo sapiens
MSSLGASFVQIKFDDLQFFENCGGGSFGSVYRAKWISQDKEVAVKKLLKIEKEAEILSVLSHRNIIQFYGVILEPPNYGIVTEYASLGSLYDYINSNRSEEMDMDHIMTWATDVAKGMHYLHMEAPVKVIHRDLKSRNVVIAADGVLKICDFGASRFHNHTTHMSLVGTFPWMAPEVIQSLPVSETCDTYSYGVVLWEMLTREVPFKGLEGLQVAWLVVEKNERLTIPSSCPRSFAELLHQCWEADAKKRPSFKQIISILESMSNDTSLPDKCNSFLHNKAEWRWVAPTAGHSVWLSKTITRLNEEVNQRSE

SEQ ID NO: 8739 - DNA, 1601 bp, Homo sapiens
tcttcctcattggcgccgtgcagagaggcggaatgttcaactcctaactgcagcggaaacgtgggagccgcgcgggccgctgtcgtcccaacccccgccgccctcgtcgcgcgcggggcctccgcgcccccggctgctgctcacgccccgcccgggagccagattttgtggaagtataatactttgtcattatgagatgtcgtctctcggtgcctcctttgtgcaaattaaatttgatgacttgcagttttttgaaaactgcggtggaggaagttttgggagtgtttatcgagccaaatggatatcacaggacaaggaggtggctgtaaagaagctcctcaaaatagagaaagaggcagaaatactcagtgtcctcagtcacagaaacatcatccagttttatggagtaattcttgaacctcccaactatggcattgtcacagaatatgcttctctgggatcactctatgattacattaacagtaacagaagtgaggagatggatatggatcacattatgacctgggccactgatgtagccaaaggaatgcattatttacatatggaggctcctgtcaaggtgattcacagagacctcaagtcaagaaacgttgttatagctgctgatggagtattgaagatctgtgactttggtgcctctcggttccataaccatacaacacacatgtccttggttggaactttcccatggatggctccagaagttatccagagtctccctgtgtcagaaacttgtgacacatattcctatggtgtggttctctgggagatgctaacaagggaggtcccctttaaaggtttggaaggattacaagtagcttggcttgtagtggaaaaaaacgagagattaaccattccaagcagttgccccagaagttttgctgaactgttacatcagtgttgggaagctgatgccaagaaacggccatcattcaagcaaatcatttcaatcctggagtccatgtcaaatgacacgagccttcctgacaagtgtaactcattcctacacaacaaggcggagtggaggtgcgaaattgaggcaactcttgagaggctaaagaaactagagcgtgatctcagctttaaggagcaggagcttaaagaacgagaaagacgtttaaagatgtgggagcaaaagctgacagagcagtccaacaccccgcttctcttgcctcttgctgcaagaatgtctgaggagtcttactttgaatctaaaacagaggagtcaaacagtgcagagatgtcatgtcagatcacagcaacaagtaacggggagggccatggcatgaacccaagtctgcaggccatgatgctgatgggctttggggatatcttctcaatgaacaaagcaggagctgtgatgcattctgggatgcagataaacatgcaagccaagcagaattcttccaaaaccacatctaagagaagggggaagaaagtcaacatggctctggggttcagtgattttgacttgtcagaaggtgacgatgatgatgatgatgacggtgaggaggaggataatgacatggataatagtgaatgaaagcagaaagcaaagtaataaaatcacaaatgtttgg

SEQ ID NO: 8740 - protein, 455 aa, Homo sapiens; identical to SEQ ID NO: 682

SEQ ID NO: 8741 - DNA, 3374 bp, Homo sapiens
tcttcctcattggcgccgtgcagagaggcggaatgttcaactcctaactgcagcggaaacgtgggagccgcgcgggccgctgtcgtcccaacccccgccgccctcgtcgcgcgcggggcctccgcgcccccggctgctgctcacgccccgcccgggagccagattttgtggaagtataatactttgtcattatgagatgtcgtctctcggtgcctcctttgtgcaaattaaatttgatgacttgcagttttttgaaaactgcggtggaggaagttttgggagtgtttatcgagccaaatggatatcacaggacaaggaggtggctgtaaagaagctcctcaaaatagagaaagaggcagaaatactcagtgtcctcagtcacagaaacatcatccagttttatggagtaattcttgaacctcccaactatggcattgtcacagaatatgcttctctgggatcactctatgattacattaacagtaacagaagtgaggagatggatatggatcacattatgacctgggccactgatgtagccaaaggaatgcattatttacatatggaggctcctgtcaaggtgattcacagagacctcaagtcaagaaacgttgttatagctgctgatggagtattgaagatctgtgactttggtgcctctcggttccataaccatacaacacacatgtccttggttggaactttcccatggatggctccagaagttatccagagtctccctgtgtcagaaacttgtgacacatattcctatggtgtggttctctgggagatgctaacaagggaggtcccctttaaaggtttggaaggattacaagtagcttggcttgtagtggaaaaaaacgagagattaaccattccaagcagttgccccagaagttttgctgaactgttacatcagtgttgggaagctgatgccaagaaacggccatcattcaagcaaatcatttcaatcctggagtccatgtcaaatgacacgagccttcctgacaagtgtaactcattcctacacaacaaggcggagtggaggtgcgaaattgaggcaactcttgagaggctaaagaaactagagcgtgatctcagctttaaggagcaggagcttaaagaacgagaaagacgtttaaagatgtgggagcaaaagctgacagagcagtccaacaccccgctgctgccttcctttgagattggtgcatggacggaagacgatgtgtattgttgggttcagcagctcgtcagaaaaggtgactcttcagcagagatgagtgtatatgcaagcttgtttaaagaaaacaacattacagggaagcggctgctgctgctggaggaagaagacctgaaagacatgggcattgtctccaaggggcatatcattcacttcaagtcagccattgagaaattaacccatgattacataaatttgtttcacttcccaccactaattaaggactcaggaggtgaacctgaagaaaatgaggaaaaaatagtgaacctggaactggtttttggttttcacttgaaaccaggaactggcccacaggattgtaagtggaaaatgtatatggagatggatggggatgaaattgcaataacctacataaaagatgtgacattcaacactaacctacctgatgcggagattttaaagatgacaaagccaccatttgtaatggagaagtggattgtaggaatagcaaaaagtcagactgtggagtgcactgtcacatatgagagtgatgttagaactccaaaaagcactaaacatgtccattcgattcagtggagtagaacaaaacctcaggatgaagtgaaagcagtccaacttgccattcagacattattcaccaattcagatggcaaccctggaagcaggtccgactcaagtgctgattgccagtggttagatactctgaggatgcggcagattgcatccaacacttctttacagcgttcccagagcaatcctattctggggtcaccgttcttctcacactttgatggccaggattcctacgctgctgctgtgagacggccccaggtgcccattaagtatcaacagattacacctgtgaaccagtccagaagctcgtctcctactcagtatggactgaccaaaaacttctcttccctacatctcaactctagggacagtggcttttccagtggcaatactgacacctcttcagagaggggtcgatactcagacagaagcaggaacaaatatggacgtggtagtatatcactcaattcttctcctagaggaagatacagtggaaagagtcagcattccactccttcaagaggaagataccctggaaagttctacagggtttctcagtcagcactcaatcctcaccagtcgcctgacttcaagagaagccccagggacctccaccaacccaacaccataccagggatgcctttgcaccctgagactgactcaagagccagtgaagaggacagcaaagtcagcgaagggggctggacaaaagtggaataccggaaaaagccccacaggccatctcccgccaaaaccaataaagagagagccagaggggaccaccgtggatggagaaacttttgatgaattgaactacatagcttttctaagcaggttaaaaaaaaaaaaaaaaagaaatgtaatggtttttgataatatgatcccttcagattgaattaacgaaaagacaacacttccagtttttggattgggaaataccttctaattgagactatagccaaaccagggccaaaattatggatattggtcacccagtgatcataactaggcttgaaaatcactacacatattttctgccttgagtgaacatttttagaggaaaggttatgccatctttttaccctaaccactgatattctggttagcagggccaggacaaggggaaggaaaatgaggtcaacaaaaaaatcaaatttttaggaaaagataagatgaatgttactgatttttccttttggctgaggctgcaatatggcctggcaaggcactgttactgatcttgtctttaacattttgatattttgttcatcataatttttgcatttatttttttaaatattgcattaaaatatcatttagcttgattatcgagttttttggtttgaggttttttgttgcttcttttttcttttctttctttccccctcttttttttggatgtccccttaaattttgtgcccaaggcaggtacctcactcatctcatccttggctcagccctgctggttagtatttagtatttattttagtaagatatttgtgtctgtatgatggtcagagttgaactgatctggcttgtcatttttcagtaataaaaaaagttactgaatttaatgttg

SEQ ID NO: 8742 - protein, 800 aa, Homo sapiens; identical to SEQ ID NO: 680

SEQ ID NO: 8743 - DNA, 3861 bp, Homo sapiens
tcttcctcattggcgccgtgcagagaggcggaatgttcaactcctaactgcagcggaaacgtgggagccgcgcgggccgctgtcgtcccaacccccgccgccctcgtcgcgcgcggggcctccgcgcccccggctgctgctcacgccccgcccgggagccagattttgtggaagtataatactttgtcattatgagatgtcgtctctcggtgcctcctttgtgcaaattaaatttgatgacttgcagttttttgaaaactgcggtggaggaagttttgggagtgtttatcgagccaaatggatatcacaggacaaggaggtggctgtaaagaagctcctcaaaatagagaaagaggcagaaatactcagtgtcctcagtcacagaaacatcatccagttttatggagtaattcttgaacctcccaactatggcattgtcacagaatatgcttctctgggatcactctatgattacattaacagtaacagaagtgaggagatggatatggatcacattatgacctgggccactgatgtagccaaaggaatgcattatttacatatggaggctcctgtcaaggtgattcacagagacctcaagtcaagaaacgttgttatagctgctgatggagtattgaagatctgtgactttggtgcctctcggttccataaccatacaacacacatgtccttggttggaactttcccatggatggctccagaagttatccagagtctccctgtgtcagaaacttgtgacacatattcctatggtgtggttctctgggagatgctaacaagggaggtcccctttaaaggtttggaaggattacaagtagcttggcttgtagtggaaaaaaacgagagattaaccattccaagcagttgccccagaagttttgctgaactgttacatcagtgttgggaagctgatgccaagaaacggccatcattcaagcaaatcatttcaatcctggagtccatgtcaaatgacacgagccttcctgacaagtgtaactcattcctacacaacaaggcggagtggaggtgcgaaattgaggcaactcttgagaggctaaagaaactagagcgtgatctcagctttaaggagcaggagcttaaagaacgagaaagacgtttaaagatgtgggagcaaaagctgacagagcagtccaacaccccgctgctgccttcctttgagattggtgcatggacggaagacgatgtgtattgttgggttcagcagctcgtcagaaaaggtgactcttcagcagagatgagtgtatatgcaagcttgtttaaagaaaacaacattacagggaagcggctgctgctgctggaggaagaagacctgaaagacatgggcattgtctccaaggggcatatcattcacttcaagtcagccattgagaaattaacccatgattacataaatttgtttcacttcccaccactaattaaggactcaggaggtgaacctgaagaaaatgaggaaaaaatagtgaacctggaactggtttttggttttcacttgaaaccaggaactggcccacaggattgtaagtggaaaatgtatatggagatggatggggatgaaattgcaataacctacataaaagatgtgacattcaacactaacctacctgatgcggagattttaaagatgacaaagccaccatttgtaatggagaagtggattgtaggaatagcaaaaagtcagactgtggagtgcactgtcacatatgagagtgatgttagaactccaaaaagcactaaacatgtccattcgattcagtggagtagaacaaaacctcaggatgaagtgaaagcagtccaacttgccattcagacattattcaccaattcagatggcaaccctggaagcaggtccgactcaagtgctgattgccagtggttagatactctgaggatgcggcagattgcatccaacacttctttacagcgttcccagagcaatcctattctggggtcaccgttcttctcacactttgatggccaggattcctacgctgctgctgtgagacggccccaggtgcccattaagtatcaacagattacacctgtgaaccagtccagaagctcgtctcctactcagtatggactgaccaaaaacttctcttccctacatctcaactctagggacagtggcttttccagtggcaatactgacacctcttcagagaggggtcgatactcagacagaagcaggaacaaatatggacgtggtagtatatcactcaattcttctcctagaggaagatacagtggaaagagtcagcattccactccttcaagaggaagataccctggaaagttctacagggtttctcagtcagcactcaatcctcaccagtcgcctgacttcaagagaagccccagggacctccaccaacccaacaccataccagggatgcctttgcaccctgagactgactcaagagccagtgaagaggacagcaaagtcagcgaagggggctggacaaaagtggaataccggaaaaagccccacaggccatctcccgccaaaaccaataaagagagagccagaggggaccaccgtggatggagaaacttttgatgaattgaactacatagcttttctaagcaggttaaaaaaaaaaaaaaaaagaaatgtaatggtttttgataatatgatcccttcagattgaattaacgaaaagacaacacttccagtttttggattgggaaataccttctaattgagactatagccaaaccagggccaaaattatggatattggtcacccagtgatcataactaggcttgaaaatcactacacatattttctgccttgagtgaacatttttagaggaaaggttatgccatctttttaccctaaccactgatattctggttagcagggccaggacaaggggaaggaaaatgaggtcaacaaaaaaatcaaatttttaggaaaagataagatgaatgttactgatttttccttttggctgaggctgcaatatggcctggcaaggcactgttactgatcttgtctttaacattttgatattttgttcatcataatttttgcatttatttttttaaatattgcattaaaatatcatttagcttgattatcgagttttttggtttgaggttttttgttgcttcttttttcttttctttctttccccctcttttttttggatgtccccttaaattttgtgcccaaggcaggtacctcactcatctcatccttggctcagccctgctggttagtatttagtatttattttagtaagatatttgtgtctgtatgatggtcagagttgaactgatctggcttgtcatttttcagtaataaaaaaagttactgaatttaatgttgaatatgatgcatatctcattcattacgatttatcagaaaccaaagatttaaattgcctagatttgtggttctttctcttcctaagttcccagcgactgctttcaaatactattttctaaatttcaccaaaggagcaaagaggataaaacaacactccataaaggcctcttgggatgtcagaaatctaaaatctaaaagaaaacagacacagagcaagacaataacatcacaagctaaaagccagagaaatttaaaattaccaacatccttgttggagtaagacagtaaatatcagccttgcagcaagacagctctgagcagctgtgggcaaagaggtaaaccagtgggggtgcaaggagactgtctgcagcttagggcagaaatggtgggatccaacttgtgaaatgcttcatgttttacaaaccaaaaagtcaggtagcaacaaacttattgtatgtcaaatcaataaatgttactttcaatattc

SEQ ID NO: 8744 - protein, 800 aa, Homo sapiens; identical to SEQ ID NO: 680

SEQ ID NO: 8745 - DNA, 6087 bp, Homo sapiens
gcggaatgttcaactcctaactgcagcggaaacgtgggagccgcgcgggccgctgtcgtcccaacccccgccgccctcgtcgcgcgcggggcctccgcgcccccggctgctgctcacgccccgcccgggagccagattttgtggaagtataatactttgtcattatgagatgtcgtctctcggtgcctcctttgtgcaaattaaatttgatgacttgcagttttttgaaaactgcggtggaggaagttttgggagtgtttatcgagccaaatggatatcacaggacaaggaggtggctgtaaagaagctcctcaaaatagagaaagaggtaattcttccaaaaccacatctaagagaagggggaagaaagtcaacatggctctggggttcagtgattttgacttgtcagaaggtgacgatgatgatgatgatgacggtgaggaggaggataatgacatggataatagtgaatgaaagcagaaagcaaagtaataaaatcacaaatgtttggaaaacacaaaagtaacttgtttatctcagtctgtacaaaaacagtaaggaggcagaaagccaagcactgcatttttaggccaatcacatttacatgaccgtaatttcttatcaattctacttttatttttgcttacagaaaaacggggggagaattaagccaaagaagtatatttatgaatcagcaaatgtggtgcctgattatagaaatttgtgatcctatatacaatataggacttttaaagttgtgacattctggctttttcttttaatgaatactttttagtttgtatttgactttatttcctttattcaaatcatttttaaaaacttacattttgaacaaacactcttaactcctaattgttctttgacacgtagtaattctgtgacatactttttttttcttatagcaatacactgtaatatcagaaatggttggcctgagcaacctagtaagacctcgtctctactaataattaaaaaactagctggcatggtagcacacacctgtagtcccagatacttgggaggccaaggcaggaggattgcttgagacctagcaatcagtcagggctgcagtgagccatgatggcaccactgcactctagcctgggcaagagaacaagatcctgtctcaaaaaacaaaaaaaagaaagaattgatagtacaaaatccaacaacaatactgagatgatctaagaaggttataacaaaatgctcttcagaaatacctaagtgctgagaatttttagtactaaagagcacagctgctcaaagtaaagcctgagcagtgttctcagtaatgtatttgaaggaaaaataccctgatttgaaaccaacagcagatgttgcaaactttcataccactgctggccatggaagcctcttaacaacacactgtcatttaaggctgtgcttgtgctttatacaaagagaaagaggtggtcttaaggggatgcttccaggggggtgagttcatgcctctcctgtattttccagcaagtggggtatgtgtggtggtttgttttttagaggggcataataatccaggattctaagcatatgctcagctattttaaagaggaaattaaatattataaaagaaatagtaaagataagttatcctcacttaggcaaaagcacaggtcctttccatatcaagtttagcctaccagggttgttttttgttttaaccctgcttaataatgttggtgttttagaagtagatacaggcactgctctgaaaacctggctagccaaggatattctcagaatgttatcacctgtttgtcaaagcttgtttaaattataaaacacttttaattatatatatgaggcaaaagaactaagacttttttcaaactaaattagaaaggagtgtcattatttgactgttaaaccaaaatatttttggtgggtctttttatggaagtttaaagaaaggacatcatcatagatatgatctaacagtatttctaactatatttgatcattaaaagcctcttggaatttgaagcgtgacgtgtttctaatgccccttgagaggtgaaaaataccacataatgatcagtatgctgtgccagcttcatttggggagaaataactagtagaaagttctgggtgtgaggtgtacagcagtctaggtggcatagtgatgaagaaagggatcagagtctgactgtcactcagaatcctgggctcagttgcttgacaaccttgggaaaattgttttatctttgtgcgtctgtttgctgatcttcagcgtgggaataataacagtacctacttgaaaggatcattgtgcggattaaaagaaataatatatgtaaagcactttaacacagcaccaggcccacggaaagtggctaatgttagctactatgaatggtgccagtgaagacactgaaaaataagtgatttcagtaaccttctggaaagctatcagtttcaaataatattttctctgtagtatgagatgaaattaaaagtggatagctttcaggaaagataaagagaacatgcttagaatgtaagctaaacagattttttctgttgctctttgaaaactatgagccctggccagcttaacctggtctgaggtgagactaaacacaaaaacagtagataaatctctccctaaaagatggattcccccacatacccatgctactagtttctctgtctattcacacatatgtacaaatacatgaacacagcctgtctgtgctcagacatagagaagtactacctgacttgagtcaatgcacccaagaagaaaagcttggagtagagcagaagggagggcttgggactcctgtctttccagcatgccctggggtgcagtggtcagccacctgaagagagagccaatagcatggggtttacaaggcaaagatagtcattcattcaacacatattcatagagctccttctctgtgccagacactgttctggaagatagctagatgaaaatctttgcactcacagagcttacatgccagtgagtgaagatcgatgataaataaagcaaatgcatcatatgttcacatttgataagtatatgccaaaaaatgaagccgggaaggaggacaaggcccatgggtgggtgttgaggtttttaaagtgtggtcaggaaaggccccactgataaggtaacatttgagcaagtctgaaaaaggcaaggggatctttggggctaacttcgggatccctgcactttatgtaagaatgtaaacctggagtctcatttaagaatgatcagcaatacgtttagaacatatgaactgaatgaaatggacattttttcttaatttatgtataaatccatatgattatacataaagttctgatgcattaataaaagcagccaaatagggccaaagagaaaaataacaggactctgtactggacctaactttatcattaattaggtaatattttcctcatttctttactgctgccattttcctcaccagtattccagagatggtcatagctcattactctaccaccaagaacctaaaaggaattagaatacagcagaattggcctcagtgaagagcttaaaattgttctcctcgtagaactggactattgatcattaccacgtgacgttggctctattactttctgttcccaatgtccttctagtggtttgaaaatgttaaaacatccctaaaatctaaatcatataatcagaattctatagtgtcccactctatctgtaaagatcatttggaagactttagactctattaattttaaaaggaatatttattagccatatgcagaatttctaatgatgatattgtacagcttctaattcacttttcagatcagtgtttgaaatggcaattatcagtgttggatttagttccaactacttgatttacaaaaatgtacatttagaggttaaaagaaacagtgagaaatgtaaacattcaaaatgataattgaatctctcagttgtgggaataattatcagagacatgcaactgaaaatgtctcacctttcatctttttttcttaattcataaagttatcttgtagaatttgatgagaccctccctagtcattctcaactggggcggtgctgtcaccgaatggtgtttgagagtgttggggctagggcacatttttggttgtcacagcaactggggtggcatttgctgcccagtgccaggaatagtaacattatgaatgccagggacagtgtgctcagtaaagtcttccatccaaaaggggcagggcacggtggctcacgcctgtaatcccagcactttgggaggccaaggtgggcggatcacctgatgtcaggggttcgagaccagcctggccaacatggtgaaaccctgttgctactaaaaatacaaaaattggctgggtgtggtgtcacatgccagtaaccccagctactagggaggctgaggcaggagaatcacttgaacccgggaggcagaggttgcagtgagctgagattgcaccactacactccagcctggatgacagagtgagacttcatctcaaaaaaaaaaaaaaacaaaaaaaaacaacccggtagcattgtcccttccccactgacaaacttatcaaatccagaagctttagagtttcgtctctaattatttttctcctgaacaaaattacccaagtcaaaacaaaatgtatttttagaattacggcagcatacgacctgaattttgtgagtttcgtggctttatcttaaatcaccatttccctaaaaatggtttctttctccttagaaatgctggtggcaacttgatgaaacagccaaatgcaccagggcaggtcactttcccattacactgattccacaattaaaaaaaaaaaagaaaaaaaactcattgagatagctacagttctataggttaatttaaagcctcctttttctactcatttttgaaagcaaaattacattttactattttacataaccagtgaaaagacgttgaaagcctacagctcactgtttttggtgctctggaaatgttgagggtgggtttttaaccagtgatttttaacgtgcagtgaatttgttagacttttaaacaccagctaaggtagtcaaacttgatccccattaaaaatcaaggaattaggggtcgggggagggtttaggagtgatccagaatgacctcccagaattactgtgcgtacaactttatttttcagagttttcattggaatggtaagagttttatgaaagacagttttaaaacttattctgagttaaatattaatactttaaaaaattattgtactagacttattgcagccttttgaaagtagcagagtttcatcataccacatatataacagagcataaattttctataatcaggcaccttttgctgcttttgagtaagactgttttcctgtttaagtgttaagcatcgccagacataaaaatctattctctcctctcgattgtagcatagcctgacagctctagatacagcatttctatgatgaaaaatgagtatccatcaggaaatctagaagactagccgtgttttctcagactccacctttgtttgcactctgttgcctgtgaggagctttctggcatgtgattatttacttcaaaactagagttccaagcacctacattaattattttatattgtgtgcagaatagtatatcttttaatgtcagatatgatacactgcacatattgcttttgcactcttaaaatttttgtactaaataatagaaaatatttatattctttgagtgtgagctttgaatagatggcattatcactttattgtttttttaacaaaaactttttctcaattattctattgcaatgttattctgagcaagtcctatgccaaatatcttgtataatgtttgtatggaagattaaattttactcttgtgtggtaagactatttcagttactgattttatagttggaatttgatattccagcacaaagtccacagtgtattcagaaatccaagttggtgtcatacatttcattttgatgtgaacttttctttgctttcctttgttctaagactccattttgcaataaacgttttgacagt

SEQ ID NO: 8746 - protein, 118 aa, Homo sapiens
MSSLGASFVQIKFDDLQFFENCGGGSFGSVYRAKWISQDKEVAVKKLLKIEKEVILPKPHLREGGRKSTWLWGSVILTCQKVTMMMMMTVRRRIMTWIIVNESRKQSNKITNVWKTQK

SEQ ID NO: 8747 - DNA, 6102 bp, Homo sapiens
gcggaatgttcaactcctaactgcagcggaaacgtgggagccgcgcgggccgctgtcgtcccaacccccgccgccctcgtcgcgcgcggggcctccgcgcccccggctgctgctcacgccccgcccgggagccagattttgtggaagtataatactttgtcattatgagatgtcgtctctcggtgcctcctttgtgcaaattaaatttgatgacttgcagttttttgaaaactgcggtggaggaagttttgggagtgtttatcgagccaaatggatatcacaggacaaggaggtggctgtaaagaagctcctcaaaatagagaaagaggtaattcttccaaaaccacatctaagagaagggggaagaaagtcaacatggctctggggttcagtgattttgacttgtcagaaggtgacgatgatgatgatgatgacggtgaggaggaggataatgacatggataatagtgaatgaaagcagaaagcaaagtaataaaatcacaaatgtttggaaaacacaaaagtaacttgtttatctcagtctgtacaaaaacagtaaggaggcagaaagccaagcactgcatttttaggccaatcacatttacatgaccgtaatttcttatcaattctacttttatttttgcttacagaaaaacggggggagaattaagccaaagaagtatatttatgaatcagcaaatgtggtgcctgattatagaaatttgtgatcctatatacaatataggacttttaaagttgtgacattctggctttttcttttaatgaatactttttagtttgtatttgactttatttcctttattcaaatcatttttaaaaacttacattttgaacaaacactcttaactcctaattgttctttgacacgtagtaattctgtgacatactttttttttcttatagcaatacactgtaatatcagaaatggttggcctgagcaacctagtaagacctcgtctctactaataattaaaaaactagctggcatggtagcacacacctgtagtcccagatacttgggaggccaaggcaggaggattgcttgagacctagcaatcagtcagggctgcagtgagccatgatggcaccactgcactctagcctgggcaagagaacaagatcctgtctcaaaaaacaaaaaaaagaaagaattgatagtacaaaatccaacaacaatactgagatgatctaagaaggttataacaaaatgctcttcagaaatacctaagtgctgagaatttttagtactaaagagcacagctgctcaaagtaaagcctgagcagtgttctcagtaatgtatttgaaggaaaaataccctgatttgaaaccaacagcagatgttgcaaactttcataccactgctggccatggaagcctcttaacaacacactgtcatttaaggctgtgcttgtgctttatacaaagagaaagaggtggtcttaaggggatgcttccaggggggtgagttcatgcctctcctgtattttccagcaagtggggtatgtgtggtggtttgttttttagaggggcataataatccaggattctaagcatatgctcagctattttaaagaggaaattaaatattataaaagaaatagtaaagataagttatcctcacttaggcaaaagcacaggtcctttccatatcaagtttagcctaccagggttgttttttgttttaaccctgcttaataatgttggtgttttagaagtagatacaggcactgctctgaaaacctggctagccaaggatattctcagaatgttatcacctgtttgtcaaagcttgtttaaattataaaacacttttaattatatatatgaggcaaaagaactaagacttttttcaaactaaattagaaaggagtgtcattatttgactgttaaaccaaaatatttttggtgggtctttttatggaagtttaaagaaaggacatcatcatagatatgatctaacagtatttctaactatatttgatcattaaaagcctcttggaatttgaagcgtgacgtgtttctaatgccccttgagaggtgaaaaataccacataatgatcagtatgctgtgccagcttcatttggggagaaataactagtagaaagttctgggtgtgaggtgtacagcagtctaggtggcatagtgatgaagaaagggatcagagtctgactgtcactcagaatcctgggctcagttgcttgacaaccttgggaaaattgttttatctttgtgcgtctgtttgctgatcttcagcgtgggaataataacagtacctacttgaaaggatcattgtgcggattaaaagaaataatatatgtaaagcactttaacacagcaccaggcccacggaaagtggctaatgttagctactatgaatggtgccagtgaagacactgaaaaataagtgatttcagtaaccttctggaaagctatcagtttcaaataatattttctctgtagtatgagatgaaattaaaagtggatagctttcaggaaagataaagagaacatgcttagaatgtaagctaaacagattttttctgttgctctttgaaaactatgagccctggccagcttaacctggtctgaggtgagactaaacacaaaaacagtagataaatctctccctaaaagatggattcccccacatacccatgctactagtttctctgtctattcacacatatgtacaaatacatgaacacagcctgtctgtgctcagacatagagaagtactacctgacttgagtcaatgcacccaagaagaaaagcttggagtagagcagaagggagggcttgggactcctgtctttccagcatgccctggggtgcagtggtcagccacctgaagagagagccaatagcatggggtttacaaggcaaagatagtcattcattcaacacatattcatagagctccttctctgtgccagacactgttctggaagatagctagatgaaaatctttgcactcacagagcttacatgccagtgagtgaagatcgatgataaataaagcaaatgcatcatatgttcacatttgataagtatatgccaaaaaatgaagccgggaaggaggacaaggcccatgggtgggtgttgaggtttttaaagtgtggtcaggaaaggccccactgataaggtaacatttgagcaagtctgaaaaaggcaaggggatctttggggctaacttcgggatccctgcactttatgtaagaatgtaaacctggagtctcatttaagaatgatcagcaatacgtttagaacatatgaactgaatgaaatggacattttttcttaatttatgtataaatccatatgattatacataaagttctgatgcattaataaaagcagccaaatagggccaaagagaaaaataacaggactctgtactggacctaactttatcattaattaggtaatattttcctcatttctttactgctgccattttcctcaccagtattccagagatggtcatagctcattactctaccaccaagaacctaaaaggaattagaatacagcagaattggcctcagtgaagagcttaaaattgttctcctcgtagaactggactattgatcattaccacgtgacgttggctctattactttctgttcccaatgtccttctagtggtttgaaaatgttaaaacatccctaaaatctaaatcatataatcagaattctatagtgtcccactctatctgtaaagatcatttggaagactttagactctattaattttaaaaggaatatttattagccatatgcagaatttctaatgatgatattgtacagcttctaattcacttttcagatcagtgtttgaaatggcaattatcagtgttggatttagttccaactacttgatttacaaaaatgtacatttagaggttaaaagaaacagtgagaaatgtaaacattcaaaatgataattgaatctctcagttgtgggaataattatcagagacatgcaactgaaaatgtctcacctttcatctttttttcttaattcataaagttatcttgtagaatttgatgagaccctccctagtcattctcaactggggcggtgctgtcaccgaatggtgtttgagagtgttggggctagggcacatttttggttgtcacagcaactggggtggcatttgctgcccagtgccaggaatagtaacattatgaatgccagggacagtgtgctcagtaaagtcttccatccaaaaggggcagggcacggtggctcacgcctgtaatcccagcactttgggaggccaaggtgggcggatcacctgatgtcaggggttcgagaccagcctggccaacatggtgaaaccctgttgctactaaaaatacaaaaattggctgggtgtggtgtcacatgccagtaaccccagctactagggaggctgaggcaggagaatcacttgaacccgggaggcagaggttgcagtgagctgagattgcaccactacactccagcctggatgacagagtgagacttcatctcaaaaaaaaaaaaaaacaaaaaaaaacaacccggtagcattgtcccttccccactgacaaacttatcaaatccagaagctttagagtttcgtctctaattatttttctcctgaacaaaattacccaagtcaaaacaaaatgtatttttagaattacggcagcatacgacctgaattttgtgagtttcgtggctttatcttaaatcaccatttccctaaaaatggtttctttctccttagaaatgctggtggcaacttgatgaaacagccaaatgcaccagggcaggtcactttcccattacactgattccacaattaaaaaaaaaaaagaaaaaaaactcattgagatagctacagttctataggttaatttaaagcctcctttttctactcatttttgaaagcaaaattacattttactattttacataaccagtgaaaagacgttgaaagcctacagctcactgtttttggtgctctggaaatgttgagggtgggtttttaaccagtgatttttaacgtgcagtgaatttgttagacttttaaacaccagctaaggtagtcaaacttgatccccattaaaaatcaaggaattaggggtcgggggagggtttaggagtgatccagaatgacctcccagaattactgtgcgtacaactttatttttcagagttttcattggaatggtaagagttttatgaaagacagttttaaaacttattctgagttaaatattaatactttaaaaaattattgtactagacttattgcagccttttgaaagtagcagagtttcatcataccacatatataacagagcataaattttctataatcaggcaccttttgctgcttttgagtaagactgttttcctgtttaagtgttaagcatcgccagacataaaaatctattctctcctctcgattgtagcatagcctgacagctctagatacagcatttctatgatgaaaaatgagtatccatcaggaaatctagaagactagccgtgttttctcagactccacctttgtttgcactctgttgcctgtgaggagctttctggcatgtgattatttacttcaaaactagagttccaagcacctacattaattattttatattgtgtgcagaatagtatatcttttaatgtcagatatgatacactgcacatattgcttttgcactcttaaaatttttgtactaaataatagaaaatatttatattctttgagtgtgagctttgaatagatggcattatcactttattgtttttttaacaaaaactttttctcaattattctattgcaatgttattctgagcaagtcctatgccaaatatcttgtataatgtttgtatggaagattaaattttactcttgtgtggtaagactatttcagttactgattttatagttggaatttgatattccagcacaaagtccacagtgtattcagaaatccaagttggtgtcatacatttcattttgatgtgaacttttctttgctttcctttgttctaagactccattttgcaataaacgttttgacagtaaatccctttgttac

SEQ ID NO: 8748 - protein, 118 aa, Homo sapiens; identical to SEQ ID NO: 8746

SEQ ID NO: 8749 - DNA, 731 bp, Homo sapiens
aggcttccattgacgaccagctttggctgttccaactcaccacagcctctgaaagacccatgctctctttggattgcttggtacctgcagcacgtttccatgcctgggaggtaaggaccacaagtctcagaagagtaggaagtgcccagcatcacacaggaagcaagttacagaaccaagggctctgttcataaactgttcaacatcttttatcacataaggggaggtgcccgcaacgatggcctgctgcagaatacagagtggctttttcatgtttgatgggttgtaagaaacaaaaagccaactatggcatctatgaagactatgcaacagagactatttatattctgggataatctagcaaatgagctgcgcatcaaaataatggattagtggtttaaaaacgtgttcactgttaaaaggaaaacatgaaaatgatgaaagctaaaataatggtccatcatacaaaagtatatctttttacactattaaaaccaacataagccatttattttcagtaaatataattggataacaatcgttaatttaaactgtattgattttatttttgtttaattgaaaaattggttttgaatttacctgtatatgagagttataaggagttaattcttagttttatgtttatgtatatttaagttacacagaaataatttcagtcaacatgtgaaatctggaagactaaaattttctatataaaagatctacacatt

SEQ ID NO: 8750 - protein, 44 aa, Homo sapiens
MLSLDCLVPAARFHAWEVRTTSLRRVGSAQHHTGSKLQNQGLCS

SEQ ID NO: 8751 - DNA, 2535 bp, Homo sapiens
gtggcaacttggtcgggtctgcttccgcgctgtggaggttttgttttttactctttgcagtaaatcttgctgctgctcactctttgggtccgcactgcttttgtgagctgtaacactcacggagaaggtctgcaggttcatttctgagccagcgagaccaccagcccgccaggaggaagacgctgccgaacatcagaaggaacaaactccaaacacgccgcctttaagaactgtaacacctggagggtccgcggcttcatgaagtcgcagagaccaagaacccaccaattccggacacaaatgcatcattgcactccagcctgggtgacagagtgaaaccctgtctcaaaaataagcttccattgacgaccagctttggctgttccaactcaccacagcctctgaaagacccatgctctctttggattgcttggtacctgcagcacgtttccatgcctgggagggagaataagagtaagtgaacagtttactcttactggaacattccaatgctcttacagataataactaagtgaatgaaaacaaaaagttcaggcattcactggcaaaatccaactctgaacaggtatggaggtgggtctggatttggctcaacatttcacttcgctactcgtctgaaatgcacctcagagcaagggaggcagcaatcaggtaacgcacgtcatggtgagagtactttggtcaccacgggaaacacaaccaaccaagtgttttgccaagagacacagatcggaacgctcatcacaacactgcatggctcattcagtgcaggttgccacaggtctacagtcacatggttaatgaaaatccaaaacaggaccaacaggatgacacattttctgttcttaatgctcattgccattattgctagatctcactctgtagcccaggctggagtgtcgtggccagatctcggctcaatgcagctttgacctccccagctcaagtgatcctcccacctcagcctcccgagttgagtaactgggaccacagctatggtcagaaatcaggactgtcattcagatctctggttcacttcttcattgagacgagtgatggtctttgaaagccagacgctgtggcctgctgtcggggctacccacctccactccgccttgttgtgtaggaatgagttacacttgtcaggaaggctcgtgtcatttgacatggactccaggattgaaatgatttgcttgaatgatggccgtttctgaagaagagaaaataagtaatcattcgctgggacttaagaaaggagatatttaagagaaaacgtagatactacaagcatagtaaggaccacaagtctcagaagagtaggaagtgcccagcatcacacaggaagcaagttacagaaccaagggctctgttcataaactgttcaacatcttttatcacataagggctcataggtccaactaactgaaagcctcaatttgtgggaagaagagaagcgaggctggggacacagcacaaacggtgtttacgccactgaagttcttttgaaatggaaaggctctgcatgaagaagcgaacagttatgccactgcctcgccaattccagtgaggagctcatcttcaatgtagtgttcaacgtaggtggcaaaactgtaatttttcccttttttgaaactattttttcttcttttatttttgaaattctcatctaagcgacagtttcttgtactatagtgactcctgctgggagaggtaagttgaagtagctgaaggtctcttacagatatatcaactcccggccagtaaaaaagatgtcctaaacgcaggagatggagttaaactgttcccctaccttggacgcaatggcttctttcatcactaagaacaaacccctaggttttacaattgagactgagaaactagtacagtacttgtacaatttttgatctacagcatcacgacgtgaagctgcaacaattagatgtaaagggtccattcatgaggaataacatcactttgaccctttgtgttagctcctactgctaatctttccataagcgtgaacttactttcaatttgaagaagatgaaaaagtcttttgcaaaaccccaatactgttttctgatctatgtacctgaatggagaaacgtagtcttacctcgtttttttccactacaagccaagctacttgtaatccttccaaacctttaaaggggacctcccttgttagcatctcccagagaacctggaacaaaaagaaaatggaatttttatttttgtactttatattttttggtacatattactgagaccttatctaacatgtaattgtatctaattaccagacacaaccaaccccaactgtagaaacttgggcaaaacaattaagcacacaacttcttctatatattaaatactttttacgttcttttttataaagaaaaaacctggtttagaaattaggacatctagagccagacttaaaattttatgaaaccaatgggcctgactgatttaatgtcatctcataaattatcagaatttttatgttctcac

SEQ ID NO: 8752 - protein, 138 aa, Homo sapiens
MKTKSSGIHWQNPTLNRYGGGSGFGSTFHFATRLKCTSEQGRQQSGNARHGESTLVTTGNTTNQVFCQETQIGTLITTLHGSFSAGCHRSTVTWLMKIQNRTNRMTHFLFLMLIAIIARSHSVAQAGVSWPDLGSMQL

SEQ ID NO: 8753 - DNA, 1198 bp, Homo sapiens
gaaattgaggcaactcttgagaggctaaagaaactagagcgtgatctcagctttaaggagcaggagcttaaagaacgagaaagacgtttaaagatgtgggagcaaaagagtggaaagagtcagcattccactccttcaagaggaagataccctggaaagttctacagggtttctcagtcagcactcaatcctcaccagtcgcctgacttcaagagaagccccagggacctccaccaacccaacaccataccagggatgcctttgcaccctgagactgactcaagagccagtgaagaggacagcaaagtcagcgaagggggctggacaaaagtggaataccggaaaaagccccacaggccatctcccgccaaaaccaataaagagagagccagaggggaccaccgtggatggagaaacttttgatgaattgaactacatagcttttctaagcaggttaaaaaaaaaaaaaaaaagaaatgtaatggtttttgataatatgatcccttcagattgaattaacgaaaagacaacacttccagtttttggattgggaaataccttctaattgagactatagccaaaccagggccaaaattatggatattggtcacccagtgatcataactaggcttgaaaatcactacacatattttctgccttgagtgaacatttttagaggaaaggttatgccatctttttaccctaaccactgatattctggttagcagggccaggacaaggggaaggaaaatgaggtcaacaaaaaaatcaaatttttaggaaaagataagatgaatgttactgatttttccttttggctgaggctgcaatatggcctggcaaggcactgttactgatcttgtctttaacattttgatattttgttcatcataatttttgcatttatttttttaaatattgcattaaaatatcatttagcttgattatcgagttttttggtttgaggttttttgttgcttcttttttcttttctttctttccccctcttttttttggatgtccccttaaattttgtgcccaaggcaggtacctcactcatctcatccttggctcagccctgctggttagtatttagtatttattttagtaagatatttgtgtctgtatgatggtcagagttgaactgatctggcttgtcatttttcagtaataaaaaaagttactgaatttaatgttg

SEQ ID NO: 8754 - protein, 109 aa, Homo sapiens
MWEQKSGKSQHSTPSRGRYPGKFYRVSQSALNPHQSPDFKRSPRDLHQPNTIPGMPLHPETDSRASEEDSKVSEGGWTKVEYRKKPHRPSPAKTNKERARGDHRGWRNF

SEQ ID NO: 8755 - DNA, 1685 bp, Homo sapiens
gaaattgaggcaactcttgagaggctaaagaaactagagcgtgatctcagctttaaggagcaggagcttaaagaacgagaaagacgtttaaagatgtgggagcaaaagagtggaaagagtcagcattccactccttcaagaggaagataccctggaaagttctacagggtttctcagtcagcactcaatcctcaccagtcgcctgacttcaagagaagccccagggacctccaccaacccaacaccataccagggatgcctttgcaccctgagactgactcaagagccagtgaagaggacagcaaagtcagcgaagggggctggacaaaagtggaataccggaaaaagccccacaggccatctcccgccaaaaccaataaagagagagccagaggggaccaccgtggatggagaaacttttgatgaattgaactacatagcttttctaagcaggttaaaaaaaaaaaaaaaaagaaatgtaatggtttttgataatatgatcccttcagattgaattaacgaaaagacaacacttccagtttttggattgggaaataccttctaattgagactatagccaaaccagggccaaaattatggatattggtcacccagtgatcataactaggcttgaaaatcactacacatattttctgccttgagtgaacatttttagaggaaaggttatgccatctttttaccctaaccactgatattctggttagcagggccaggacaaggggaaggaaaatgaggtcaacaaaaaaatcaaatttttaggaaaagataagatgaatgttactgatttttccttttggctgaggctgcaatatggcctggcaaggcactgttactgatcttgtctttaacattttgatattttgttcatcataatttttgcatttatttttttaaatattgcattaaaatatcatttagcttgattatcgagttttttggtttgaggttttttgttgcttcttttttcttttctttctttccccctcttttttttggatgtccccttaaattttgtgcccaaggcaggtacctcactcatctcatccttggctcagccctgctggttagtatttagtatttattttagtaagatatttgtgtctgtatgatggtcagagttgaactgatctggcttgtcatttttcagtaataaaaaaagttactgaatttaatgttgaatatgatgcatatctcattcattacgatttatcagaaaccaaagatttaaattgcctagatttgtggttctttctcttcctaagttcccagcgactgctttcaaatactattttctaaatttcaccaaaggagcaaagaggataaaacaacactccataaaggcctcttgggatgtcagaaatctaaaatctaaaagaaaacagacacagagcaagacaataacatcacaagctaaaagccagagaaatttaaaattaccaacatccttgttggagtaagacagtaaatatcagccttgcagcaagacagctctgagcagctgtgggcaaagaggtaaaccagtgggggtgcaaggagactgtctgcagcttagggcagaaatggtgggatccaacttgtgaaatgcttcatgttttacaaaccaaaaagtcaggtagcaacaaacttattgtatgtcaaatcaataaatgttactttcaatattc

SEQ ID NO: 8756 - protein, 109 aa, Homo sapiens; identical to SEQ ID NO: 8754

SEQ ID NO: 8757 - DNA, 3748 bp, Homo sapiens
tgctgatcttcagcgtgggaataataacagtacctacttgaaaggatcattgtgcggattaaaagaaataatatatgtaaagcactttaacacagcaccaggcccacggaaagtggctaatgttagctactatgaatggtgccagtgaagacactgaaaaataagtgatttcagtaaccttctggaaagctatcagtttcaaataatattttctctgtagtatgagatgaaattaaaagtggatagctttcaggaaagataaagagaacatgcttagaatgtaagctaaacagattttttctgttgctctttgaaaactatgagccctggccagcttaacctggtctgaggtgagactaaacacaaaaacagtagataaatctctccctaaaagatggattcccccacatacccatgctactagtttctctgtctattcacacatatgtacaaatacatgaacacagcctgtctgtgctcagacatagagaagtactacctgacttgagtcaatgcacccaagaagaaaagcttggagtagagcagaagggagggcttgggactcctgtctttccagcatgccctggggtgcagtggtcagccacctgaagagagagccaatagcatggggtttacaaggcaaagatagtcattcattcaacacatattcatagagctccttctctgtgccagacactgttctggaagatagctagatgaaaatctttgcactcacagagcttacatgccagtgagtgaagatcgatgataaataaagcaaatgcatcatatgttcacatttgataagtatatgccaaaaaatgaagccgggaaggaggacaaggcccatgggtgggtgttgaggtttttaaagtgtggtcaggaaaggccccactgataaggtaacatttgagcaagtctgaaaaaggcaaggggatctttggggctaacttcgggatccctgcactttatgtaagaatgtaaacctggagtctcatttaagaatgatcagcaatacgtttagaacatatgaactgaatgaaatggacattttttcttaatttatgtataaatccatatgattatacataaagttctgatgcattaataaaagcagccaaatagggccaaagagaaaaataacaggactctgtactggacctaactttctcattactctaccaccaagaacctaaaaggaattagaatacagcagaattggcctcagtgaagagcttaaaattgttctcctcgtagaactggactattgatcattaccacgtgacgttggctctattactttctgttcccaatgtccttctagtggtttgaaaatgttaaaacatccctaaaatctaaatcatataatcagaattctatagtgtcccactctatctgtaaagatcatttggaagactttagactctattaattttaaaaggaatatttattagccatatgcagaatttctaatgatgatattgtacagcttctaattcacttttcagatcagtgtttgaaatggcaattatcagtgttggatttagttccaactacttgatttacaaaaatgtacatttagaggttaaaagaaacagtgagaaatgtaaacattcaaaatgataattgaatctctcagttgtgggaataattatcagagacatgcaactgaaaatgtctcacctttcatctttttttcttaattcataaagttatcttgtagaatttgatgagaccctccctagtcattctcaactggggcggtgctgtcaccgaatggtgtttgagagtgttggggctagggcacatttttggttgtcacagcaactggggtggcatttgctgcccagtgccaggaatagtaacattatgaatgccagggacagtgtgctcagtaaagtcttccatccaaaaggggcagggcacggtggctcacgcctgtaatcccagcactttgggaggccaaggtgggcggatcacctgatgtcaggggttcgagaccagcctggccaacatggtgaaaccctgttgctactaaaaatacaaaaattggctgggtgtggtgtcacatgccagtaaccccagctactagggaggctgaggcaggagaatcacttgaacccgggaggcagaggttgcagtgagctgagattgcaccactacactccagcctggatgacagagtgagacttcatctcaaaaaaaaaaaaaaacaaaaaaaaacaacccggtagcattgtcccttccccactgacaaacttatcaaatccagaagctttagagtttcgtctctaattatttttctcctgaacaaaattacccaagtcaaaacaaaatgtatttttagaattacggcagcatacgacctgaattttgtgagtttcgtggctttatcttaaatcaccatttccctaaaaatggtttctttctccttagaaatgctggtggcaacttgatgaaacagccaaatgcaccagggcaggtcactttcccattacactgattccacaattaaaaaaaaaaaagaaaaaaaactcattgagatagctacagttctataggttaatttaaagcctcctttttctactcatttttgaaagcaaaattacattttactattttacataaccagtgaaaagacgttgaaagcctacagctcactgtttttggtgctctggaaatgttgagggtgggtttttaaccagtgatttttaacgtgcagtgaatttgttagacttttaaacaccagctaaggtagtcaaacttgatccccattaaaaatcaaggaattaggggtcgggggagggtttaggagtgatccagaatgacctcccagaattactgtgcgtacaactttatttttcagagttttcattggaatggtaagagttttatgaaagacagttttaaaacttattctgagttaaatattaatactttaaaaaattattgtactagacttattgcagccttttgaaagtagcagagtttcatcataccacatatataacagagcataaattttctataatcaggcaccttttgctgcttttgagtaagactgttttcctgtttaagtgttaagcatcgccagacataaaaatctattctctcctctcgattgtagcatagcctgacagctctagatacagcatttctatgatgaaaaatgagtatccatcaggaaatctagaagactagccgtgttttctcagactccacctttgtttgcactctgttgcctgtgaggagctttctggcatgtgattatttacttcaaaactagagttccaagcacctacattaattattttatattgtgtgcagaatagtatatcttttaatgtcagatatgatacactgcacatattgcttttgcactcttaaaatttttgtactaaataatagaaaatatttatattctttgagtgtgagctttgaatagatggcattatcactttattgtttttttaacaaaaactttttctcaattattctattgcaatgttattctgagcaagtcctatgccaaatatcttgtataatgtttgtatggaagattaaattttactcttgtgtggtaagactatttcagttactgattttatagttggaatttgatattccagcacaaagtccacagtgtattcagaaatccaagttggtgtcatacatttcattttgatgtgaacttttctttgctttcctttgttctaagactccattttgcaataaacgttttgacagt

SEQ ID NO: 8758 - protein, 64 aa, Homo sapiens [sequence omitted]

SEQ ID NO: 8759 - DNA, 3763 bp, Homo sapiens
tgctgatcttcagcgtgggaataataacagtacctacttgaaaggatcattgtgcggattaaaagaaataatatatgtaaagcactttaacacagcaccaggcccacggaaagtggctaatgttagctactatgaatggtgccagtgaagacactgaaaaataagtgatttcagtaaccttctggaaagctatcagtttcaaataatattttctctgtagtatgagatgaaattaaaagtggatagctttcaggaaagataaagagaacatgcttagaatgtaagctaaacagattttttctgttgctctttgaaaactatgagccctggccagcttaacctggtctgaggtgagactaaacacaaaaacagtagataaatctctccctaaaagatggattcccccacatacccatgctactagtttctctgtctattcacacatatgtacaaatacatgaacacagcctgtctgtgctcagacatagagaagtactacctgacttgagtcaatgcacccaagaagaaaagcttggagtagagcagaagggagggcttgggactcctgtctttccagcatgccctggggtgcagtggtcagccacctgaagagagagccaatagcatggggtttacaaggcaaagatagtcattcattcaacacatattcatagagctccttctctgtgccagacactgttctggaagatagctagatgaaaatctttgcactcacagagcttacatgccagtgagtgaagatcgatgataaataaagcaaatgcatcatatgttcacatttgataagtatatgccaaaaaatgaagccgggaaggaggacaaggcccatgggtgggtgttgaggtttttaaagtgtggtcaggaaaggccccactgataaggtaacatttgagcaagtctgaaaaaggcaaggggatctttggggctaacttcgggatccctgcactttatgtaagaatgtaaacctggagtctcatttaagaatgatcagcaatacgtttagaacatatgaactgaatgaaatggacattttttcttaatttatgtataaatccatatgattatacataaagttctgatgcattaataaaagcagccaaatagggccaaagagaaaaataacaggactctgtactggacctaactttctcattactctaccaccaagaacctaaaaggaattagaatacagcagaattggcctcagtgaagagcttaaaattgttctcctcgtagaactggactattgatcattaccacgtgacgttggctctattactttctgttcccaatgtccttctagtggtttgaaaatgttaaaacatccctaaaatctaaatcatataatcagaattctatagtgtcccactctatctgtaaagatcatttggaagactttagactctattaattttaaaaggaatatttattagccatatgcagaatttctaatgatgatattgtacagcttctaattcacttttcagatcagtgtttgaaatggcaattatcagtgttggatttagttccaactacttgatttacaaaaatgtacatttagaggttaaaagaaacagtgagaaatgtaaacattcaaaatgataattgaatctctcagttgtgggaataattatcagagacatgcaactgaaaatgtctcacctttcatctttttttcttaattcataaagttatcttgtagaatttgatgagaccctccctagtcattctcaactggggcggtgctgtcaccgaatggtgtttgagagtgttggggctagggcacatttttggttgtcacagcaactggggtggcatttgctgcccagtgccaggaatagtaacattatgaatgccagggacagtgtgctcagtaaagtcttccatccaaaaggggcagggcacggtggctcacgcctgtaatcccagcactttgggaggccaaggtgggcggatcacctgatgtcaggggttcgagaccagcctggccaacatggtgaaaccctgttgctactaaaaatacaaaaattggctgggtgtggtgtcacatgccagtaaccccagctactagggaggctgaggcaggagaatcacttgaacccgggaggcagaggttgcagtgagctgagattgcaccactacactccagcctggatgacagagtgagacttcatctcaaaaaaaaaaaaaaacaaaaaaaaacaacccggtagcattgtcccttccccactgacaaacttatcaaatccagaagctttagagtttcgtctctaattatttttctcctgaacaaaattacccaagtcaaaacaaaatgtatttttagaattacggcagcatacgacctgaattttgtgagtttcgtggctttatcttaaatcaccatttccctaaaaatggtttctttctccttagaaatgctggtggcaacttgatgaaacagccaaatgcaccagggcaggtcactttcccattacactgattccacaattaaaaaaaaaaaagaaaaaaaactcattgagatagctacagttctataggttaatttaaagcctcctttttctactcatttttgaaagcaaaattacattttactattttacataaccagtgaaaagacgttgaaagcctacagctcactgtttttggtgctctggaaatgttgagggtgggtttttaaccagtgatttttaacgtgcagtgaatttgttagacttttaaacaccagctaaggtagtcaaacttgatccccattaaaaatcaaggaattaggggtcgggggagggtttaggagtgatccagaatgacctcccagaattactgtgcgtacaactttatttttcagagttttcattggaatggtaagagttttatgaaagacagttttaaaacttattctgagttaaatattaatactttaaaaaattattgtactagacttattgcagccttttgaaagtagcagagtttcatcataccacatatataacagagcataaattttctataatcaggcaccttttgctgcttttgagtaagactgttttcctgtttaagtgttaagcatcgccagacataaaaatctattctctcctctcgattgtagcatagcctgacagctctagatacagcatttctatgatgaaaaatgagtatccatcaggaaatctagaagactagccgtgttttctcagactccacctttgtttgcactctgttgcctgtgaggagctttctggcatgtgattatttacttcaaaactagagttccaagcacctacattaattattttatattgtgtgcagaatagtatatcttttaatgtcagatatgatacactgcacatattgcttttgcactcttaaaatttttgtactaaataatagaaaatatttatattctttgagtgtgagctttgaatagatggcattatcactttattgtttttttaacaaaaactttttctcaattattctattgcaatgttattctgagcaagtcctatgccaaatatcttgtataatgtttgtatggaagattaaattttactcttgtgtggtaagactatttcagttactgattttatagttggaatttgatattccagcacaaagtccacagtgtattcagaaatccaagttggtgtcatacatttcattttgatgtgaacttttctttgctttcctttgttctaagactccattttgcaataaacgttttgacagtaaatccctttgttac

SEQ ID NO: 8760 - protein, 64 aa, Homo sapiens [sequence omitted]

SEQ ID NO: 8761 - DNA, 692 bp, Homo sapiens
tgaaatggacattttttcttaatttatgtataaatccatatgattatacataaagttctgatgcattaataaaagcagccaaatagggccaaagagaaaaataacaggactctgtactggacctaactttatcattaattaggtaatattttcctcatttctttactgctgccattttcctcaccagtattccagagatggtcatagctcattactctaccaccaagaacctaaaaggaattagaatacagcagaattggcctcagtgaagagcttaaaattgttctcctcgtagaactggactattgatcattaccacgtgacgttggctctattactttctgttcccaatgtccttctagtggtttgaaaatgttaaaacatccctaaaatctaaatcatataatcagaattctatagtgtcccactctatctgtaaagatcatttggaagactttagactctattaattttaaaaggaatatttattagccatatgcagaatttctaatgatgatattgtacagcttctaattcacttttcagatcagtgtttgaaatggcaattatcagtgttggatttagttccaactacttgatttacaaaaatgtacatttagaggttaaaagaaacatgagctgagattgcaccactacactccagcctggatgacagagtgagacttcatctc

SEQ ID NO: 8762 - protein, 40 aa, Homo sapiens
KEYLLAICRISNDDIVQLLIHFSDQCLKWQLSVLDLVPTT

SEQ ID NO: 8763 - DNA, 498 bp, Homo sapiens
atggtcaaccccaccgtgttcttccacatctctgtcgacggtgagtccttgggccgcatctcttttgagctgtttgcagacaagtttccaaagacagcagaaaacttttgtgctctgaatactggagagaaaggatttggttacaagggttgctgctttcacagaattattccagggtttatgtgtcatggtggtgacttcacacaccataatggcactggtggcaagtcaatctacggggagaaagttgatgatgacaacttcatcctgaagcatacaggtcctggcatattgtccatggcaaatgctggacccaacacaaatggttcccagtttttcatctgcactgccaagtctgagtggttggatagcaagcatgtggtcattggcaaggtgaaagaaggcatgaatattgtggaggccatggagcactttgggtccaggaatggcaagaccagcaagaaggtcaccattcctgactttggacaactcgaataa

SEQ ID NO: 8764 - protein, 165 aa, Homo sapiens [sequence omitted]

SEQ ID NO: 8765 - DNA, 518 bp, Homo sapiens
gagctgttcctattcggccatcttggctcctccgctctatttgcagttcttaaagggccccaggatcctctattaaatgtgtggtccatgaaccagcagcttcagcatgacctgagagctcataacctcgtctctacaaaaaatacaaaaaaagttagccaggcatggtggtacacgcctatggtctcagcaacttgggaggctgaggccaagtctcgccacatggcatcatttcctcctcacctgcagaatcgctgtgacttatggctcctctgattgcacctgctttcaccagcagccctggaagagagctcttctgtgtggataagagttgagagatcttggtttcattacttgtttaaattggaccctctcaaatgaatgtaagcacataatggggggactacactatgagattaaaaggaatccagctgttaccagaaatgggtgcctgccaggtttatccaccaaattctttccacttcatgtcattaaaataaaatttgagttttaaaatg

SEQ ID NO: 8766 - protein, 62 aa, Homo sapiens
MNQQLQHDLRAHNLVSTKNTKKVSQAWWYTPMVSATWEAEAKSRHMASFPPHLQNRCDLWLL

SEQ ID NO: 8767 - DNA, 1877 bp, Homo sapiens
ctctggtctcctgactctggcagggggaacatttgcactgttcttgttccttaccccaggagctggcctattgcacaacctcaggaaacagcccctatgcaatcctggcccacagagcggacatgttctggtttttattcagcagcttttttatgaagtgtgttttcctttcccatcatgtcatctggaagcaattcctcccaacagctggatttgctttcacaattggtaaacaccgcgaatggaaggccggggacgatgcggagctccccggaggagccttgtccccacccgcttggctcgcgttctgaagcttatcgcgggtgcctgcacaagcctcatcaaaatcgagggcgtcctccagcaggcgacccacattgcattccccgcttaagagggtcaacgtgttcttcgggggagaaattttctgaatgctttgcagataaaattgatcagatgcaggccagattgccagctgccggggccgcgtgcgcctgtggaggccccaccagcgcggggcaccagcgcctcggggtccgggggaggcctctctctgcaccgccgccaccaaagccagtaagagagggcaaaaccccaaagagcactgactgggccgtcaaggaagatgaatgtctccccaaaagtgctcctcggggacaagtttccacgcagatgcaaccgggaacgccggccaggctccggaaggcgaggccccagagcgcagcggcctccaagcgcgggctcagcctgtcgcctccgcagccagggcccaggaggccgctcttccggggtcaccaacacggctcgttctgagcctagaggcccagggcacagtgtgagccggaatacggtgtaggggacacagctcaggccccaggcactccctcctgtcgcagaagaaatgctgttctttgatcaatgtttctaatgtggggaaaccagccgagcacgtggctgaactctcggagggagcacggggtgctggtgagcccccgctctgatgcacagagacgctgctggccaggctggggtgggttgcaaaggcttccttccatgcaccaccaaccctgtgggcagccagggcctagctctcatgaaggggccttcccagggcaaagtgggcctctgactgcaacgttctctgggcagagataggcatccttcccactgcacaaacaaaaggagaccgtcaaggggagaggctcaccagaggaccctggtgagggcgacgcccaactcctcagcacaaggctgtgcttcttccatggagcccgtttgcctgggcccagcgcgtgcggagtgcgttccttctcgctccctctgtcctgtgggccctcctctctctccctccagcctggtggaagctttattctcgtcgggggccagaggacagaaactacatcatacattttcccgtgcgtcatgttatcttgcctggaattttgaaaatctgtgagtttctggtttttccatggcaaggctcattcctccagaccttagtcactctgctctggctgcctggactgctagagaggggcctcagggcgcacctggagaaattcactggggcccaggtcagagggatgggtgggtgagagcaaccccttccttaatagttcaaaatggccctctggcttaaagagaccgaagccacgtaacaaccaaatgcaatgtgtgggccgtgtttggatcctgattcaaacaaaccaactggaagaggagatttggggataatcaggaagatttgaattgggactgcgtagcagaaaatagcaaagaattattgttaattttgatatgtgcgataatggtgtggtagttatagaagaaaacatgcttatcttttaaatggtgtatattaaagtatttaagggtga

SEQ ID NO: 8768 - protein, 211 aa, Homo sapiens [sequence omitted]

SEQ ID NO: 8769 - DNA, 531 bp, Homo sapiens
atgtccagagcccttgatgtcctgccaatgaaggaggaggatgtcctcaagttccttgcagcaggaacccacttaggtgacactaattttgacttccaaatggaacagtacatctataaaatgaaaagtgatggcatctacatcctaaatcagaagaagacctgggagaagttgctgctggcagcttgtgccattgttgccattgaaaaccctgctgatgtcagtgtcatatcctccaggaaaactggccagaaagccacgccgttgtttgctgctgtcactggagccactcttgttgctggctgctttactcctagaacattctctaaccagatctcagcagccttccgggagccacagcttctgcctctcctcctcctctcctctgtacgtcagccagcacctcagcttcgtcctcacaggggactctcacggctggaaagacttggttctatggaaacagaacgcactgattcactgatgagctccatggagcttcaaacacaggccacatacacgggcaccttatga

SEQ ID NO: 8770 - protein, 176 aa, Homo sapiens
MSRALDVLPMKEEDVLKFLAAGTHLGDTNFDFQMEQYIYKMKSDGIYILNQKKTWEKLLLAACAIVAIENPADVSVISSRKTGQKATPLFAAVTGATLVAGCFTPRTFSNQISAAFREPQLLPLLLLSSVRQPAPQLRPHRGLSRLERLGSMETERTDSLMSSMELQTQATYTGTL

SEQ ID NO: 8771 - DNA, 4348 bp, Homo sapiens
gcgcaggtgccgctcggcgcccggcccgcccgttccgccgctgtcgccgccgtcgtgcgtgccgctcggcggaggggacgggcctgcgttctctcctccttcctccccgcctccagctgccggcaggacctttctctcgctgccgctgggaccccgtgtcatcgcccaggccgagcacgatgccccctaaaaagggaggtgatggaattaaaccacccccaatcattggaagatttggaacctcactgaaaattggtattgttggattgccaaatgttgggaaatctactttcttcaatgtgttaaccaatagtcaggcttcagcagaaaacttcccgttctgcactattgatcctaatgagagcagagtacctgtgccagatgaaaggtttgactttctttgtcaataccacaaaccagcaagcaaaattcctgcctttctaaatgtggtggatattgctggccttgtgaaaggagctcacaatgggcagggcctggggaatgcttttttatctcatattagtgcctgtgatggcatctttcatctaacacgtgcttttgaagatgatgatatcacgcacgttgaaggaagtgtagatcctattcgagatatagaaataatacatgaagagcttcagcttaaagatgaggaaatgattgggcccattatagataaactagaaaaggtggctgtgagaggaggagataaaaaactaaaacctgaatatgatataatgtgcaaagtaaaatcctgggttatagatcaaaagaaacctgttcgcttctatcatgattggaatgacaaagagattgaagtgttgaataaacacttatttttgacttcaaaaccaatggtctacttggttaatctttctgaaaaagactacattagaaagaaaaacaaatggttgataaaaattaaagagtgggtggacaagtatgacccaggtgctttggtcattccttttagtggggccttggaactcaagttgcaagaattgagtgctgaggagagacagaagtatctggaagcgaacatgacacaaagtgctttgccaaagatcattaaggctgggtttgcagcactccaactagaatactttttcactgcaggcccagatgaagtgcgtgcatggaccatcaggaaagggactaaggctcctcaggctgcaggaaagattcacacagattttgaaaagggattcattatggctgaagtaatgaaatacgaagattttaaagaggaaggttctgaaaatgcagtcaaggctgctggaaagtacagacaacaaggcagaaattatattgttgaagatggagatattatcttcttcaaatttaacacacctcaacaaccgaagaagaaataaaatttagttattgctcagataaacatacaacttccaaaaggcatctgatttttaaaaaattaaaatttctgaaaaccaatgcgacaaataaagttggggagatgggaatctttgacaaacaaattatttttatttgttttaaaattaaaatactgtgtacccccccccccccatgaaatgcaggttcactaaatgtgaacagctttgcttttcacgtgattaagaccctactccaaattgtagaagcttttcaggaaccatattactctcatgatacttcattaatctccatcatgtatgccaagcctgacacatttgacagtgaggacaatgtggcttgctcctttttgaatctacagataatgcatgttttacagtactccagatgtctacactcaataaaacatttgacaaaaccagccttggtgtgtttggggatgtctgtattgactgactgtggtgtgctgaatgcgatacggcacctggtggttgctgattacagaattttaaggcgtgtgtatgacacagtaactggcagtgtggggcagctgcaattgtatcttaaaagtgagtctttcatgggaatcagaagaatagtataccagggatttgtctcaaaaaagttaattaatttatagatcaacatttattgaaagatgatagcaatgatattatgagggatatgagataggtgactgaccacaaagaagaaaattctgtctcaaaaattaaagaattttgtttgttattgttgttctgaccatattgaaaagaggttcacttttaatctttcctttgaaattattaaattgtaaaaactgacccattgatgtctggtgggttatgttttgcttcaattcagcaatgtgtataaaagttcctacactgattttgaaatactaagatcagactttgaaaattttaaaaattctttcattcttacttttcagatatttgagagcagtcgaagtggtagtatgggtaagttaagcacttcttaacattgtagcagaaaattccaaaagaaagactagaacaaattggtaatttggagaccctttgccacttagccttctcttgtgatgatggcctgaaagctctctcggccctgagcctccctttctctcccatgtttccattcctgtgagacctcccttccttgtccttgtcctctgcccttttgtgctcttctgtgatcacaggaccatttccatggaatgcagattcatacccagccagcctttgcctctactgtatcgctttgggactttaaagatgcagaagtattagaacacacacaaacttaaaatggaaagttaccaaatgtagcactagaggcaagaaaaggggtgattttttaaagatttggctatacttaagatatttaaagaggatgaggttgagtcgtgagtataatttagaagctctccagtgagtatttttttagtatcaaatagtgatcttcttttgctaacataaaaatgagtaaactacagcagagaaataagaataaaactaatgaagggttttttaaaagaactaaataaaacaaataaaactaggctacaggtatagctgaccaagtttgctgtgaaaaatccttgttatatctatttctgtattggagtaatgtgtagattagtggattgttagggatttcagcagtataagaaagaatcaaatatcttgcttttgggtcttctccaaagtaaattgcatggacttcttaaagaagtttgaaatcagtaaaaagacattaggatcatgcaattttactttgtctagcttctaatgtggtaaattgcacattgtgcaacagaaccattaataaaagaaaggagttagttttgaggtaactgcattcattaggggctgaaaataaatgttaaaaatgtttaatttggttagaagttctacaacattgtatgtacatatacaaaatttcattttctctgaaagtcgagaattccaagaactgttacatataatcatatatatgcctatatctaaacgttttccctcctttaatattgataaagttaatatattttaggatgttatgtaaatatttttgcatgtatctgtagctccatcttaatcaaatttatggttaaaagagatttgaggccaggcgtggaggctcacacctataatcccaacactttgggaggccgaggtgggaggatcacttgagcacaggagtttgagaccagcctgtgcaacatcatgaaacatcatctctacataaaaaaatacatatatacaaaaattagctgggcatcatggcacacacctgtagtcccagctacttaggaggctgagatgggaggattgatcgatcgcttgagcctgggaggtggaggctactgtgagccatgatcatgccactgcactccagcctgggcaacagagtgagaccctgtctccaaagagaaagagaaacttgagaaggcttgtgcccaaagcttgaagaaagattgtaatagcatttagttgtgttttatcatgttatcttcataacatgcattttgcatatggctcagagcagagccggatctcccaaggaagcacaaatagtttttgtcgctaacttagttatgagtgaagcctctgttcacttataacttgccagtttcattggtggaataagtccccttactcatgattcatcaatattcctatattaaaattccagtttgatgtttgtctctagttgtctgtgtataatatttccaaagctcctttgtaaaccccgtctcctttcattcagagagtcagagacggtatctcctcctcctgcctcttctattgttctgattagtctacttaaattcacttgatgctctttttattttacaagagacttgagaaatgtcggttgttcctaatggcaaactactttagctgggaaaattcatttcaacttattttaagcttgtaaaatacactgtggtgataaaataaaagagctgggtttg

SEQ ID NO: 8772 - protein, 396 aa, Homo sapiens; identical to SEQ ID NO: 688

SEQ ID NO: 8773 - DNA, 1757 bp, Homo sapiens
gttccgccgctgtcgccgccgtcgtgcgtgccgctcggcggaggggacgggcctgcgttctctcctccttcctccccgcctccagctgccggcaggacctttctctcgctgccgctgggaccccgtgtcatcgcccaggccgagcacggaaatctactttcttcaatgtgttaaccaatagtcaggcttcagcagaaaacttcccgttctgcactattgatcctaatgagagcagagtacctgtgccagatgaaaggtttgactttctttgtcaataccacaaaccagcaagcaaaattcctgcctttctaaatgtggtggatattgctggccttgtgaaaggagctcacaatgggcagggcctggggaatgcttttttatctcatattagtgcctgtgatggcatctttcatctaacacgtgcttttgaagatgatgatatcacgcacgttgaaggaagtgtagatcctattcgagatatagaaataatacatgaagagcttcagcttaaagatgaggaaatgattgggcccattatagataaactagaaaaggtggctgtgagaggaggagataaaaaactaaaacctgaatatgatataatgtgcaaagtaaaatcctgggttatagatcaaaagaaacctgttcgcttctatcatgattggaatgacaaagagattgaagtgttgaataaacacttatttttgacttcaaaaccaatggtctacttggttaatctttctgaaaaagactacattagaaagaaaaacaaatggttgataaaaattaaagagtgggtggacaagtatgacccaggtgctttggtcattccttttagtggggccttggaactcaagttgcaagaattgagtgctgaggagagacagaagtatctggaagcgaacatgacacaaagtgctttgccaaagatcattaaggctgggtttgcagcactccaactagaatactttttcactgcaggcccagatgaagtgcgtgcatggaccatcaggaaagggactaaggctcctcaggctgcaggaaagattcacacagattttgaaaagggattcattatggctgaagtaatgaaatacgaagattttaaagaggaaggttctgaaaatgcagtcaaggctgctggaaagtacagacaacaaggcagaaattatattgttgaagatggagatattatcttcttcaaatttaacacacctcaacaaccgaagaagaaataaaatttagttattgctcagataaacatacaacttccaaaaggcatctgatttttaaaaaattaaaatttctgaaaaccaatgcgacaaataaagttggggagatgggaatctttgacaaacaaattatttttatttgttttaaaattaaaatactgtgtacccccccccccccatgaaatgcaggttcactaaatgtgaacagctttgcttttcacgtgattaagaccctactccaaattgtagaagcttttcaggaaccatattactctcatgatacttcattaatctccatcatgtatgccaagcctgacacatttgacagtgaggacaatgtggcttgctcctttttgaatctacagataatgcatgttttacagtactccagatgtctacactcaataaaacatttgacaaaaccagccttggtgtgtttggggatgtctgtattgactgactgtggtgtgctgaatgcgatacggcacctggtggttgctgattacagaattttaaggcgtgtgt

SEQ ID NO: 8774 - protein, 238 aa, Homo sapiens; identical to SEQ ID NO: 686

SEQ ID NO: 8775 - DNA, 1429 bp, Homo sapiens
gcgcaggtgccgctcggcgcccggcccgcccgttccgccgctgtcgccgccgtcgtgcgtgccgctcggcggaggggacgggcctgcgttctctcctccttcctccccgcctccagctgccggcaggacctttctctcgctgccgctgggaccccgtgtcatcgcccaggccgagcacgatgccccctaaaaagggaggtgatggaattaaaccacccccaatcattggaagatttggaacctcactgaaaattggtattgttggattgccaaatgttgggaaatctactttcttcaatgtgttaaccaatagtcaggcttcagcagaaaacttcccgttctgcactattgatcctaatgagagcagagtacctgtgccagatgaaaggtttgactttctttgtcaataccacaaaccagcaagcaaaattcctgcctttctaaatgtggtggatattgctggccttgtgaaaggagctcacaatgggcagggcctggggaatgcttttttatctcatattagtgcctgtgatggcatctttcatctaacacgtgcttttgaagatgatgatatcacgcacgttgaaggaagtgtagatcctattcgagatatagaaataatacatgaagagcttcagcttaaagatgaggaaatgattgggcccattatagataaactagaaaaggtggctgtgagaggaggagataaaaaactaaaacctgaatatgatataatgtgcaaagtaaaatcctgggttatagatcaaaagaaacctgttcgcttctatcatgattggaatgacaaagagattgaagtgttgaataaacacttatttttgacttcaaaaccaatggtctacttggttaatctttctgaaaaagactacattagaaagaaaaacaaatggctgctggaaagtacagacaacaaggcagaaattatattgttgaagatggagatattatcttcttcaaatttaacacacctcaacaaccgaagaagaaataaaatttagttattgctcagataaacatacaacttccaaaaggcatctgatttttaaaaaattaaaatttctgaaaaccaatgcgacaaataaagttggggagatgggaatctttgacaaacaaattatttttatttgttttaaaattaaaatactgtgtacccccccccccccatgaaatgcaggttcactaaatgtgaacagctttgcttttcacgtgattaagaccctactccaaattgtagaagcttttcaggaaccatattactctcatgatacttcattaatctccatcatgtatgccaagcctgacacatttgacagtgaggacaatgtggcttgctcctttttgaatctacagataatgcatgttttacagtactccagatgtctacactcaataaaacatttgacaaaaccag

SEQ ID NO: 8776 - protein, 278 aa, Homo sapiens
MPPKKGGDGIKPPPIIGRFGTSLKIGIVGLPNVGKSTFFNVLTNSQASAENFPFCTIDPNESRVPVPDERFDFLCQYHKPASKIPAFLNVVDIAGLVKGAHNGQGLGNAFLSHISACDGIFHLTRAFEDDDITHVEGSVDPIRDIEIIHEELQLKDEEMIGPIIDKLEKVAVRGGDKKLKPEYDIMCKVKSWVIDQKKPVRFYHDWNDKEIEVLNKHLFLTSKPMVYLVNLSEKDYIRKKNKWLLESTDNKAEIILLKMEILSSSNLTHLNNRRRNKI

SEQ ID NO: 8777 - DNA, 1656 bp, Homo sapiens
gttccgccgctgtcgccgccgtcgtgcgtgccgctcggcggaggggacgggcctgcgttctctcctccttcctccccgcctccagctgccggcaggacctttctctcgctgccgctgggaccccgtgtcatcgcccaggccgagcacggaaatctactttcttcaatgtgttaaccaatagtcaggcttcagcagaaaacttcccgttctgcactattgatcctaatgagagcagagtacctgtgccagatgaaaggtttgactttctttgtcaataccacaaaccagcaagcaaaattcctgcctttctaaatgtggtggatattgctggccttgtgaaaggagctcacaatgggcagggcctggggaatgcttttttatctcatattagtgcctgtgatggcatctttcatctaacacgtgcttttgaagatgatgatatcacgcacgttgaaggaagtgtagatcctattcgagatatagaaataatacatgaagagcttcagcttaaagatgaggaaatgattgggcccattatagataaactagaaaaggtggctgtgagaggaggagataaaaaactaaaacctgaatatgatataatgtgcaaagtaaaatcctgggttatagatcaaaagaaacctgttcgcttctatcatgattggaatgacaaagagattgaagtgttgaataaacacttatttttgacttcaaaaccaatggtctacttggttaatctttctgaaaaagactacattagaaagaaaaacaaatggttgataaaaattaaagagtgggtggacaagtatgacccaggtgctttggtcattccttttagtggggccttggaactcaagttgcaagaattgagtgctgaggagagacagaagtatctggaagcgaacatgacacaaagtgctttgccaaagatcattaaggctgggtttgcagcactccaactagaatactttttcactgcaggcccagatgaagtgcgtgcatggaccatcaggaaagggactaaggctcctcaggctgcaggaaagattcacacagattttgaaaagggattcattatggctgaagtaatgaaatacgaagattttaaagaggaaggttctgaaaatgcagtcaaggctgctggaaagtacagacaacaaggcagaaattatattgttgaagatggagatattatcttcttcaaatttaacacacctcaacaaccgaagaagaaataaaatttagttattgctcagataaacatacaacttccaaaaggcatctgatttttaaaaaattaaaatttctgaaaaccaatgcgacaaataaagttggggagatgggaatctttgacaaacaaattatttttatttgttttaaaattaaaatactgtgtacccccccccccccatgaaatgcaggttcactaaatgtgaacagctttgcttttcacgtgattaagaccctactccaaattgtagaagcttttcaggaaccatattactctcatgatacttcattaatctccatcatgtatgccaagcctgacacatttgacagtgaggacaatgtggcttgctcctttttgaatctacagataatgcatgttttacagtactccagatgtctacactcaataaaacatttgacaaaacc

SEQ ID NO: 8778 - protein, 238 aa, Homo sapiens; identical to SEQ ID NO: 686

SEQ ID NO: 8779 - DNA, 1795 bp, Homo sapiens
ggtctgcgcgcaggtgccgctcggcgcccggcccgcccgttccgccgctgtcgccgccgtcgtgcgtgccgctcggcggaggggacgggcctgcgttctctcctccttcctccccgcctccagctgccggcaggacctttctctcgctgccgctgggaccccgtgtcatcgcccaggccgagcacgatgccccctaaaaagggaggtgatggaattaaaccacccccaatcattggaagatttggaacctcactgaaaattggtattgttggattgccaaatgttgggaaatctactttcttcaatgtgttaaccaatagtcaggcttcagcagaaaacttcccgttctgcactattgatcctaatgagagcagagtacctgtgccagatgaaaggtttgactttctttgtcaataccacaaaccagcaagcaaaattcctgcctttctaaatgtggtggatattgctggccttgtgaaaggagctcacaatgggcagggcctggggaatgcttttttatctcatattagtgcctgtgatggcatctttcatctaacacgtgcttttgaagatgatgatatcacgcacgttgaaggaagtgtagatcctattcgagatatagaaataatacatgaagagcttcagcttaaagatgaggaaatgattgggcccattatagataaactagaaaaggtggctgtgagaggaggagataaaaaactaaaacctgaatatgatataatgtgcaaagtaaaatcctgggttatagatcaaaagaaacctgttcgcttctatcatgattggaatgacaaagagattgaagtgttgaataaacacttatttttgacttcaaaaccaatggtctacttggttaatctttctgaaaaagactacattagaaagaaaaacaaatggttgataaaaattaaagagtgggtggacaagtatgacccaggtgctttggtcattccttttagtggggccttggaactcaagttgcaagaattgagtgctgaggagagacagaagtatctggaagcgaacatgacacaaagtgctttgccaaagatcattaaggctgggtttgcagcactccaactagaatactttttcactgcaggcccagatgaagtgcgtgcatggaccatcaggaaagggactaaggctcctcaggctgcaggaaagattcacacagattttgaaaagggattcattatggctgaagtaatgaaatacgaagattttaaagaggaaggttctgaaaatgcagtcaaggctgctggaaagtacagacaacaaggcagaaattatattgttgaagatggagatattatcttcttcaaatttaacacacctcaacaaccgaagaagaaataaaatttagttattgctcagataaacatacaacttccaaaaggcatctgatttttaaaaaattaaaatttctgaaaaccaatgcgacaaataaagttggggagatgggaatctttgacaaacaaattatttttatttgttttaaaattaaaatactgtgtacccccccccccccatgaaatgcaggttcactaaatgtgaacagctttgcttttcacgtgattaagaccctactccaaattgtagaagcttttcaggaaccatattactctcatgatacttcattaatctccatcatgtatgccaagcctgacacatttgacagtgaggacaatgtggcttgctcctttttgaatctacagataatgcatgttttacagtactccagatgtctacactcaataaaacatttgacaaaacc

SEQ ID NO: 8780 - protein, 396 aa, Homo sapiens; identical to SEQ ID NO: 688

SEQ ID NO: 8781 - DNA, 1490 bp, Homo sapiens
gcgcaggtgccgctcggcgcccggcccgcccgttccgccgctgtcgccgccgtcgtgcgtgccgctcggcggaggggacgggcctgcgttctctcctccttcctccccgcctccagctgccggcaggacctttctctcgctgccgctgggaccccgtgtcatcgcccaggccgagcacgatgccccctaaaaagggaggtgatggaattaaaccacccccaatcattggaagatttggaacctcactgaaaattggtattgttggattgccaaatgttgggaaatctactttcttcaatgtgttaaccaatagtcaggcttcagcagaaaacttcccgttctgcactattgatcctaatgagagcagagtacctgtgccagatgaaaggtttgactttctttgtcaataccacaaaccagcaagcaaaattcctgcctttctaaatgtggtggatattgctggccttgtgaaaggagctcacaatgggcagggcctggggaatgcttttttatctcatattagtgcctgtgatggcatctttcatctaacacgtgcttttgaagatgatgatatcacgcacgttgaaggaagtgtagatcctattcgagatatagaaataatacatgaagagcttcagcttaaagatgaggaaatgattgggcccattatagataaactagaaaaggtggctgtgagaggaggagataaaaaactaaaacctgaatatgatataatgtgcaaagtaaaatcctgggttatagatcaaaagaaacctgttcgcttctatcatgattggaatgacaaagagattgaagtgttgaataaacacttatttttgacttcaaaaccaatggtctacttggttaatctttctgaaaaagactacattagaaagaaaaacaaatggttgataaaaattaaagagtgggtggacaagtatgacccaggtgctttggtcattccttttagtggggccttggaactcaagttgcaagaattgagtgctgaggagagacagaagtatctggaagcgaacatgacacaaagtgctttgccaaagatcattaaggctgggtttgcagcactccaactagaatactttttcactgcaggcccagatgaagtgcgtgcatggaccatcaggaaagggactaaggctcctcaggctgcaggaaagattcacacagattttgaaaagggattcattatggctgaagtaatgaaatacgaagattttaaagaggaaggttctgaaaatgcagtcaaggctgctggaaagtacagacaacaaggcagaaattatattgttgaagatggagatattatcttcttcaaatttaacacacctcaacaaccgaagaagaaataaaatttagttattgctcagataaacatacaacttccaaaaggcatctgatttttaaaaaattaaaatttctgaaaaccaatgcgacaaataaagttggggagatgggaatctttgacaaac

SEQ ID NO: 8782 - protein, 396 aa, Homo sapiens; identical to SEQ ID NO: 688

SEQ ID NO: 8783 - DNA, 3120 bp, Homo sapiens
cagagaaagaggaaccagaagaaagagaaactcgcgacaacagagttgccgaaagagaagtgttggcgcctcaaacttgaggatcagcttcttgggccccactccagggtgtcgcgggggtcgggttctttccgccgccccccgaaagattctcagctaaccctttccccgccgagaccaagaggccctcactctgacaccactccgggagccaagctactgtaaggagctgataccacccctcgccggcgcgaaccgcccatctccccagacccgcccaccccctgctgcgaatccctgacgttctagcccggcgaaggtcctcttaaattaggaaacaatagctatttaagaagaagcgcaaataacccgcgctctgcgcgcccaatcgtgggattcttgggagttccccgcgggcaaggaagtctgctgctccccgcagctgcggaggagaggagggagcctgcgtgctggggcagggtgtcgcgaacttggggcaacccacctccagagccccgcccccgctttcccgcctgccggggacctgccgaacgcggaaccaccctccttcctgaggcaaatttgggaggggagaggtccagaagctgtagagtcggggcgccaagcgccagattctgccgctcggaagttgggggcagtccccagtcccgcctcaggcccccgcgctcacagggcgctccgccgagggcgcgggccaggcgcgcggtgtcacctccacgaagtcatttacttgccctgaaggagctggccctcgaccccttggaggatggagattcctcccattccctcctccgcctcccccaggtcggcgaagagacgtggaattgagctggaccgatgattccgcgagctctgtaattatgcacacactgaaatcttcaccgttgacttaagttacttggcgctgcgagggctggggccctgcatattgattaaatgcagcctctatttacctaaacaataaatgtagagattagcaacgttcacttgatcacaataatgggattgacaattaaggggcaatgcatcccagatgtagcggaacctatgggctgcgtgcagcaggcagagggcttctcagagaggggcgctgggcagttgcggcggcggaggtagtgcagagcaggaagcagcgcggaagcacagcgggaggcggagggggacgcccagcctcgtcaaggtcttcggccaccccgcccgggaggctcgaaactggctttggggtacctgaatgcctcgactcccagggagacatcgggagctcggagccactctccctgtggcgatggcacctgcctcaaggccgtctcgcttgctgatgcctggccgggaaggaggatggacgccgctggcatgtgccctggctctggaaaaactggcaggaatttccttgtcgtgagaagatggacgagtgtgtctgcagccgaggagacaactacaaacagactttgggcagggaaggcgggcgggcgggggtgggggtgggggcgggggcctgctttgatcgctccagctctgttgtaattttgtcttcgccagatagattagctggaaccgccagccctagcttggagttccgttccacggagtaccctccctccccacccccagcgtcatctcgcgcctggagccgggtcgccgctccttccgaagtctcgctggaaacttcaagggctgatggttctgtgttcttgacgtaattaggaggccacgcagctctccaacactccgttaaacaaatatactcctgcaggctcagatttgaagagggaaggttccagccaagtccaccttaagcctgagtttgggcgactacagaatccaggaagaaaatctagatggcatggtcgctccggtctcagttctacaggggagggaagaaagggggtgttagtggggatatttgctgttcatttttcccgcaatctcccttccaaatcagtcactgattaatgagcaaagcccatgccacaagttatagattactgtggactgaggatcattttgttaatatcaggcaagaaacttgccttacttgcatccctgtgtctgtatttacagtaacaacttccttagtcacaaactgatatgcttttagccataccttttcttcttacttacttatttttagcatcatcaggagttgggataggaaataacatgggggaggggtgtgttaaagggaaggaaggaaaagccatcctttatcccagagtgtcctggaggtatgcctacactcctgtttaacatcttgtggttgtagtgccttctccaagccctggatggaggaggaaagagttggaagcctcctcaaatctgcctatgaaagggtaaaactgaggaaactggtaccctagctatgagaagctgagtaatgatcagaatcctctggcctctggcttttcttgatattagttcaggtctatgcaaaaaaattgctttagtgtctccaaaggtggttccattagagttggctgagacaatacatgtgcatcattttggaagagatgctcttaaaaagaagaaagccactacagaatgccacatttgcttaggtctaagacccttctgtggtagtcggtgagggagggaggaaagtaaaaccccaagctgaataggccccccatagtttccgagtgatgcagtaaacaaatctatgatgcttgttgaataatcttccaataattgcagtcattaaaatcatcacacagtctacagtcaccttccttcctttgacacaccagtctttcccttaattgttaatgcatttttggctcagataaacacatagaggccagcttaaaatatatggcccagatacatctaacagcagaaaattagttgtgtaacaaacgtttggactgtgcttaatagactaggggttttcaatttcttcagcagaccctacagaggcaagaaagatttgcatcttctaccactgctaaatagcagtgacgcctctgagatacaaaaaaaaaaaaaaaagaaaaaaaagatgaaagtcccattggcctattgaatcttccttgctctttcatttgcaagggttgggctggaattaggacattatagaacaaatattaaaggaaagcttaacag

SEQ ID NO: 8784 - protein, 61 aa, Homo sapiens
MDAAGMCPGSGKTGRNFLVVRRWTSVSAAEETTTNRLWAGKAGGRGWGWGRGPALIAPALL

SEQ ID NO: 8785 - DNA, 1603 bp, Homo sapiens
tggttctgtgttcttgacgtaattaggaggccacgcagctctccaacactccgttaaacaaatatctctttcttaggaagcggagagaggggcagaaaacgtgcacctcgccacccaccggacaagccgagaggaccttgtctttgcttgaaaagttttctagataaatcgctcgggtggttctaagctatgacgaactagaggctgggcccggttcttctccagaacagcgtgtggatgtaaaggagatgaaatcgtcctcccccactgctttctttttcttccccatataaatcagtcatataattcattcgcattgtttaaggtacattgatcaatctaatggcttgtaatagtctcctaattgccacttgcagactcctgcaggctcagatttgaagagggaaggttccagccaagtccaccttaagcctgagtttgggcgactacagaatccaggaagaaaatctagatggcatggtcgctccggtctcagttctacaggggagggaagaaagggggtgttagtggggatatttgctgttcatttttcccgcaatctcccttccaaatcagtcactgattaatgagcaaagcccatgccacaagttatagattactgtggactgaggatcattttgttaatatcaggcaagaaacttgccttacttgcatccctgtgtctgtatttacagtaacaacttccttagtcacaaactgatatgcttttagccataccttttcttcttacttacttatttttagcatcatcaggagttgggataggaaataacatgggggaggggtgtgttaaagggaaggaaggaaaagccatcctttatcccagagtgtcctggaggtatgcctacactcctgtttaacatcttgtggttgtagtgccttctccaagccctggatggaggaggaaagagttggaagcctcctcaaatctgcctatgaaagggtaaaactgaggaaactggtaccctagctatgagaagctgagtaatgatcagaatcctctggcctctggcttttcttgatattagttcaggtctatgcaaaaaaattgctttagtgtctccaaaggtggttccattagagttggctgagacaatacatgtgcatcattttggaagagatgctcttaaaaagaagaaagccactacagaatgccacatttgcttaggtctaagacccttctgtggtagtcggtgagggagggaggaaagtaaaaccccaagctgaataggccccccatagtttccgagtgatgcagtaaacaaatctatgatgcttgttgaataatcttccaataattgcagtcattaaaatcatcacacagtctacagtcaccttccttcctttgacacaccagtctttcccttaattgttaatgcatttttggctcagataaacacatagaggccagcttaaaatatatggcccagatacatctaacagcagaaaattagttgtgtaacaaacgtttggactgtgcttaatagactaggggttttcaatttcttcagcagaccctacagaggcaagaaagatttgcatcttctaccactgctaaatagcagtgacgcctctgagatac

SEQ ID NO: 8786 - protein, 69 aa, Homo sapiens [sequence omitted]

SEQ ID NO: 8787 - DNA, 3129 bp, Homo sapiens
gtgtgctcgcgcctctcgcccggcctctaagagtcgttggggccagacgctgcttccttgcctcccgcggaggccgccgccgccgccgccgccgctgccgccgccgccgctgccgccgcccgggcggcactgacgccggagtcatgcaggatgaggtcgggggattcggaacggggcgtctccaggttgctggcgtccgtgtcactgtcgctgccctttttgcccccgccgcccccgttgtgcgtcttaatgtgtttgctcaggtggtcgctgcgcatgaagcgcttgttgcacaccggacaggcgaagcgcttctcgcccgtgtgagtccgcagatgccgctgcagctcgtccgagcgcgtgaagcgcttgccgcagaagagccagttgcacacgaagggccgctcgcccgtgtgccagcgcaggtgcgccttcaggtgcgacgtcttcccgtacaccttgccgcagcccggaatgtggcagctgtgcaggcccttgcgccgcaggctcgccccggccgggcccagccgctccgcctcctggcagttggggcagtcgcaggtggcgcggcccgagtagcggcgggcagagcgtgccgagctccccccggcggcggcagccgcggcgcccgatatcatggcgctggcggcggcggctgccacggcggcgctggagtccgaataggagggcaacaccggcttgaagccgtcctgggccagcaggtgctggctggtggagagcaggtgggaggcggcggcggcggaggagccgaggcccgtggagctgaaggcggagtgcgtgagcgagctgaagtcggggttgtaggtgcccagctgcgagtgcagcgaggcctggggggcgcccgagtgcagcgagctctggagccccccagcggggttctgcacttccagccacgagcccgggctgctgtgcacgtcccaccacgacgacgccgcgccgttggtcacctcgccggccgccagcgtcgaatggaagcccgacttgtaccaggactcgtacgggtgcgccatgcccacgcgcgggtacagcccgtcggctgccgtcgtgtgcaccttggaaatgaaggccgactggccacccgcctcctgcggggacaccccggccgctgccgccgcggcagccgccgagttggagaagaggccgccgtagtcgctgctgaaggcggacgacgtgggcgacgtggaggccaggcagaaggcgctgttggcggcgcccgagccgcccgccaggccgcccgagccacggcccccggtggccaccgcgaagcccgagaggctggagccgaggttgcagctggacgaggagcgcttccaggggtgaaagccgcctttggcgaaggcgctcgactctggcagcgtcgtcagcgggctcgtgttgccgatcttgttgcaggtcgccgccagcatggccaacggggtcgttccgaagcgcggctcttcctagagtgggtgggatgggggagggagcaagaaggaggagggcaagaggaagtgggggaagaaacaaagtgcacccgtgagcagcctcgtcccctgcggctgctcccggggggtcctggctccccgcctcgcgcctcctccccacgcgcccgcggaggagtcgccgcaccgggcgcggagcaggggcgatcacccgggcgaaggtccaggcgccggaaagttgcacttcgctgaggctataaatcaaagatgcctccgtgttccccgctgcaaccctgcctacaaccggacttgggttgtcgccgtaaaccggctcatctcccagaagaccccaagtcgcccttcggggtgaagcgcgaaggtaaacacagagaccagagacaacaaacaccgggtgagggcggaggcggccgaaacagctgccagggacgggcgaaacttgcagctctcccagggtggctacgacttgacttttcttttttaatagaaaacgtttggttttaaagtttacatacacacaaaaacagcgattatgaaaacaataatccgaggataagcggccagagacagatttcaaagtcatgggcgaattggggagccgcggaaatgtaaatgtttattagcgtgactagatggactgcaaaacgattaagactgttttctggaaacaccattgtcgcataattgcaacaaaatccccaaagcaatgcgggggatggggtataaatcacgaggggaagaaaagaaacctctagcttttttttgaaaccaaatgaaaaaggacttgattaagaaggccttttcttgcaaaggcatctttctgggttccaaaaacttggggaaaaatcagtcccagaaatgtggaaagtgctaatagaagctgaagctgcagtctagcagcaacagtttctccggagccgcagaccccagaagccataacgaaaaattactccggttaaaacaagcaaatgcgttgccgcgcttgcgacttaccccgagtatagacgtggccatagcaggtctctggctgcgcagcgaggctgggagcggggctgagcctggcggctgctcggaaaaactgcttgggtcccgcgcggctcccgcgtccccgcgctcgtgccgagcggactccaggctcccgccggctaaactcagcctaagtgcgaggagcacccgctttgaagtgccgctggctgcgcctctcgcccaatgagggcgcaggcagagcagaccggagctgccccgcagccaatcagacgctccgaggggcccgagcccgggctcccggcgcgtgccagtcaagtcagctagctagggccgcgggggtgggggggagtagtgggggatacttgcggggggggggcgagggcgggctggggactgaagaaattacagtgcaattaaaaatttacactcacgcaccaagccaggtttaagtaccaatgaaaccgagccacaagcacccccccacacacaaaccaccccgagatgttgcaagttagggctgacagtcctactcgactccccacttgtaggaaaggaggcaggaggggaggagacacccagacacagcccgcaccagcagggcccaagtggagacggaaatgtgagccctcactttgtgtgtccaggcttttgcctacagaacacaacttcagcttgtatctat

SEQ ID NO: 8788 - protein, 516 aa, Homo sapiens; identical to SEQ ID NO: 690

SEQ ID NO: 8789 - DNA, 1015 bp, Homo sapiens
aaaaaagaaaaaagatagaaaaaagaaaaagtttcagaagagcagaaaaaaatacaaaggaagaaaagaaagaaaaacaagtgttcagggcataacaacagtgattctgaagagaaggacaagtctaagaagagaaagcttcatgaagaactttctagcagtcaccataaccgggaaaaagccaaggaaaagcccaggttcttaaaacacgagagttctagggaggacagcaaatggagccattctgattctgacaaaaagtccagaacccataaacatagcccagagaagagaggctctgaaagaaaggaggggagcagcagaagccacggcagggaggaaaggagccggagaagccggagcagaagtcctggtagttacaagcaaagggagacaaggaaacgggcacagcgaaatcctggtgaagagcaaagcagaagaaatgacagcagaagccatggcacagacttgtatagaggagaaaaaatgtacagagagcacccaggaggtacacatactaaagtgacacaaagagaatgaagcagaagtagagaagaaagactgtatgtgacaattacctgggaataaaaatatctccacttttttattgaatacctttagcaaggggtaaattatgtactgttgtctttctaataaaaaagctcaattttaatttttcatctctagactgtcaattcaagtacaaaactacatgagtactataagaatgaattttgcaaatatttgtaagtaagctattttggggctgtggaaatattttctgttggtaactgtttcttgttccccataccagataaaaaccgcatataactctgtgacattttctttgttctgaaacatcattaaaagaatgacagtacattgaatgggtataatttacttttttcaattcaaatttgttattctaggatttgaatttgcttgaagtgaattgtaataattattcaaattcattagtataaattaaggattaataaatctttaagacttttaa

SEQ ID NO: 8790 - protein, 30 aa, Homo sapiens
KRKKIEKRKSFRRAEKNTKEEKKEKQVFRA

SEQ ID NO: 8791 - DNA, 1919 bp, Homo sapiens
cttgctgctggaaacgcagttccggttaggcggctgagtttgtttacgttgctaacagatctagcccctgctttccctagttccagttccaagatggggaaatccttcgccaacttcatgtgcaagaaagactttcatcctgcctccaaatccaatatcaaaaaagtatggatggcagaacagaaaatatcatatgataagaagaaacaagaagaattgatgcagcaatatcttaaagaacaagaatcatatgataatagattgcttatgggagatgaacgtgtaaagaatggccttaatttcatgtatgaagccccaccaggagctaaaaaaggtacttatcaaagaagaaacagaaggagagaccgaatacaaatttgaatggcagaaaggagccccacgagaaaaatatgccaaagatgacatgaacatcagagatcagccctttggtattcaggttcgaaatgtgaggtgcattaaatgtcacaaatggggtcatgtcaacacagatcgagaatgtcctttgtttggtctttctggaatcaatgcaagttcggttcccactgatggctcagggccatcgatgcacccctcggagctaatagcggagatgagaaacagtgggtttgcactgaaacgaaatgtactggggagaaacttgaccgcaaatgatccatcacaggagtatgttgcaagtgagggtgaagaagatccagaagttgaatttttaaagtcactaacaaccaaacaaaaacagaaacttctcaggaaattagatcgactggagaagaaaaaaaagaaaaaagatagaaaaaagaaaaagtttcagaagagcagaagtaaacacaaaaaacataagtcctcttcttcctcatcttcctcctcctcctcctcttcctctactgagacttcagaaagcagtagtgagagtgagagtaacaataaagaaaaaaaaatacaaaggaagaaaagaaagaaaaacaagtgttcagggcataacaacagtgattctgaagagaaggacaagtctaagaagagaaagcttcatgaagaactttctagcagtcaccataaccgggaaaaagccaaggaaaagcccaggttcttaaaacacgagagttctagggaggacagcaaatggagccattctgattctgacaaaaagtccagaacccataaacatagcccagagaagagaggctctgaaagaaaggaggggagcagcagaagccacggcagggaggaaaggagccggagaagccggagcagaagtcctggtagttacaagcaaagggagacaaggaaacgggcacagcgaaatcctggtgaagagcaaagcagaagaaatgacagcagaagccatggcacagacttgtatagaggagaaaaaatgtacagagagcacccaggaggtacacatactaaagtgacacaaagagaatgaagcagaagtagagaagaaagactgtatgtgacaattacctgggaataaaaatatctccacttttttattgaatacctttagcaaggggtaaattatgtactgttgtctttctaataaaaaagctcaattttaatttttcatctctagactgtcaattcaagtacaaaactacatgagtactataagaatgaattttgcaaatatttgtaagtaagctattttggggctgtggaaatattttctgttggtaactgtttcttgttccccataccagataaaaaccgcatataactctgtgacattttctttgttctgaaacatcattaaaagaatgacagtacattgaatgggtataatttacttttttcaattcaaatttgttattctaggatttgaatttgcttgaagtgaattgtaataattattcaaattcattagtataaattaaggattaataaatctttaagacttttaa

SEQ ID NO: 8792 - protein, 384 aa, Homo sapiens
MALISCMKPHQELKKVLIKEETEGETEYKFEWQKGAPREKYAKDDMNIRDQPFGIQVRNVRCIKCHKWGHVNTDRECPLFGLSGINASSVPTDGSGPSMHPSELIAEMRNSGFALKRNVLGRNLTANDPSQEYVASEGEEDPEVEFLKSLTTKQKQKLLRKLDRLEKKKKKKDRKKKKFQKSRSKHKKHKSSSSSSSSSSSSSSTETSESSSESESNNKEKKIQRKKRKKNKCSGHNNSDSEEKDKSKKRKLHEELSSSHHNREKAKEKPRFLKHESSREDSKWSHSDSDKKSRTHKHSPEKRGSERKEGSSRSHGREERSRRSRSRSPGSYKQRETRKRAQRNPGEEQSRRNDSRSHGTDLYRGEKMYREHPGGTHTKVTQRE

SEQ ID NO: 8793 - DNA, 885 bp, Homo sapiens
aaaaaagaaaaaagatagaaaaaagaaaaagtttcagaagagcagaaaaaaatacaaaggaagaaaagaaagaaaaacaagtgttcagggcataacaacagtgattctgaagagaaggacaagtctaagaagagaaagcttcatgaagaactttctagcagtcaccataaccgggaaaaagccaaggaaaagcccaggttcttaaaacacgagagttctagggaggacagcaaatggagccattctgattctgacaaaaagtccagaacccataaacatagcccagagaagagaggctctgaaagaaaggaggggagcagcagaagccacggcagggaggaaaggagccggagaagccggagcagaagtcctggtagttacaagcaaagggagacaaggaaacgggcacagcgaaatcctggtgaagagcaaagcagaagaaatgacagcagaagccatggcacagacttgtatagaggagaaaaaatgtacagagagcacccaggaggtacacatactaaagtgacacaaagagaatgaagcagaagtagagaagaaagactgtatgtgacaattacctgggaataaaaatatctccacttttttattgaatacctttagcaaggggtaaattatgtactgttgtctttctaataaaaaagctcaattttaatttttcatctctagactgtcaattcaagtacaaaactacatgagtactataagaatgaattttgcaaatatttgtaagtaagctattttggggctgtggaaatattttctgttggtaactgtttcttgttccccataccagataaaaaccgcatataactctgtgacattttctttgttctgaaacatcattaaaagaatgacagtacattg

SEQ ID NO: 8794 - protein, 30 aa, Homo sapiens; identical to SEQ ID NO: 8790

SEQ ID NO: 8795 - DNA, 1817 bp, Homo sapiens
cttgctgctggaaacgcagttccggttaggcggctgagtttgtttacgttgctaacagatctagcccctgctttccctagttccagttccaagatggggaaatccttcgccaacttcatgtgcaagaaagactttcatcctgcctccaaatccaatatcaaaaaagtatggatggcagaacagaaaatatcatatgataagaagaaacaagaagaattgatgcagcaatatcttaaagaacaagaatcatatgataatagattgcttatgggagatgaacgtgtaaagaatggccttaatttcatgtatgaagccccaccaggagctaaaaaaggtacttatcaaagaagaaacagaaggagagaccgaatacaaatttgaatggcagaaaggagccccacgagaaaaatatgccaaagatgacatgaacatcagagatcagccctttggtattcaggttcgaaatgtgaggtgcattaaatgtcacaaatggggtcatgtcaacacagatcgagaatgtcctttgtttggtctttctggaatcaatgcaagttcggttcccactgatggctcagatgctgtgttacaaattgaaggtttctgggccatcgatgcacccctcggagctaatagcggagatgagaaacagtgggtttgcactgaaacgaaatgtactggggagaaacttgaccgcaaatgatccatcacaggagtatgttgcaagtgagggtgaagaagatccagaagttgaatttttaaagtcactaacaaccaaacaaaaacagaaacttctcaggaaattagatcgactggagaagaaaaaaaagaaaaaagatagaaaaaagaaaaagtttcagaagagcagaagtaaacacaaaaaacataagtcctcttcttcctcatcttcctcctcctcctcctcttcctctactgagacttcagaaagcagtagtgagagtgagagtaacaataaagaaaaaaaaatacaaaggaagaaaagaaagaaaaacaagtgttcagggcataacaacagtgattctgaagagaaggacaagtctaagaagagaaagcttcatgaagaactttctagcagtcaccataaccgggaaaaagccaaggaaaagcccaggttcttaaaacacgagagttctagggaggacagcaaatggagccattctgattctgacaaaaagtccagaacccataaacatagcccagagaagagaggctctgaaagaaaggaggggagcagcagaagccacggcagggaggaaaggagccggagaagccggagcagaagtcctggtagttacaagcaaagggagacaaggaaacgggcacagcgaaatcctggtgaagagcaaagcagaagaaatgacagcagaagccatggcacagacttgtatagaggagaaaaaatgtacagagagcacccaggaggtacacatactaaagtgacacaaagagaatgaagcagaagtagagaagaaagactgtatgtgacaattacctgggaataaaaatatctccacttttttattgaatacctttagcaaggggtaaattatgtactgttgtctttctaataaaaaagctcaattttaatttttcatctctagactgtcaattcaagtacaaaactacatgagtactataagaatgaattttgcaaatatttgtaagtaagctattttggggctgtggaaatattttctgttggtaactgtttcttgttccccataccagataaaaaccgcatataactctgtgacattttctttgttctgaaacatcattaaaagaatgacagtacattg

SEQ ID NO: 8796 - protein, 324 aa, Homo sapiens [sequence omitted]

SEQ ID NO: 8797 - DNA, 1789 bp, Homo sapiens
cttgctgctggaaacgcagttccggttaggcggctgagtttgtttacgttgctaacagatctagcccctgctttccctagttccagttccaagatggggaaatccttcgccaacttcatgtgcaagaaagactttcatcctgcctccaaatccaatatcaaaaaagtatggatggcagaacagaaaatatcatatgataagaagaaacaagaagaattgatgcagcaatatcttaaagaacaagaatcatatgataatagattgcttatgggagatgaacgtgtaaagaatggccttaatttcatgtatgaagccccaccaggagctaaaaaaggtacttatcaaagaagaaacagaaggagagaccgaatacaaatttgaatggcagaaaggagccccacgagaaaaatatgccaaagatgacatgaacatcagagatcagccctttggtattcaggttcgaaatgtgaggtgcattaaatgtcacaaatggggtcatgtcaacacagatcgagaatgtcctttgtttggtctttctggaatcaatgcaagttcggttcccactgatggctcagggccatcgatgcacccctcggagctaatagcggagatgagaaacagtgggtttgcactgaaacgaaatgtactggggagaaacttgaccgcaaatgatccatcacaggagtatgttgcaagtgagggtgaagaagatccagaagttgaatttttaaagtcactaacaaccaaacaaaaacagaaacttctcaggaaattagatcgactggagaagaaaaaaaagaaaaaagatagaaaaaagaaaaagtttcagaagagcagaagtaaacacaaaaaacataagtcctcttcttcctcatcttcctcctcctcctcctcttcctctactgagacttcagaaagcagtagtgagagtgagagtaacaataaagaaaaaaaaatacaaaggaagaaaagaaagaaaaacaagtgttcagggcataacaacagtgattctgaagagaaggacaagtctaagaagagaaagcttcatgaagaactttctagcagtcaccataaccgggaaaaagccaaggaaaagcccaggttcttaaaacacgagagttctagggaggacagcaaatggagccattctgattctgacaaaaagtccagaacccataaacatagcccagagaagagaggctctgaaagaaaggaggggagcagcagaagccacggcagggaggaaaggagccggagaagccggagcagaagtcctggtagttacaagcaaagggagacaaggaaacgggcacagcgaaatcctggtgaagagcaaagcagaagaaatgacagcagaagccatggcacagacttgtatagaggagaaaaaatgtacagagagcacccaggaggtacacatactaaagtgacacaaagagaatgaagcagaagtagagaagaaagactgtatgtgacaattacctgggaataaaaatatctccacttttttattgaatacctttagcaaggggtaaattatgtactgttgtctttctaataaaaaagctcaattttaatttttcatctctagactgtcaattcaagtacaaaactacatgagtactataagaatgaattttgcaaatatttgtaagtaagctattttggggctgtggaaatattttctgttggtaactgtttcttgttccccataccagataaaaaccgcatataactctgtgacattttctttgttctgaaacatcattaaaagaatgacagtacattg

SEQ ID NO: 8798 - protein, 384 aa, Homo sapiens; identical to SEQ ID NO: 8792

SEQ ID NO: 8799 - DNA, 1583 bp, Homo sapiens
cttgctgctggaaacgcagttccggttaggcggctgagtttgtttacgttgctaacagatctagcccctgctttccctagttccagttccaagatggggaaatccttcgccaacttcatgtgcaagaaagactttcatcctgcctccaaatccaatatcaaaaaagtatggatggcagaacagaaaatatcatatgataagaagaaacaagaagaattgatgcagcaatatcttaaagaacaagaatcatatgataatagattgcttatgggagatgaacgtgtaaagaatggccttaatttcatgtatgaagccccaccaggagctaaaaaaggtacttatcaaagaagaaacagaaggagagaccgaatacaaatttgaatggcagaaaggagccccacgagaaaaatatgccaaagatgacatgaacatcagagatcagccctttggtattcaggttcgaaatgtgaggtgcattaaatgtcacaaatggggtcatgtcaacacagatcgagaatgtcctttgtttggtctttctggaatcaatgcaagttcggttcccactgatggctcagggccatcgatgcacccctcggagctaatagcggagatgagaaacagtgggtttgcactgaaacgaaatgtactggggagaaacttgaccgcaaatgatccatcacaggagtatgttgcaagtgagggtgaagaagatccagaagttgaatttttaaagtcactaacaaccaaacaaaaacagaaacttctcaggaaattagatcgactggagaagaaaaaaaagaaaaaagatagaaaaaagaaaaagtttcagaagagcagaagtaaacacaaaaaacataagtcctcttcttcctcatcttcctcctcctcctcctcttcctctactgagacttcagaaagcagtagtgagagtgagagtaacaataaagaaaaaaaaatacaaaggaagaaaagaaagaaaaacaagtgttcagggcataacaacagtgattctgaagagaaggacaagtctaagaagagaaagcttcatgaagaactttctagcagtcaccataaccgggaaaaagccaaggaaaagcccaggttcttaaaacacgagagttctagggaggacagcaaatggagccattctgattctgacaaaaagtccagaacccataaacatagcccagagaagagaggctctgaaagaaaggaggggagcagcagaagccacggcagggaggaaaggagccggagaagccggagcagaagtcctggtagttacaagcaaagggagacaaggaaacgggcacagcgaaatcctggtgaagagcaaagcagaagaaatgacagcagaagccatggcacagacttgtatagaggagaaaaaatgtacagagagcacccaggaggtacacatactaaagtgacacaaagagaatgaagcagaagtagagaagaaagactgtatgtgacaattacctgggaataaaaatatctccacttttttattgaatacctttagcaaggggtaaattatgtactgttgtctttctaataaaaaagctcaattttaatttttc

SEQ ID NO: 8800 - protein, 384 aa, Homo sapiens; identical to SEQ ID NO: 8792

SEQ ID NO: 8801 - DNA, 671 bp, Homo sapiens
aaaaaagaaaaaagatagaaaaaagaaaaagtttcagaagagcagaaaaaaatacaaaggaagaaaagaaagaaaaacaagtgttcagggcataacaacagtgattctgaagagaaggacaagtctaagaagagaaagcttcatgaagaactttctagcagtcaccataaccgggaaaaagccaaggaaaagcccaggttcttaaaacacgagagttctagggaggacagcaaatggagccattctgattctgacaaaaagtccagaacccataaacatagcccagagaagagaggctctgaaagaaaggaggggagcagcagaagccacggcagggaggaaaggagccggagaagccggagcagaagtcctggtagttacaagcaaagggagacaaggaaacgggcacagcgaaatcctggtgaagagcaaagcagaagaaatgacagcagaagccatggcacagacttgtatagaggagaaaaaatgtacagagagcacccaggaggtacacatactaaagtgacacaaagagaatgaagcagaagtagagaagaaagactgtatgtgacaattacctgggaataaaaatatctccacttttttattgaatacctttagcaaggggtaaattatgtactgttgtctttctaataaaaaagctcaatttt

SEQ ID NO: 8802 - protein, 30 aa, Homo sapiens; identical to SEQ ID NO: 8790

SEQ ID NO: 8803 - DNA, 1341 bp, Homo sapiens
cttgctgctggaaacgcagttccggttaggcggctgagtttgtttacgttgctaacagatctagcccctgctttccctagttccagttccaagatggggaaatccttcgccaacttcatgtgcaagaaagactttcatcctgcctccaaatccaatatcaaaaaagtatggatggcagaacagaaaatatcatatgataagaagaaacaagaagaattgatgcagcaatatcttaaagaacaagaatcatatgataatagattgcttatgggagatgaacgtgtaaagaatggccttaatttcatgtatgaagccccaccaggagctaaaaaaggtacttatcaaagaagaaacagaaggagagaccgaatacaaatttgaatggcagaaaggagccccacgagaaaaatatgccaaagatgacatgaacatcagagatcagccctttggtattcaggttcgaaatgtgaggtgcattaaatgtcacaaatggggtcatgtcaacacagatcgagaatgtcctttgtttggtctttctggaatcaatgcaagttcggttcccactgatggctcagggccatcgatgcacccctcggagctaatagcggagatgagaaacagtgggtttgcactgaaacgaaatgtactggggagaaacttgaccgcaaatgatccatcacaggagtatgttgcaagtgagggtgaagaagatccagaagttgaatttttaaagtcactaacaaccaaacaaaaacagaaacttctcaggaaattagatcgactggagaagaaaaaaaagaaaaaagatagaaaaaagaaaaagtttcagaagagcagaagtaaacacaaaaaacataagtcctcttcttcctcatcttcctcctcctcctcctcttcctctactgagacttcagaaagcagtagtgagagtgagagtaacaataaagaaaaaaaaatacaaaggaagaaaagaaagaaaaacaagtgttcagggcataacaacagtgattctgaagagaaggacaagtctaagaagagaaagcttcatgaagaactttctagcagtcaccataaccgggaaaaagccaaggaaaagcccaggttcttaaaacacgagagttctagggaggacagcaaatggagccattctgattctgacaaaaagtccagaacccataaacatagcccagagaagagaggctctgaaagaaaggaggggagcagcagaagccacggcagggaggaaaggagccggagaagccggagcagaagtcctggtagttacaagcaaagggagacaaggaaacgggcacagcgaaatcctggtgaagagcaaagcag

SEQ ID NO: 8804 - protein, 349 aa, Homo sapiens
MALISCMKPHQELKKVLIKEETEGETEYKFEWQKGAPREKYAKDDMNIRDQPFGIQVRNVRCIKCHKWGHVNTDRECPLFGLSGINASSVPTDGSGPSMHPSELIAEMRNSGFALKRNVLGRNLTANDPSQEYVASEGEEDPEVEFLKSLTTKQKQKLLRKLDRLEKKKKKKDRKKKKFQKSRSKHKKHKSSSSSSSSSSSSSSTETSESSSESESNNKEKKIQRKKRKKNKCSGHNNSDSEEKDKSKKRKLHEELSSSHHNREKAKEKPRFLKHESSREDSKWSHSDSDKKSRTHKHSPEKRGSERKEGSSRSHGREERSRRSRSRSPGSYKQRETRKRAQRNPGEEQ

SEQ ID NO: 8805 - DNA, 749 bp, Homo sapiens
cttgctgctggaaacgcagttccggttaggcggctgagtttgtttacgttgctaacagatctagcccctgctttccctagttccagttccaagatggggaaatccttcgccaacttcatgtgcaagaaagactttcatcctgcctccaaatccaatatcaaaaaagtatggatggcagaacagaaaatatcatatgataagaagaaacaagaagaattgatgcagcaatatcttaaagaacaagaatcatatgataatagattgcttatgggagatgaacgtgtaaagaatggccttaatttcatgtatgaagccccaccaggagctaaaaaaggtacttatcaaagaagaaacagaaggagagaccgaatacaaatttgaatggcagaaaggagccccacgagaaaaatatgccaaagatgacatgaacatcagagatcagccctttggtattcaggttcgaaatgtgaggtgcattaaatgtcacaaatggggtcatgtcaacacagatcgagaatgtcctttgtttggtctttctggaatcaatgcaagttcggttcccactgatggctcagggccatcgatgcacccctcggagctaatagcggagatgagaaacagtgggtttgcactgaaacgaaatgtactggggagaaacttgaccgcaaatgatccatcacaggagtatgttgcaagtgagggtgaagaagatccagaagttgaatttttaaagtcactaacaaccaaac

SEQ ID NO: 8806 - protein, 152 aa, Homo sapiens
MALISCMKPHQELKKVLIKEETEGETEYKFEWQKGAPREKYAKDDMNIRDQPFGIQVRNVRCIKCHKWGHVNTDRECPLFGLSGINASSVPTDGSGPSMHPSELIAEMRNSGFALKRNVLGRNLTANDPSQEYVASEGEEDPEVEFLKSLTT

SEQ ID NO: 8807 - DNA, 808 bp, Homo sapiens
gctgctggaaacgcagttccggttaggcggctgagtttgtttacgttgctaacagatctagcccctgctttccctagttccagttccaagatggggaaatccttcgccaacttcatgtgcaagaaagactttcatcctgcctccaaatccaatatcaaaaaagtatggatggcagaacagaaaatatcatatgataagaagaaacaagaagaattgatgcagcaatatcttaaagaacaagaatcatatgataatagattgcttatgggagatgaacgtgtaaagaatggccttaatttcatgtatgaagccccaccaggagctaaaaaaggtacttatcaaagaagaaacagaaggagagaccgaatacaaatttgaatggcagaaaggagccccacgagaaaaatatgccaaagatgacatgaacatcagagatcagccctttggtattcaggttcgaaatgtgaggtgcattaaatgtcacaaatggggtcatgtcaacacagatcgagaatgtcctttgtttggtctttctggaatcaatgcaagttcggttcccactgatggctcaggtaggcactagacatgatttgtttcgggagaggacaaacaaggaaagataaaacaacatttttctttactctttctgggtattgttttatttgggtttgtgtgtggggcttgtttgtttgtttttgactaagaccattcccaaaatatgattaatgggaaactctgatcatatatgttgaattaaaatgctgtgtaataggattaagtttaatttttccagccaaaggccctatga

SEQ ID NO: 8808 - protein, 98 aa, Homo sapiens
MALISCMKPHQELKKVLIKEETEGETEYKFEWQKGAPREKYAKDDMNIRDQPFGIQVRNVRCIKCHKWGHVNTDRECPLFGLSGINASSVPTDGSGRH

SEQ ID NO: 8809 - DNA, 1167 bp, Homo sapiens
gacagcttccggcaactgatgcctccactggccactcctccctccgtccacctgtcacttcgggtagctgggaggccagttaaaaaaaatggaacctttttcctgtgacactttcgtggcattacctccagcaacagtcgataacaggattatttttggaaaaaattcagatagactctatgatgaagtacaagaggtggtttattttcctgctgtagttcatgataacctgggagaacgtcttaagtgtacatatatagaaattgatcaagttcctgaaacatatgctgttgtcctgagtcgcccagcgtggttgtggggggcagaaatgggagccaatgagcatggagtttgcattgggaatgaagctgtatggggaagagaagaagtttgtgatgaagaagcactattaggaatggaccttgtcagacttggccttgaaagagctgatacagctgaaaaagccctcaatgtcattgttgacttactagaaaaatatggccagggtggaaattgcacagagggtagaatggtatttagctatcacaacagtttcctgatagctgataggaatgaagcctggattctggagactgcagggaagtactgggcagcagaaaaagtacaagagggagttcgtaatatttctaatcaactttccataacaaccaagattgcccgggaacacccagacatgagaaactatgctaagcggaaaggttggtgggatggtaaaaaggagtttgattttgctgcagcatattcctatcttgacacagccaagatgatgacttcatcaggcagatactgtgagggctacaagcttctaaataagcacaaaggaaatataacttttgaaacaatgatggaaattcttcgagataaaccaagtggcattaatatggagggagaattcctgaccactgcaagcatggtttctattttacctcaagactccagccttccttgcattcacttctttacagggactcctgatcctgagagatctgtttttaagcctttcatatttgtgccacatatttcacaactattggataccagttcaccaacatttgaacttgaagatctagttaaaaagaaatcacattttaagcctgacagaagacacccactctaccaaaaacatcaacaggcattggaagtagt

SEQ ID NO: 8810 - protein, 358 aa, Homo sapiens
MEPFSCDTFVALPPATVDNRIIFGKNSDRLYDEVQEVVYFPAVVHDNLGERLKCTYIEIDQVPETYAVVLSRPAWLWGAEMGANEHGVCIGNEAVWGREEVCDEEALLGMDLVRLGLERADTAEKALNVIVDLLEKYGQGGNCTEGRMVFSYHNSFLIADRNEAWILETAGKYWAAEKVQEGVRNISNQLSITTKIAREHPDMRNYAKRKGWWDGKKEFDFAAAYSYLDTAKMMTSSGRYCEGYKLLNKHKGNITFETMMEILRDKPSGINMEGEFLTTASMVSILPQDSSLPCIHFFTGTPDPERSVFKPFIFVPHISQLLDTSSPTFELEDLVKKKSHFKPDRRHPLYQKHQQALE

SEQ ID NO: 8811 - DNA, 2467 bp, Homo sapiens
gacagcttccggcaactgatgcctccactggccactcctccctccgtccacctgtcacttcgggtagctgggaggccagttaaaaaaaatggaacctttttcctgtgacactttcgtggcattacctccagcaacagtcgataacaggattatttttggaaaaaattcagatagactctatgatgaagtacaagaggtggtttattttcctgctgtagttcatgataacctgggagaacgtcttaagtgtacatatatagaaattgatcaagttcctgaaacatatgctgttgtcctgagtcgcccagcgtggttgtggggggcagaaatgggagccaatgagcatggagtttgcattgggaatgaagctgtatggggaagagaagaagtttgtgatgaagaagcactattaggaatggaccttgtcagacttggccttgaaagagctgatacagctgaaaaagccctcaatgtcattgttgacttactagaaaaatatggccagggtggaaattgcacagagggtagaatggtatttagctatcacaacagtttcctgatagctgataggaatgaagcctggattctggagactgcagggaagtactgggcagcagaaaaagtacaagagggagttcgtaatatttctaatcaactttccataacaaccaagattgcccgggaacacccagacatgagaaactatgctaagcggaaaggttggtgggatggtaaaaaggagtttgattttgctgcagcatattcctatcttgacacagccaagatgatgacttcatcaggcagatactgtgagggctacaagcttctaaataagcacaaaggaaatataacttttgaaacaatgatggaaattcttcgagataaaccaagtggcattaatatggagggagaattcctgaccactgcaagcatggtttctattttacctcaagactccagccttccttgcattcacttctttacagggactcctgatcctgagagatctgtttttaagcctttcatatttgtgccacatatttcacaactattggataccagttcaccaacatttgaacttgaagatctagttaaaaagaaatcacattttaagcctgacagaagacacccactctaccaaaaacatcaacaggcattggaagtagtaaataataatgaggaaaaagccaaaataatgttggacaacatgaggaaactggagaaagaactattcagagagatggaatcaatccttcaaaacaagcatcttgatgtggagaaaattgttaatctctttcctcagtgtacaaaagatgaaattcaaatttatcagtcaaatttatcagtcaaagttagttcttagtgatcatatggtcagctaatattagttcttagtgatcagtggtcagtaatcttcaaagtcagaatctatcaccttggtaaattatataaacctaacttgagcagatctgattattcttggatagtattcaagtggtatcttgactattaaactacgtatagtgttgctgaaatagaaagaaaacagcattggaattggattcatgtatcgtgggatacaggtgttatttcaggtgatgtacttgcattattttctttagccatagtaactttttgtcacaataactaagtattcaattatatataaagagtgaaacattaaaatgacgcatggatttatatttattataattatgtagtaccctcaaatcattttgtcagttacatcaagaaagcagatttttctttagtcatgaaaaatatctcaagtggtaagttgtttgtgctttaggcaaacattaaccagctctaacaagaaaaatgtctagatttacacattgtcaatacagtatattagttctgcaaatgcacttttgttaaactcaaacatgctctttgtcaagacttggctaaccagtgagcttgtagctctgattatctagcatttttagggtcattctccttaataggcttttatgttaataagatatatttttagaagagcttgtttgggagattagagaataagataaaagaaccaaaaccttaggatatactgtttctgggtctgaaatctctctcattgtttacttctgttcactcagtgaaaacagaaacaagaatgaggtagtggcaatgaaatagaattattagtatattatgaacattataacattttgaacactataatgcattatatattatgaacttttatgaactttatacatgagtaatagcttcctaaagtttataaaacattgtttaggttacataaagattaccaagtaagactcaaaattgcaaatataaacaaaagaaaaatccaactgaaaataacactaagtatttttgagttcctagaatgtccattttggtatttggttacattatcatatttactagtcactatcagcacaattaggttaataaagaagtgggtcattat

SEQ ID NO: 8812 - protein, 424 aa, Homo sapiens; identical to SEQ ID NO: 694

SEQ ID NO: 8813 - DNA, 3505 bp, Homo sapiens
gacagcttccggcaactgatgcctccactggccactcctccctccgtccacctgtcacttcgggtagctgggaggccagttaaaaaaaatggaacctttttcctgtgacactttcgtggcattacctccagcaacagtcgataacaggattatttttggaaaaaattcagatagactctatgatgaagtacaagaggtggtttattttcctgctgtagttcatgataacctgggagaacgtcttaagtgtacatatatagaaattgatcaagttcctgaaacatatgctgttgtcctgagtcgcccagcgtggttgtggggggcagaaatgggagccaatgagcatggagtttgcattgggaatgaagctgtatggggaagagaagaagtttgtgatgaagaagcactattaggaatggaccttgtcagacttggccttgaaagagctgatacagctgaaaaagccctcaatgtcattgttgacttactagaaaaatatggccagggtggaaattgcacagagggtagaatggtatttagctatcacaacagtttcctgatagctgataggaatgaagcctggattctggagactgcagggaagtactgggcagcagaaaaagtacaagagggagttcgtaatatttctaatcaactttccataacaaccaagattgcccgggaacacccagacatgagaaactatgctaagcggaaaggttggtgggatggtaaaaaggagtttgattttgctgcagcatattcctatcttgacacagccaagatgatgacttcatcaggcagatactgtgagggctacaagcttctaaataagcacaaaggaaatataacttttgaaacaatgatggaaattcttcgagataaaccaagtggcattaatatggagggagaattcctgaccactgcaagcatggtttctattttacctcaagactccagccttccttgcattcacttctttacagggactcctgatcctgagagatctgtttttaagcctttcatatttgtgccacatatttcacaactattggataccagttcaccaacatttgaacttgaagatctagttaaaaagaaatcacattttaagcctgacagaagacacccactctaccaaaaacatcaacaggcattggaagtagtaaataataatgaggaaaaagccaaaataatgttggacaacatgaggaaactggagaaagaactattcagagagatggaatcaatccttcaaaacaagcatcttgatgtggagaaaattgttaatctctttcctcagtgtacaaaagatgaaattcaaatttatcagtcaaatttatcagtcaaagttagttcttagtgatcatatggtcagctaatattagttcttagtgatcagtggtcagtaatcttcaaagtcagaatctatcaccttggtaaattatataaacctaacttgagcagatctgattattcttggatagtattcaagtggtatcttgactattaaactacgtatagtgttgctgaaatagaaagaaaacagcattggaattggattcatgtatcgtgggatacaggtgttatttcaggtgatgtacttgcattattttctttagccatagtaactttttgtcacaataactaagtattcaattatatataaagagtgaaacattaaaatgacgcatggatttatatttattataattatgtagtaccctcaaatcattttgtcagttacatcaagaaagcagatttttctttagtcatgaaaaatatctcaagtggtaagttgtttgtgctttaggcaaacattaaccagctctaacaagaaaaatgtctagatttacacattgtcaatacagtatattagttctgcaaatgcacttttgttaaactcaaacatgctctttgtcaagacttggctaaccagtgagcttgtagctctgattatctagcatttttagggtcattctccttaataggcttttatgttaataagatatatttttagaagagcttgtttgggagattagagaataagataaaagaaccaaaaccttaggatatactgtttctgggtctgaaatctctctcattgtttacttctgttcactcagtgaaaacagaaacaagaatgaggtagtggcaatgaaatagaattattagtatattatgaacattataacattttgaacactataatgcattatatattatgaacttttatgaactttatacatgagtaatagcttcctaaagtttataaaacattgtttaggttacataaagattaccaagtaagactcaaaattgcaaatataaacaaaagaaaaatccaactgaaaataacactaagtatttttgagttcctagaatgtccattttggtatttggttacattatcatatttactagtcactatcagcacaattaggttaataaagaagtgggtcattatattcaaagagtgctcaggaagttatgtgttcaaagttctctcataaataccatcgtctgcctgatactgctcttgtctaatagagggttgacattacaaaagaaaagatgtctgactcaagaactcagttgattctgtttgccttaagtttggttcagtgataggctgtcttctaacccctatactcctcttctctcctttaatagatgaggaaactaagggcaaacagttcgttacacttacgggaatcttatttccctctctaggggcagcatgttttcaccttctcctttgctgccaccttggcctaaactagcaccgtcttttagctagaccattgcgttaactgttctcctacacccatttttgttctttatttccacccacatgagtcactgcagccaatctattacaaatttaaatctgattatgaattcccctcctaaaactcttttttaaaagagactttattttttggagcagttttaggttcacagcaaaattgaacagaaagtacagagttccaatacagcccctatcagcatacatgcatagcctcccccactatcaacatcccagcaccagaatggtacatttgttagaatcaatggccctacattgacacattatcacccaaaggccatggttcaagttagagatcactcttgatgtagtacatcctatgggctttgataattataaaatgacatgtatccaccattatagtattatacagagtagtttcactgccctaaaaatcttctgtgttctgcctatttatcccaccctccctccaacccctggcaaccactgatctttttactgtctccatagttttgccttttccatatgtcatatcattggaatcatacagtatgtgacctcttaagattgtcttctttaacttacttagtaatatccatttaaggttcctgcatgtcttttcatgacttgatagctcatttcttttagtgctaagtaatattcgattgtctgaatatactactactgaaggacatcttggttgcttccaagttt

SEQ ID NO: 8814 - protein, 424 aa, Homo sapiens; identical to SEQ ID NO: 694

SEQ ID NO: 8815 - DNA, 995 bp, Homo sapiens
gcttccggcaactgatgcctccactggccactcctccctccgtccacctgtcacttcgggtagctgggaggccagtgtacatatatagaaattgatcaagttcctgaaacatatgctgttgtcctgagtcgcccagcgtggttgtggggggcagaaatgggagccaatgagcatggagtttgcattgggaatgaagctgtatggggaagagaagaagtttgtgatgaagaagcactattaggaatggaccttgtcagacttggccttgaaagagctgatacagctgaaaaagccctcaatgtcattgttgacttactagaaaaatatggccagggtggaaattgcacagagggtagaatggtatttagctatcacaacagtttcctgatagctgataggaatgaagcctggattctggagactgcagggaagtactgggcagcagaaaaagtacaagagggagttcgtaatatttctaatcaactttccataacaaccaagattgcccgggaacacccagacatgagaaactatgctaagcggaaaggttggtgggatggtaaaaaggagtttgattttgctgcagcatattcctatcttgacacagccaagatgatgacttcatcaggcagatactgtgagggctacaagcttctaaataagcacaaaggaaatataacttttgaaacaatgatggaaattcttcgagataaaccaagtggcattaatatggagggagaattcctgaccactgcaagcatggtttctattttacctcaagactccagccttccttgcattcacttctttacagggactcctgatcctgagagatctgtttttaagcctttcatatttgtgccacatatttcacaactattggataccagttcaccaacatttgaacttgaagatctagttaaaaagaaatcacattttaagcctgacagaagacacccactctaccaaaaacatcaacaggcattggaagtagt

SEQ ID NO: 8816 - protein, 278 aa, Homo sapiens
MGANEHGVCIGNEAVWGREEVCDEEALLGMDLVRLGLERADTAEKALNVIVDLLEKYGQGGNCTEGRMVFSYHNSFLIADRNEAWILETAGKYWAAEKVQEGVRNISNQLSITTKIAREHPDMRNYAKRKGWWDGKKEFDFAAAYSYLDTAKMMTSSGRYCEGYKLLNKHKGNITFETMMEILRDKPSGINMEGEFLTTASMVSILPQDSSLPCIHFFTGTPDPERSVFKPFIFVPHISQLLDTSSPTFELEDLVKKKSHFKPDRRHPLYQKHQQALE

SEQ ID NO: 8817 - DNA, 954 bp, Homo sapiens
gaaatgcagaaatcacccctcttctgcgtcgctcacgctgggagctgtagaccagagctgttcctattcggccatcttggctcctccagaataaacctattttttgaggaaatataacttttgaaacaatgatggaaattcttcgagataaaccaagtggcattaatatggagggagaattcctgaccactgcaagcatggtttctattttacctcaagactccagccttccttgcattcacttctttacagggactcctgatcctgagagatctgtttttaagcctttcatatttgtgccacatatttcacaactattggataccagttcaccaacatttgaacttgaagatctagttaaaaagaaatcacattttaagcctgacagaagacacccactctaccaaaaacatcaacaggcattggaagtagtaaataataatgaggaaaaagccaaaataatgttggacaacatgaggaaactggagaaagaactattcagagagatggaatcaatccttcaaaacaagcatcttgatgtggagaaaattgttaatctctttcctcagtgtacaaaagatgaaattcaaatttatcagtcaaatttatcagtcaaagttagttcttagtgatcatatggtcagctaatattagttcttagtgatcagtggtcagtaatcttcaaagtcagaatctatcaccttggtaaattatataaacctaacttgagcagatctgattattcttggatagtattcaagtggtatcttgactattaaactacgtatagtgttgctgaaatagaaagaaaacagcattggaattggattcatgtatcgtgggatacaggtgttatttcaggtgatgtacttgcattattttctttagccatagtaactttttgtcacaataactaagtattcaattatatataaagagtgaaacattaaaatg

SEQ ID NO: 8818 - protein, 166 aa, Homo sapiens [sequence omitted]

SEQ ID NO: 8819 - DNA, 2771 bp, Homo sapiens
gaaatgcagaaatcacccctcttctgcgtcgctcacgctgggagctgtagaccagagctgttcctattcggccatcttggctcctccagaataaacctattttttgaggaaatataacttttgaaacaatgatggaaattcttcgagataaaccaagtggcattaatatggagggagaattcctgaccactgcaagcatggtttctattttacctcaagactccagccttccttgcattcacttctttacagggactcctgatcctgagagatctgtttttaagcctttcatatttgtgccacatatttcacaactattggataccagttcaccaacatttgaacttgaagatctagttaaaaagaaatcacattttaagcctgacagaagacacccactctaccaaaaacatcaacaggcattggaagtagtaaataataatgaggaaaaagccaaaataatgttggacaacatgaggaaactggagaaagaactattcagagagatggaatcaatccttcaaaacaagcatcttgatgtggagaaaattgttaatctctttcctcagtgtacaaaagatgaaattcaaatttatcagtcaaatttatcagtcaaagttagttcttagtgatcatatggtcagctaatattagttcttagtgatcagtggtcagtaatcttcaaagtcagaatctatcaccttggtaaattatataaacctaacttgagcagatctgattattcttggatagtattcaagtggtatcttgactattaaactacgtatagtgttgctgaaatagaaagaaaacagcattggaattggattcatgtatcgtgggatacaggtgttatttcaggtgatgtacttgcattattttctttagccatagtaactttttgtcacaataactaagtattcaattatatataaagagtgaaacattaaaatgacgcatggatttatatttattataattatgtagtaccctcaaatcattttgtcagttacatcaagaaagcagatttttctttagtcatgaaaaatatctcaagtggtaagttgtttgtgctttaggcaaacattaaccagctctaacaagaaaaatgtctagatttacacattgtcaatacagtatattagttctgcaaatgcacttttgttaaactcaaacatgctctttgtcaagacttggctaaccagtgagcttgtagctctgattatctagcatttttagggtcattctccttaataggcttttatgttaataagatatatttttagaagagcttgtttgggagattagagaataagataaaagaaccaaaaccttaggatatactgtttctgggtctgaaatctctctcattgtttacttctgttcactcagtgaaaacagaaacaagaatgaggtagtggcaatgaaatagaattattagtatattatgaacattataacattttgaacactataatgcattatatattatgaacttttatgaactttatacatgagtaatagcttcctaaagtttataaaacattgtttaggttacataaagattaccaagtaagactcaaaattgcaaatataaacaaaagaaaaatccaactgaaaataacactaagtatttttgagttcctagaatgtccattttggtatttggttacattatcatatttactagtcactatcagcacaattaggttaataaagaagtgggtcattatattcaaagagtgctcaggaagttatgtgttcaaagttctctcataaataccatcgtctgcctgatactgctcttgtctaatagagggttgacattacaaaagaaaagatgtctgactcaagaactcagttgattctgtttgccttaagtttggttcagtgataggctgtcttctaacccctatactcctcttctctcctttaatagatgaggaaactaagggcaaacagttcgttacacttacgggaatcttatttccctctctaggggcagcatgttttcaccttctcctttgctgccaccttggcctaaactagcaccgtcttttagctagaccattgcgttaactgttctcctacacccatttttgttctttatttccacccacatgagtcactgcagccaatctattacaaatttaaatctgattatgaattcccctcctaaaactcttttttaaaagagactttattttttggagcagttttaggttcacagcaaaattgaacagaaagtacagagttccaatacagcccctatcagcatacatgcatagcctcccccactatcaacatcccagcaccagaatggtacatttgttagaatcaatggccctacattgacacattatcacccaaaggccatggttcaagttagagatcactcttgatgtagtacatcctatgggctttgataattataaaatgacatgtatccaccattatagtattatacagagtagtttcactgccctaaaaatcttctgtgttctgcctatttatcccaccctccctccaacccctggcaaccactgatctttttactgtctccatagttttgccttttccatatgtcatatcattggaatcatacagtatgtgacctcttaagattgtcttctttaacttacttagtaatatccatttaaggttcctgcatgtcttttcatgacttgatagctcatttcttttagtgctaagtaatattcgattgtctgaatatactactactgaaggacatcttggttgcttccaagttt

SEQ ID NO: 8820 - protein, 166 aa, Homo sapiens [sequence omitted]

SEQ ID NO: 8821 - DNA, 7456 bp, Homo sapiens
gcggccggcgaggggctgagctgacagggccgcatcggcttaccccaccttactttatcggaacgtgcctaagctgctgcagctggcacccggttgcgctcggcgaagagggctgggggcgggagatgacggtggtcttctccctgcttggcaccctgcgagcaccagctcccttctcctcgccactccaaggttgcagacgaagcagagatctggttggagttggagggtgagagaaaatgaattctaatttacctgcagagaacttaaccattgcagtcaatatgaccaagactttgcctacagcagtaacgcatggatttaattccactaatgacccaccttcaatgtcaattacaaggctttttccagccttactggaatgctttggcattgtcctttgtggctacatagcaggaagggccaatgtcataacatcaacccaggccaaaggactaggaaattttgtctccagatttgcacttccagctttattattcaaaaacatggttgtacttaatttttccaatgtggactggtccttcctatatagtatcttaattgccaaagcttctgtatttttcattgtatgtgtattaaccttattggttgccagtcctgatagtcgatttagcaaagctggactattccctatttttgctacacaaagtaatgactttgcattgggataccctatagttgaagctttatatcaaactacatacccagaatatctccagtacatttatttggtggcaccaatatctcttatgatgttaaaccctatagggtttattttctgtgaaatccaaaagtggaaagacactcaaaatgcttctcaaaataaaataaaaattgtgggactcggactcctgcgtgtattacagaacccaatagtatttatggtcttcattggcatcgccttcaattttattcttgatcgaaaggtacctgtatatgtcgaaaattttcttgatggacttggaaattctttttctggatcagccctattttatcttggtctcacgatggtgggaaaaataaagagactgaagaagtcggcatttgtagtactaattcttctcatcacagctaaacttctggtgctgccacttctgtgcagagaaatggtggaactcttggacaagggcgacagtgtggtgaaccatacaagtttatcaaattatgcatttctgtatggtgtatttcctgtagcaccaggagtggctatctttgcaacacaattcaacatggaagtagaaattataacctcagggatggtgataagcacatttgtgtctgctcccatcatgtacgtttctgcctggttactgacctttcccactatggaccctaagccattggcatatgccatccagaatgttagttttgatataagtattgtcagcctgatctccttgtctattgtctgtgctggaatgatgatatggaattttgttaaagaaaaaaattttgttggacaaattttggtgtttgttctattgtacagctccctctatagcacctacctgtggacaggccttctagcaatttctttgtttcttttgaaaaagcgagagagggtacaaattcctgttggaataatcataatatctggctggggaattcctgctctccttgttggtgttcttttgataactggaaaacacaatggagatagcattgactcagccttcttttatggaaaagaacagatgatcaccacagcagtcaccctgttctgcagcatcctgatagctggcatatccctcatgtgcatgaaccagactgcccaagcaggaagctatgaaggtttcgatcagtctcagagccacaaagtggtggagcctggaaatactgcttttgaggagagtccagcaccagtaaatgaaccagaactttttacaagctctattccagaaacaagttgctgctcctgctccatgggaaatggtgaattacactgcccatcaatagagccaatagcaaacacaagcaccagtgagcctgtgattccttcgtttgagaaaaacaatcattgtgtgagtcgctgtaactcccagagctgcatattagcccaggaagaagaacagtatctacagagtggagaccagcaactgacccgacatgtgttgctgtgtttacttctcatcattggcctgttcgctaatctttccagttgtttatggtggctattcaaccaagagcctggaagactttatgttgagttacagtttttctgtgccgtgtttaactttggtcagggatttatttcctttggaatctttggattagataaacatttaatcatcctgcctttcaaaagaagacttgaattcctatggaacaataaagacacagcagaaaacagggattctcctgtttcagaggaaataaaaatgacctgtcaacaatttatccattatcaccgtgacctctgtatccgaaacattgtcaaagaaagaaggtgtggtgcaaagacttctgctggaactttctgtggctgtgacctggtgagctggctaattgaagtcggccttgcctccgaccgtggtgaagctgtgatatacggagacaggctggtacaagggggagtcatccaacatattaccaacgagtatgaattccgggatgagtacttgttttacagatttcttcaaaagagtcctgaacagagtcctcctgctattaatgcaaacactctccaacaggaaagatataaagaaattgagcattcatccccaccctcacattcccctaagacctaaattatgcaggggagaaccctacatggaatcatattctagccgcgtattcattagtttttagctgggtgaccttgggcaagttaacagaggcaacctctctgagcctcagttgtctcttctgtaaaatgtgaaaagatgtgctcccaccacatgcgcagggtctgtgattttacatgtatgtaaaacacataggaagctgacttaggaaaaagagaaaaccaaattaaagttctgataatgaatataatatagtcatcctttagtatccaaggggattggttccaggactcctgaagatcccaaaatctgaggatactcaagtcccttatataaaatggtgtaggccgggcatggtggctcacgcctgtaatcccagtactttgggaggccgagtcaggtggatcacctgaggtcaggagttcaagaccagcctggccaacatggcgaaaccccgtctctactataaaatacaaaaaattagttgggtgtggtggcgggtgcctgtaatcccagctactcaggaggctgaggcaggagaatcgcttgaatctgggaggcagaggttgctgtgagccgagatcgtgccactgcactccagcctgagcaacagagcaagactctatctcaaaaataaaataaaataaaataaaataattaataaaatggtgtagtatttgcatataacctatgcacattctcccatatagtttaatcatctttagatacttataatgcctaatacaatgtaaatgctatgtaaatagttgttgttatactgtattgtttagggaataacaataagaaaaacagtctgtacatgttcactacagatgcaaccattgttaagcctgactacatctttttatctgcggttgattgaatctatggatgtggaacctgtgcatatggagggtcaactgtactataaataatacgaatatgccaacattatataatcattgctttctgcaactgtttactataatttcaaaattaatatcctattaactgttcctataaattatcaaatttggcaagtgtattactagcaggagatggaccttaaattatgacaactttatattttttgatagcatctcttgaaaaagaattttaatgattctaataagaggttctttttcttttttccatttccttgacaaatagtactcatttaaaaactagagggctaggcttagtggctcacgcctgtaatctcagcactttgggaggctgaggcgggcagatcgcttgaggtcaggagttcaagaccagcccgggcaacgtggtgaaacccggtctgtactaaaaaaaaaaaaaaagaaaaagaaaaagaaaaaagaatacccaggtgtggtagtgcatgcctgtagtcccagctactttggagactgaggtgggagtaccccttgagcctgggaggcgcaggttgcagtgaaccaagatcacatcactgcacttcaacctgggtgacagagcaagaccctgtctcaaaaacaaaaaacaagcaaaaaaaacctagaggcactatttttttttaaagtttgtcttttcttttctacccaaattactaatctatgccattaaggaaaggaataagaacctccatatgtattattatctccacagtcctgcagaagtacaatctgatctttaactttcatgctacaaataataatttgagtagattaatttgaattttatcaacaaaattattgccatatgatgtatcatttctgtgtttgaacaaagcatcgtaatgcaggataacttctactttattccctgtagttaaaaaaaaaaaaactatatagttcaagccaatatttaaaaattctaaacctaggctgggcatggtgactcatacctgtaatcccagcactttgggaggccgaggcaggtgaattgcttcagcccaggagttcgagaccagcctggccaatgtggtgaaaccccatctctactaaaaaaaaaaaaaaaaaaaaaaattagccaggtgtggtggtgtgcacctgtaatcccagctacccaggaggctgaggcaggaaaattgcttgaaaccaggaggcagaggttgcagtgagctgagatcgtgccactgcactccagcctgagtgtcagagtgagactctgtctcagaaaaaaaaaaaaaaattctaaagattacatttagaatttagtctttttaaagtgtccatgtataaaaatatataatttttaaaattactaaatgttgccttttctcttagtctaatattttagctactaaaacaaaatataaactggatagcttataaacaacataaacttatttctcacagttttggaggctgtgaagtccaagattaaggcactaacagatctagtgtctggtaaggcaaatttctggctcatagatggtaccttcttgctgtgtccccacatggtagatgggaagaactggtctcattggccccttataaggacattaattccactcaataggctccaccctcatgatctaataacctctcaaaggccctacctcctaatactaacacattgaggatgtgacttcaactttacatttctacaggcagagaagtggggctgtgtaaattcttcccatcagtacttgaatgttcatttaacaaataacttatcgagcatctagcatgttccagacacaatctgaacactgagcacacaacagttggaacaaatatgattcctatcctcatggagcttctattctcctgtgaaaaacagatgttaaacatgattgaggattaggtttcaacataagaattctaggaggacacagacatttagaccatagcatcttcaggtaaactttatcttcagtaaattaaagagatctatttagatgacctttgagcatcttaattattagatgtcagtgctagtttaacttattttaaacgtttcagatatttatttaattatactttaagtgtctcatgtaaaaaagttatttataaaataatttatagggttagagtcattgcccttttaatgcaacaaataaacagttttttaaaaacctgcatgggggccaggcgcggtggttcatacctgcaatcccagcactttgggaggtcgaggctggcggatcacgaggtcaggagatcgagaccaccctgattaatgcggtgaaatcccgtctctactaaaaatacaaaaaattagccagacgtggtggtgggcacctatagtcccagctactcgggaggctgaggcaggagaatggcatgaacccggaaggcggagcttgcagtgaaccaagatcgcgccactgcactccagcctgggcgacagagtgagactccatcgcaaaaaaaaaaaaaaaaaaacctgcatggaagcctagtatatttattaataacaaataaattatactttagtgtactattaacctataccaattttaagttgtgattagggaatggggatgtttttaagctgaattgtcttgctgcggaactttccttttttaataagaccatattatgactctgaatgctcaagggtaagtctaaggcctcattgctgttaccaggagatttttctagttacagtaataaagatgttaattcacatgcatgcagacaactgaaactcaagtggagaatttgtttgtgaacaagtcatactacttctgttatttgcatgaatggaatctgcaatatctttttccatgggagaccctaaaagaaaaccctggatcagaatgatctgcagtttcagataataaaggcttttaagagacatttttagaattaaaaatatgctaattttattaaatgaaaatatttgtaactgttaactttctcactgacaaagcaagtttctcaataaaatacctattttaacttgcattactgacatcttttctttgagtaatctgaataatgcagaagccatcatagaggtcttttctatacattctcaatgttttcttaaatgggtttcctgagttctgttcttcatgactctgggctctgcaaacagggtttcccaattacgcattctataaacacttttatgaatgagtcaatatgacattgagtccttttcatacatttcatcatttccaatatgtagagtgacagctagaaaaatgataaaattttgattaaaacctatctctttttcttcagcatagtcaattgttttcttaactctcaatgagtaactccatgcctagcttgtgcttagctttcaatatttttagactaagacaaagtgtatttggcattttgagaacaacaattaatggtcagtaaatttctaaagcaagaaaaatgtgaaactagtgttttatatgtttgttacgcagcagaatgcggctcttagtgtttgccccttcatatctcatcatgtaaaatattaaattactttaggccactgcacataggtagtcctgtcatgagtgatggctggagaaaagttcaggatcataaatgttatcatcattcttcaagaaaagatgagattataaatttctgcaattggtatgataaaaggttgaaataattaatgaaaaagaaaacattagctctgtagacctgttttgggcacactttacaagaagaaactaactctccaaaattctaggctatgtagttatttctaaagcaaaacttttgattcatgattaacatatataagctggtgttttcatcaaa

SEQ ID NO: 8822 - protein, 842 aa, Homo sapiens
MNSNLPAENLTIAVNMTKTLPTAVTHGFNSTNDPPSMSITRLFPALLECFGIVLCGYIAGRANVITSTQAKGLGNFVSRFALPALLFKNMVVLNFSNVDWSFLYSILIAKASVFFIVCVLTLLVASPDSRFSKAGLFPIFATQSNDFALGYPIVEALYQTTYPEYLQYIYLVAPISLMMLNPIGFIFCEIQKWKDTQNASQNKIKIVGLGLLRVLQNPIVFMVFIGIAFNFILDRKVPVYVENFLDGLGNSFSGSALFYLGLTMVGKIKRLKKSAFVVLILLITAKLLVLPLLCREMVELLDKGDSVVNHTSLSNYAFLYGVFPVAPGVAIFATQFNMEVEIITSGMVISTFVSAPIMYVSAWLLTFPTMDPKPLAYAIQNVSFDISIVSLISLSIVCAGMMIWNFVKEKNFVGQILVFVLLYSSLYSTYLWTGLLAISLFLLKKRERVQIPVGIIIISGWGIPALLVGVLLITGKHNGDSIDSAFFYGKEQMITTAVTLFCSILIAGISLMCMNQTAQAGSYEGFDQSQSHKVVEPGNTAFEESPAPVNEPELFTSSIPETSCCSCSMGNGELHCPSIEPIANTSTSEPVIPSFEKNNHCVSRCNSQSCILAQEEEQYLQSGDQQLTRHVLLCLLLIIGLFANLSSCLWWLFNQEPGRLYVELQFFCAVFNFGQGFISFGIFGLDKHLIILPFKRRLEFLWNNKDTAENRDSPVSEEIKMTCQQFIHYHRDLCIRNIVKERRCGAKTSAGTFCGCDLVSWLIEVGLASDRGEAVIYGDRLVQGGVIQHITNEYEFRDEYLFYRFLQKSPEQSPPAINANTLQQERYKEIEHSSPPSHSPKT

SEQ ID NO: 8823 - DNA, 6645 bp, Homo sapiens
gcggccggcgaggggctgagctgacagggccgcatcggcttaccccaccttactttatcggaacgtgcctaagctgctgcagctggcacccggttgcgctcggcgaagagggctgggggcgggagatgacggtggtcttctccctgcttggcaccctgcgagcaccagctcccttctcctcgccactccaaggttgcagacgaagcagagatctggttggagttggagggtgagagaaaatgaattctaatttacctgcagagaacttaaccattgcagtcaatatgaccaagactttgcctacagcagtaacgcatggatttaattccactaatgacccaccttcaatgtcaattacaaggctttttccagccttactggaatgctttggcattgtcctttgtggctacatagcaggaagggccaatgtcataacatcaacccaggccaaaggactaggaaattttgtctccagatttgcacttccagctttattattcaaaaacatggttgtacttaatttttccaatgtggactggtccttcctatatagtatcttaattgccaaagcttctgtatttttcattgtatgtgtattaaccttattggttgccagtcctgatagtcgatttagcaaagctggactattccctatttttgctacacaaagtaatgactttgcattgggataccctatagttgaagctttatatcaaactacatacccagaatatctccagtacatttatttggtggcaccaatatctcttatgatgttaaaccctatagggtttattttctgtgaaatccaaaagtggaaagacactcaaaatgcttctcaaaataaaataaaaattgtgggactcggactcctgcgtgtattacagaacccaatagtatttatggtcttcattggcatcgccttcaattttattcttgatcgaaaggtacctgtatatgtcgaaaattttcttgatggacttggaaattctttttctggatcagccctattttatcttggtctcacgatggtgggaaaaataaagagactgaagaagtcggcatttgtagtactaattcttctcatcacagctaaacttctggtgctgccacttctgtgcagagaaatggtggaactcttggacaagggcgacagtgtggtgaaccatacaagtttatcaaattatgcatttctgtatggtgtatttcctgtagcaccaggagtggctatctttgcaacacaattcaacatggaagtagaaattataacctcagggatggtgataagcacatttgtgtctgctcccatcatgtacgtttctgcctggttactgacctttcccactatggaccctaagccattggcatatgccatccagaatgttagttttgatataagtattgtcagcctgatctccttgtctattgtctgtgctggaatgatgatatggaattttgttaaagaaaaaaattttgttggacaaattttggtgtttgttctattgtacagctccctctatagcacctacctgtggacaggccttctagcaatttctttgtttcttttgaaaaagcgagagagggtacaaattcctgttggaataatcataatatctggctggggaattcctgctctccttgttggtgttcttttgataactggaaaacacaatggagatagcattgactcagccttcttttatggaaaagaacagatgatcaccacagcagtcaccctgttctgcagcatcctgatagctggcatatccctcatgtgcatgaaccagactgcccaagcaggaagctatgaaggtttcgatcagtctcagagccacaaagtggtggagcctggaaatactgcttttgaggagagtccagcaccagtaaatgaaccagaactttttacaagctctattccagaaacaagttgctgctcctgctccatgggaaatggtgaattacactgcccatcaatagagccaatagcaaacacaagcaccagtgagcctgtgattccttcgtttgagaaaaacaatcattgtgtgagtcgctgtaactcccagagctgcatattagcccaggaagaagaacagtatctacagagtggagaccagcaactgacccgacatgtgttgctgtgtttacttctcatcattggcctgttcgctaatctttccagttgtttatggtggctattcaaccaagagcctggaagactttatgttgagttacagtttttctgtgccgtgtttaactttggtcagggatttatttcctttggaatctttggattagataaacatttaatcatcctgcctttcaaaagaagacttgaattcctatggaacaataaagacacagcagaaaacagggattctcctgtttcagaggaaataaaaatgacctgtcaacaatttatccattatcaccgtgacctctgtatccgaaacattgtcaaagaaagaaggtgtggtgcaaagacttctgctggaactttctgtggctgtgacctggtgagctggctaattgaagtcggccttgcctccgaccgtggtgaagctgtgatatacggagacaggctggtacaagggggagtcatccaacatattaccaacgagtatgaattccgggatgagtacttgttttacagatttcttcaaaagagtcctgaacagagtcctcctgctattaatgcaaacactctccaacaggaaagatataaagaaattgagcattcatccccaccctcacattcccctaagacctaaattatgcaggggagaaccctacatggaatcatattctagccgcgtattcattagtttttagctgggtgaccttgggcaagttaacagaggcaacctctctgagcctcagttgtctcttctgtaaaatgtgaaaagatgtgctcccaccacatgcgcagggtctgtgattttacatgtatgtaaaacacataggaagctgacttaggaaaaagagaaaaccaaattaaagttctgataatgaatataatatagtcatcctttagtatccaaggggattggttccaggactcctgaagatcccaaaatctgaggatactcaagtcccttatataaaatggtgtaggccgggcatggtggctcacgcctgtaatcccagtactttgggaggccgagtcaggtggatcacctgaggtcaggagttcaagaccagcctggccaacatggcgaaaccccgtctctactataaaatacaaaaaattagttgggtgtggtggcgggtgcctgtaatcccagctactcaggaggctgaggcaggagaatcgcttgaatctgggaggcagaggttgctgtgagccgagatcgtgccactgcactccagcctgagcaacagagcaagactctatctcaaaaataaaataaaataaaataaaataattaataaaatggtgtagtatttgcatataacctatgcacattctcccatatagtttaatcatctttagatacttataatgcctaatacaatgtaaatgctatgtaaatagttgttgttatactgtattgtttagggaataacaataagaaaaacagtctgtacatgttcactacagatgcaaccattgttaagcctgactacatctttttatctgcggttgattgaatctatggatgtggaacctgtgcatatggagggtcaactgtactataaataatacgaatatgccaacattatataatcattgctttctgcaactgtttactataatttcaaaattaatatcctattaactgttcctataaattatcaaatttggcaagtgtattactagcaggagatggaccttaaattatgacaactttatattttttgatagcatctcttgaaaaagaattttaatgattctaataagaggttctttttcttttttccatttccttgacaaatagtactcatttaaaaactagagggctaggcttagtggctcacgcctgtaatctcagcactttgggaggctgaggcgggcagatcgcttgaggtcaggagttcaagaccagcccgggcaacgtggtgaaacccggtctgtactaaaaaaaaaaaaaaagaaaaagaaaaagaaaaaagaatacccaggtgtggtagtgcatgcctgtagtcccagctactttggagactgaggtgggagtaccccttgagcctgggaggcgcaggttgcagtgaaccaagatcacatcactgcacttcaacctgggtgacagagcaagaccctgtctcaaaaacaaaaaacaagcaaaaaaaacctagaggcactatttttttttaaagtttgtcttttcttttctacccaaattactaatctatgccattaaggaaaggaataagaacctccatatgtattattatctccacagtcctgcagaagtacaatctgatctttaactttcatgctacaaataataatttgagtagattaatttgaattttatcaacaaaattattgccatatgatgtatcatttctgtgtttgaacaaagcatcgtaatgcaggataacttctactttattccctgtagttaaaaaaaaaaaaactatatagttcaagccaatatttaaaaattctaaacctaggctgggcatggtgactcatacctgtaatcccagcactttgggaggccgaggcaggtgaattgcttcagcccaggagttcgagaccagcctggccaatgtggtgaaaccccatctctactaaaaaaaaaaaaaaaaaaaaaaattagccaggtgtggtggtgtgcacctgtaatcccagctacccaggaggctgaggcaggaaaattgcttgaaaccaggaggcagaggttgcagtgagctgagatcgtgccactgcactccagcctgagtgtcagagtgagactctgtctcagaaaaaaaaaaaaaaattctaaagattacatttagaatttagtctttttaaagtgtccatgtataaaaatatataatttttaaaattactaaatgttgccttttctcttagtctaatattttagctactaaaacaaaatataaactggatagcttataaacaacataaacttatttctcacagttttggaggctgtgaagtccaagattaaggcactaacagatctagtgtctggtaaggcaaatttctggctcatagatggtaccttcttgctgtgtccccacatggtagatgggaagaactggtctcattggccccttataaggacattaattccactcaataggctccaccctcatgatctaataacctctcaaaggccctacctcctaatactaacacattgaggatgtgacttcaactttacatttctacaggcagagaagtggggctgtgtaaattcttcccatcagtacttgaatgttcatttaacaaataacttatcgagcatctagcatgttccagacacaatctgaacactgagcacacaacagttggaacaaatatgattcctatcctcatggagcttctattctcctgtgaaaaacagatgttaaacatgattgaggattaggtttcaacataagaattctaggaggacacagacatttagaccatagcatcttcaggtaaactttatcttcagtaaattaaagagatctatttagatgacctttgagcatcttaattattagatgtcagtgctagtttaacttattttaaacgtttcagatatttatttaattatactttaagtgtctcatgtaaaaaagttatttataaaataatttatagggttagagtcattgcccttttaatgcaacaaataaacagttttttaaaaacctgcatgggggccaggcgcggtggttcatacctgcaatcccagcactttgggaggtcgaggctggcggatcacgaggtcaggagatcgagaccaccctgattaatgcggtgaaatcccgtctctactaaaaatacaaaaaattagccagacgtggtggtgggcacctatagtcccagctactcgggaggctgaggcaggagaatggcatgaacccggaaggcggagcttgcagtgaaccaagatcgcgccactgcactccagcctgggcgacagagtgagactccatcgcaaaaaaaaaaaaaaaaaaacctgcatggaagcctagtatatttattaataacaaataaattatactttagtgtactattaacctataccaattttaagttgtgattagggaatggggatgtttttaagctgaattgtcttgctgcggaactttccttttttaataagaccatattatgactctgaatgctcaagggtaagtctaaggcctcattgctgttaccaggagatttttctagttacagtaataaagatgttaattcacatgcatgcagacaactgaaactcaagtggagaatttgtttgtgaacaagtcatactacttctgttatttgcatgaatggaatctgcaatatctttttccatgggagaccctaaaagaaaaccctggatcagaatgatctgcagtttcagataataaaggcttttaagagacatttttagaattaaaaatatgctaattttattaaatgaaaatatttgtaactgttaactttctcactgacaaagcaagtttctcaataaaatacctattttaacttgc

SEQ ID NO: 8824 - protein, 842 aa, Homo sapiens; identical to SEQ ID NO: 8822

SEQ ID NO: 8825 - DNA, 4923 bp, Homo sapiens
cccaccttactttatcggaacgtgcctaagctgctgcagctggcacccggttgcgctcggcgaagagggctgggggcgggagatgacggtggtcttctccctgcttggcaccctgcgagcaccagctcccttctcctcgccactccaaggttgcagacgaagcaggtactgtcctagatgttaaggacacaacattgagcaaaaacatgcatagtccctgcttccgtgacacttgagtgaactgaatgtgcaaagtccctgtggcacaaagtccctggggccagtgtgtgtggcgggtgtagaaggagctaaagagatctggttggagttggagggtgagagaaaatgaattctaatttacctgcagagaacttaaccattgcagtcaatatgaccaagactttgcctacagcagtaacgcatggatttaattccactaatgacccaccttcaatgtcaattacaaggctttttccagccttactggaatgctttggcattgtcctttgtggctacatagcaggaagggccaatgtcataacatcaacccaggccaaaggactaggaaattttgtctccagatttgcacttccagctttattattcaaaaacatggttgtacttaatttttccaatgtggactggtccttcctatatagtatcttaattgccaaagcttctgtatttttcattgtatgtgtattaaccttattggttgccagtcctgatagtcgatttagcaaagctggactattccctatttttgctacacaaagtaatgactttgcattgggataccctatagttgaagctttatatcaaactacatacccagaatatctccagtacatttatttggtggcaccaatatctcttatgatgttaaaccctatagggtttattttctgtgaaatccaaaagtggaaagacactcaaaatgcttctcaaaataaaataaaaattgtgggactcggactcctgcgtgtattacagaacccaatagtatttatggtcttcattggcatcgccttcaattttattcttgatcgaaaggtacctgtatatgtcgaaaattttcttgatggacttggaaattctttttctggatcagccctattttatcttggtctcacgatggtgggaaaaataaagagactgaagaagtcggcatttgtagtactaattcttctcatcacagctaaacttctggtgctgccacttctgtgcagagaaatggtggaactcttggacaagggcgacagtgtggtgaaccatacaagtttatcaaattatgcatttctgtatggtgtatttcctgtagcaccaggagtggctatctttgcaacacaattcaacatggaagtagaaattataacctcagggatggtgataagcacatttgtgtctgctcccatcatgtacgtttctgcctggttactgacctttcccactatggaccctaagccattggcatatgccatccagaatgttagttttgatataagtattgtcagcctgatctccttgatctggtctctggctattcttcttttgagtaagaaatataaacagcttcctcatatgcttacaactaatttactcattgctcagtctattgtctgtgctggaatgatgatatggaattttgttaaagaaaaaaattttgttggacaaattttggtgtttgttctattgtacagctccctctatagcacctacctgtggacaggccttctagcaatttctttgtttcttttgaaaaagcgagagagggtacaaattcctgttggaataatcataatatctggctggggaattcctgctctccttgttggtgttcttttgataactggaaaacacaatggagatagcattgactcagccttcttttatggaaaagaacagatgatcaccacagcagtcaccctgttctgcagcatcctgatagctggcatatccctcatgtgcatgaaccagactgcccaagcaggaagctatgaaggtttcgatcagtctcagagccacaaagtggtggagcctggaaatactgcttttgaggagagtccagcaccagtaaatgaaccagaactttttacaagctctattccagaaacaagttgctgctcctgctccatgggaaatggtgaattacactgcccatcaatagagccaatagcaaacacaagcaccagtgagcctgtgattccttcgtttgagaaaaacaatcattgtgtgagtcgctgtaactcccagagctgcatattagcccaggaagaagaacagtatctacagagtggagaccagcaactgacccgacatgtgttgctgtgtttacttctcatcattggcctgttcgctaatctttccagttgtttatggtggctattcaaccaagagcctggaagactttatgttgagttacagtttttctgtgccgtgtttaactttggtcagggatttatttcctttggaatctttggattagataaacatttaatcatcctgcctttcaaaagaagacttgaattcctatggaacaataaagacacagcagaaaacagggattctcctgtttcagaggaaataaaaatgacctgtcaacaatttatccattatcaccgtgacctctgtatccgaaacattgtcaaagaaagaaggtgtggtgcaaagacttctgctggaactttctgtggctgtgacctggtgagctggctaattgaagtcggccttgcctccgaccgtggtgaagctgtgatatacggagacaggctggtacaagggggagtcatccaacatattaccaacgagtatgaattccgggatgagtacttgttttacagatttcttcaaaagagtcctgaacagagtcctcctgctattaatgcaaacactctccaacaggaaagatataaagaaattgagcattcatccccaccctcacattcccctaagacctaaattatgcaggggagaaccctacatggaatcatattctagccgcgtattcattagtttttagctgggtgaccttgggcaagttaacagaggcaacctctctgagcctcagttgtctcttctgtaaaatgtgaaaagatgtgctcccaccacatgcgcagggtctgtgattttacatgtatgtaaaacacataggaagctgacttaggaaaaagagaaaaccaaattaaagttctgataatgaatataatatagtcatcctttagtatccaaggggattggttccaggactcctgaagatcccaaaatctgaggatactcaagtcccttatataaaatggtgtaggccgggcatggtggctcacgcctgtaatcccagtactttgggaggccgagtcaggtggatcacctgaggtcaggagttcaagaccagcctggccaacatggcgaaaccccgtctctactataaaatacaaaaaattagttgggtgtggtggcgggtgcctgtaatcccagctactcaggaggctgaggcaggagaatcgcttgaatctgggaggcagaggttgctgtgagccgagatcgtgccactgcactccagcctgagcaacagagcaagactctatctcaaaaataaaataaaataaaataaaataattaataaaatggtgtagtatttgcatataacctatgcacattctcccatatagtttaatcatctttagatacttataatgcctaatacaatgtaaatgctatgtaaatagttgttgttatactgtattgtttagggaataacaataagaaaaacagtctgtacatgttcactacagatgcaaccattgttaagcctgactacatctttttatctgcggttgattgaatctatggatgtggaacctgtgcatatggagggtcaactgtactataaataatacgaatatgccaacattatataatcattgctttctgcaactgtttactataatttcaaaattaatatcctattaactgttcctataaattatcaaatttggcaagtgtattactagcaggagatggaccttaaattatgacaactttatattttttgatagcatctcttgaaaaagaattttaatgattctaataagaggttctttttcttttttccatttccttgacaaatagtactcatttaaaaactagagggctaggcttagtggctcacgcctgtaatctcagcactttgggaggctgaggcgggcagatcgcttgaggtcaggagttcaagaccagcccgggcaacgtggtgaaacccggtctgtactaaaaaaaaaaaaaaagaaaaagaaaaagaaaaaagaatacccaggtgtggtagtgcatgcctgtagtcccagctactttggagactgaggtgggagtaccccttgagcctgggaggcgcaggttgcagtgaaccaagatcacatcactgcacttcaacctgggtgacagagcaagaccctgtctcaaaaacaaaaaacaagcaaaaaaaacctagaggcactatttttttttaaagtttgtcttttcttttctacccaaattactaatctatgccattaaggaaaggaataagaacctccatatgtattattatctccacagtcctgcagaagtacaatctgatctttaactttcatgctacaaataataatttgagtagattaatttgaattttatcaacaaaattattgccatatgatgtatcatttctgtgtttgaacaaagcatcgtaatgcaggataacttctactttattccctgtagttaaaaaaaaaaaaactatatagttcaagccaatatttaaaaattctaaacctaggctgggcatggtgactcatacctgtaatcccagcactttgggaggccgaggcaggtgaattgcttcagcccaggagttcgagaccagcctggccaatgtggtgaaaccccatctctact

SEQ ID NO: 8826 - protein, 870 aa, Homo sapiens; identical to SEQ ID NO: 696

SEQ ID NO: 8827 - DNA, 4817 bp, Homo sapiens
gcggccggcgaggggctgagctgacagggccgcatcggcttaccccaccttactttatcggaacgtgcctaagctgctgcagctggcacccggttgcgctcggcgaagagggctgggggcgggagatgacggtggtcttctccctgcttggcaccctgcgagcaccagctcccttctcctcgccactccaaggttgcagacgaagcagagatctggttggagttggagggtgagagaaaatgaattctaatttacctgcagagaacttaaccattgcagtcaatatgaccaagactttgcctacagcagtaacgcatggatttaattccactaatgacccaccttcaatgtcaattacaaggctttttccagccttactggaatgctttggcattgtcctttgtggctacatagcaggaagggccaatgtcataacatcaacccaggccaaaggactaggaaattttgtctccagatttgcacttccagctttattattcaaaaacatggttgtacttaatttttccaatgtggactggtccttcctatatagtatcttaattgccaaagcttctgtatttttcattgtatgtgtattaaccttattggttgccagtcctgatagtcgatttagcaaagctggactattccctatttttgctacacaaagtaatgactttgcattgggataccctatagttgaagctttatatcaaactacatacccagaatatctccagtacatttatttggtggcaccaatatctcttatgatgttaaaccctatagggtttattttctgtgaaatccaaaagtggaaagacactcaaaatgcttctcaaaataaaataaaaattgtgggactcggactcctgcgtgtattacagaacccaatagtatttatggtcttcattggcatcgccttcaattttattcttgatcgaaaggtacctgtatatgtcgaaaattttcttgatggacttggaaattctttttctggatcagccctattttatcttggtctcacgatggtgggaaaaataaagagactgaagaagtcggcatttgtagtactaattcttctcatcacagctaaacttctggtgctgccacttctgtgcagagaaatggtggaactcttggacaagggcgacagtgtggtgaaccatacaagtttatcaaattatgcatttctgtatggtgtatttcctgtagcaccaggagtggctatctttgcaacacaattcaacatggaagtagaaattataacctcagggatggtgataagcacatttgtgtctgctcccatcatgtacgtttctgcctggttactgacctttcccactatggaccctaagccattggcatatgccatccagaatgttagttttgatataagtattgtcagcctgatctccttgatctggtctctggctattcttcttttgagtaagaaatataaacagcttcctcatatgcttacaactaatttactcattgctcagtctattgtctgtgctggaatgatgatatggaattttgttaaagaaaaaaattttgttggacaaattttggtgtttgttctattgtacagctccctctatagcacctacctgtggacaggccttctagcaatttctttgtttcttttgaaaaagcgagagagggtacaaattcctgttggaataatcataatatctggctggggaattcctgctctccttgttggtgttcttttgataactggaaaacacaatggagatagcattgactcagccttcttttatggaaaagaacagatgatcaccacagcagtcaccctgttctgcagcatcctgatagctggcatatccctcatgtgcatgaaccagactgcccaagcaggaagctatgaaggtttcgatcagtctcagagccacaaagtggtggagcctggaaatactgcttttgaggagagtccagcaccagtaaatgaaccagaactttttacaagctctattccagaaacaagttgctgctcctgctccatgggaaatggtgaattacactgcccatcaatagagccaatagcaaacacaagcaccagtgagcctgtgattccttcgtttgagaaaaacaatcattgtgtgagtcgctgtaactcccagagctgcatattagcccaggaagaagaacagtatctacagagtggagaccagcaactgacccgacatgtgttgctgtgtttacttctcatcattggcctgttcgctaatctttccagttgtttatggtggctattcaaccaagagcctggaagactttatgttgagttacagtttttctgtgccgtgtttaactttggtcagggatttatttcctttggaatctttggattagataaacatttaatcatcctgcctttcaaaagaagacttgaattcctatggaacaataaagacacagcagaaaacagggattctcctgtttcagaggaaataaaaatgacctgtcaacaatttatccattatcaccgtgacctctgtatccgaaacattgtcaaagaaagaaggtgtggtgcaaagacttctgctggaactttctgtggctgtgacctggtgagctggctaattgaagtcggccttgcctccgaccgtggtgaagctgtgatatacggagacaggctggtacaagggggagtcatccaacatattaccaacgagtatgaattccgggatgagtacttgttttacagatttcttcaaaagagtcctgaacagagtcctcctgctattaatgcaaacactctccaacaggaaagatataaagaaattgagcattcatccccaccctcacattcccctaagacctaaattatgcaggggagaaccctacatggaatcatattctagccgcgtattcattagtttttagctgggtgaccttgggcaagttaacagaggcaacctctctgagcctcagttgtctcttctgtaaaatgtgaaaagatgtgctcccaccacatgcgcagggtctgtgattttacatgtatgtaaaacacataggaagctgacttaggaaaaagagaaaaccaaattaaagttctgataatgaatataatatagtcatcctttagtatccaaggggattggttccaggactcctgaagatcccaaaatctgaggatactcaagtcccttatataaaatggtgtaggccgggcatggtggctcacgcctgtaatcccagtactttgggaggccgagtcaggtggatcacctgaggtcaggagttcaagaccagcctggccaacatggcgaaaccccgtctctactataaaatacaaaaaattagttgggtgtggtggcgggtgcctgtaatcccagctactcaggaggctgaggcaggagaatcgcttgaatctgggaggcagaggttgctgtgagccgagatcgtgccactgcactccagcctgagcaacagagcaagactctatctcaaaaataaaataaaataaaataaaataattaataaaatggtgtagtatttgcatataacctatgcacattctcccatatagtttaatcatctttagatacttataatgcctaatacaatgtaaatgctatgtaaatagttgttgttatactgtattgtttagggaataacaataagaaaaacagtctgtacatgttcactacagatgcaaccattgttaagcctgactacatctttttatctgcggttgattgaatctatggatgtggaacctgtgcatatggagggtcaactgtactataaataatacgaatatgccaacattatataatcattgctttctgcaactgtttactataatttcaaaattaatatcctattaactgttcctataaattatcaaatttggcaagtgtattactagcaggagatggaccttaaattatgacaactttatattttttgatagcatctcttgaaaaagaattttaatgattctaataagaggttctttttcttttttccatttccttgacaaatagtactcatttaaaaactagagggctaggcttagtggctcacgcctgtaatctcagcactttgggaggctgaggcgggcagatcgcttgaggtcaggagttcaagaccagcccgggcaacgtggtgaaacccggtctgtactaaaaaaaaaaaaaaagaaaaagaaaaagaaaaaagaatacccaggtgtggtagtgcatgcctgtagtcccagctactttggagactgaggtgggagtaccccttgagcctgggaggcgcaggttgcagtgaaccaagatcacatcactgcacttcaacctgggtgacagagcaagaccctgtctcaaaaacaaaaaacaagcaaaaaaaacctagaggcactatttttttttaaagtttgtcttttcttttctacccaaattactaatctatgccattaaggaaaggaataagaacctccatatgtattattatctccacagtcctgcagaagtacaatctgatctttaactttcatgctacaaataataatttgagtagattaatttgaattttatcaacaaaattattgccatatgatgtatcatttctgtgtttgaacaaagcatcgtaatgcaggataacttctactttattccctgtagttaaaaaaaaaaaaactatatagttcaagccaatatttaaaaattctaaacctaggctgggcatggtgactcatacctgtaatcccagcactttgggaggccgaggcaggtgaattgcttcagcccaggagttcgagaccagcctggccaatgtggtgaaaccccatctctact

SEQ ID NO: 8828 - protein, 870 aa, Homo sapiens; identical to SEQ ID NO: 696

SEQ ID NO: 8829 - DNA, 4898 bp, Homo sapiens
agcggggcctgaaggcggggcgggggcggggcctcgcggccggcgaggggctgagctgacagggccgcatcggcttaccccaccttactttatcggaacgtgcctaagctgctgcagctggcacccggttgcgctcggcgaagagggctgggggcgggagatgacggtggtcttctccctgcttggcaccctgcgagcaccagctcccttctcctcgccactccaaggttgcagacgaagcagatgtgattataaagacttcagtggaataatcgcaagttcccatgtgagatctggttggagttggagggtgagagaaaatgaattctaatttacctgcagagaacttaaccattgcagtcaatatgaccaagactttgcctacagcagtaacgcatggatttaattccactaatgacccaccttcaatgtcaattacaaggctttttccagccttactggaatgctttggcattgtcctttgtggctacatagcaggaagggccaatgtcataacatcaacccaggccaaaggactaggaaattttgtctccagatttgcacttccagctttattattcaaaaacatggttgtacttaatttttccaatgtggactggtccttcctatatagtatcttaattgccaaagcttctgtatttttcattgtatgtgtattaaccttattggttgccagtcctgatagtcgatttagcaaagctggactattccctatttttgctacacaaagtaatgactttgcattgggataccctatagttgaagctttatatcaaactacatacccagaatatctccagtacatttatttggtggcaccaatatctcttatgatgttaaaccctatagggtttattttctgtgaaatccaaaagtggaaagacactcaaaatgcttctcaaaataaaataaaaattgtgggactcggactcctgcgtgtattacagaacccaatagtatttatggtcttcattggcatcgccttcaattttattcttgatcgaaaggtacctgtatatgtcgaaaattttcttgatggacttggaaattctttttctggatcagccctattttatcttggtctcacgatggtgggaaaaataaagagactgaagaagtcggcatttgtagtactaattcttctcatcacagctaaacttctggtgctgccacttctgtgcagagaaatggtggaactcttggacaagggcgacagtgtggtgaaccatacaagtttatcaaattatgcatttctgtatggtgtatttcctgtagcaccaggagtggctatctttgcaacacaattcaacatggaagtagaaattataacctcagggatggtgataagcacatttgtgtctgctcccatcatgtacgtttctgcctggttactgacctttcccactatggaccctaagccattggcatatgccatccagaatgttagttttgatataagtattgtcagcctgatctccttgatctggtctctggctattcttcttttgagtaagaaatataaacagcttcctcatatgcttacaactaatttactcattgctcagtctattgtctgtgctggaatgatgatatggaattttgttaaagaaaaaaattttgttggacaaattttggtgtttgttctattgtacagctccctctatagcacctacctgtggacaggccttctagcaatttctttgtttcttttgaaaaagcgagagagggtacaaattcctgttggaataatcataatatctggctggggaattcctgctctccttgttggtgttcttttgataactggaaaacacaatggagatagcattgactcagccttcttttatggaaaagaacagatgatcaccacagcagtcaccctgttctgcagcatcctgatagctggcatatccctcatgtgcatgaaccagactgcccaagcaggaagctatgaaggtttcgatcagtctcagagccacaaagtggtggagcctggaaatactgcttttgaggagagtccagcaccagtaaatgaaccagaactttttacaagctctattccagaaacaagttgctgctcctgctccatgggaaatggtgaattacactgcccatcaatagagccaatagcaaacacaagcaccagtgagcctgtgattccttcgtttgagaaaaacaatcattgtgtgagtcgctgtaactcccagagctgcatattagcccaggaagaagaacagtatctacagagtggagaccagcaactgacccgacatgtgttgctgtgtttacttctcatcattggcctgttcgctaatctttccagttgtttatggtggctattcaaccaagagcctggaagactttatgttgagttacagtttttctgtgccgtgtttaactttggtcagggatttatttcctttggaatctttggattagataaacatttaatcatcctgcctttcaaaagaagacttgaattcctatggaacaataaagacacagcagaaaacagggattctcctgtttcagaggaaataaaaatgacctgtcaacaatttatccattatcaccgtgacctctgtatccgaaacattgtcaaagaaagaaggtgtggtgcaaagacttctgctggaactttctgtggctgtgacctggtgagctggctaattgaagtcggccttgcctccgaccgtggtgaagctgtgatatacggagacaggctggtacaagggggagtcatccaacatattaccaacgagtatgaattccgggatgagtacttgttttacagatttcttcaaaagagtcctgaacagagtcctcctgctattaatgcaaacactctccaacaggaaagatataaagaaattgagcattcatccccaccctcacattcccctaagacctaaattatgcaggggagaaccctacatggaatcatattctagccgcgtattcattagtttttagctgggtgaccttgggcaagttaacagaggcaacctctctgagcctcagttgtctcttctgtaaaatgtgaaaagatgtgctcccaccacatgcgcagggtctgtgattttacatgtatgtaaaacacataggaagctgacttaggaaaaagagaaaaccaaattaaagttctgataatgaatataatatagtcatcctttagtatccaaggggattggttccaggactcctgaagatcccaaaatctgaggatactcaagtcccttatataaaatggtgtaggccgggcatggtggctcacgcctgtaatcccagtactttgggaggccgagtcaggtggatcacctgaggtcaggagttcaagaccagcctggccaacatggcgaaaccccgtctctactataaaatacaaaaaattagttgggtgtggtggcgggtgcctgtaatcccagctactcaggaggctgaggcaggagaatcgcttgaatctgggaggcagaggttgctgtgagccgagatcgtgccactgcactccagcctgagcaacagagcaagactctatctcaaaaataaaataaaataaaataaaataattaataaaatggtgtagtatttgcatataacctatgcacattctcccatatagtttaatcatctttagatacttataatgcctaatacaatgtaaatgctatgtaaatagttgttgttatactgtattgtttagggaataacaataagaaaaacagtctgtacatgttcactacagatgcaaccattgttaagcctgactacatctttttatctgcggttgattgaatctatggatgtggaacctgtgcatatggagggtcaactgtactataaataatacgaatatgccaacattatataatcattgctttctgcaactgtttactataatttcaaaattaatatcctattaactgttcctataaattatcaaatttggcaagtgtattactagcaggagatggaccttaaattatgacaactttatattttttgatagcatctcttgaaaaagaattttaatgattctaataagaggttctttttcttttttccatttccttgacaaatagtactcatttaaaaactagagggctaggcttagtggctcacgcctgtaatctcagcactttgggaggctgaggcgggcagatcgcttgaggtcaggagttcaagaccagcccgggcaacgtggtgaaacccggtctgtactaaaaaaaaaaaaaaagaaaaagaaaaagaaaaaagaatacccaggtgtggtagtgcatgcctgtagtcccagctactttggagactgaggtgggagtaccccttgagcctgggaggcgcaggttgcagtgaaccaagatcacatcactgcacttcaacctgggtgacagagcaagaccctgtctcaaaaacaaaaaacaagcaaaaaaaacctagaggcactatttttttttaaagtttgtcttttcttttctacccaaattactaatctatgccattaaggaaaggaataagaacctccatatgtattattatctccacagtcctgcagaagtacaatctgatctttaactttcatgctacaaataataatttgagtagattaatttgaattttatcaacaaaattattgccatatgatgtatcatttctgtgtttgaacaaagcatcgtaatgcaggataacttctactttattccctgtagttaaaaaaaaaaaaactatatagttcaagccaatatttaaaaattctaaacctaggctgggcatggtgactcatacctgtaatcccagcactttgggaggccgaggcaggtgaattgcttcagcccaggagttcgagaccagcctggccaatgtggtgaaaccccatctctact

SEQ ID NO: 8830 - protein, 870 aa, Homo sapiens; identical to SEQ ID NO: 696

SEQ ID NO: 8831 - DNA, 3928 bp, Homo sapiens
cccaccttactttatcggaacgtgcctaagctgctgcagctggcacccggttgcgctcggcgaagagggctgggggcgggagatgacggtggtcttctccctgcttggcaccctgcgagcaccagctcccttctcctcgccactccaaggttgcagacgaagcaggtactgtcctagatgttaaggacacaacattgagcaaaaacatgcatagtccctgcttccgtgacacttgagtgaactgaatgtgcaaagtccctgtggcacaaagtccctggggccagtgtgtgtggcgggtgtagaaggagctaaagagatctggttggagttggagggtgagagaaaatgaattctaatttacctgcagagaacttaaccattgcagtcaatatgaccaagactttgcctacagcagtaacgcatggatttaattccactaatgacccaccttcaatgtcaattacaaggctttttccagccttactggaatgctttggcattgtcctttgtggctacatagcaggaagggccaatgtcataacatcaacccaggccaaaggactaggaaattttgtctccagatttgcacttccagctttattattcaaaaacatggttgtacttaatttttccaatgtggactggtccttcctatatagtatcttaattgccaaagcttctgtatttttcattgtatgtgtattaaccttattggttgccagtcctgatagtcgatttagcaaagctggactattccctatttttgctacacaaagtaatgactttgcattgggataccctatagttgaagctttatatcaaactacatacccagaatatctccagtacatttatttggtggcaccaatatctcttatgatgttaaaccctatagggtttattttctgtgaaatccaaaagtggaaagacactcaaaatgcttctcaaaataaaataaaaattgtgggactcggactcctgcgtgtattacagaacccaatagtatttatggtcttcattggcatcgccttcaattttattcttgatcgaaaggtacctgtatatgtcgaaaattttcttgatggacttggaaattctttttctggatcagccctattttatcttggtctcacgatggtgggaaaaataaagagactgaagaagtcggcatttgtagtactaattcttctcatcacagctaaacttctggtgctgccacttctgtgcagagaaatggtggaactcttggacaagggcgacagtgtggtgaaccatacaagtttatcaaattatgcatttctgtatggtgtatttcctgtagcaccaggagtggctatctttgcaacacaattcaacatggaagtagaaattataacctcagggatggtgataagcacatttgtgtctgctcccatcatgtacgtttctgcctggttactgacctttcccactatggaccctaagccattggcatatgccatccagaatgttagttttgatataagtattgtcagcctgatctccttgatctggtctctggctattcttcttttgagtaagaaatataaacagcttcctcatatgcttacaactaatttactcattgctcagtctattgtctgtgctggaatgatgatatggaattttgttaaagaaaaaaattttgttggacaaattttggtgtttgttctattgtacagctccctctatagcacctacctgtggacaggccttctagcaatttctttgtttcttttgaaaaagcgagagagggtacaaattcctgttggaataatcataatatctggctggggaattcctgctctccttgttggtgttcttttgataactggaaaacacaatggagatagcattgactcagccttcttttatggaaaagaacagatgatcaccacagcagtcaccctgttctgcagcatcctgatagctggcatatccctcatgtgcatgaaccagactgcccaagcaggaagctatgaaggtttcgatcagtctcagagccacaaagtggtggagcctggaaatactgcttttgaggagagtccagcaccagtaaatgaaccagaactttttacaagctctattccagaaacaagttgctgctcctgctccatgggaaatggtgaattacactgcccatcaatagagccaatagcaaacacaagcaccagtgagcctgtgattccttcgtttgagaaaaacaatcattgtgtgagtcgctgtaactcccagagctgcatattagcccaggaagaagaacagtatctacagagtggagaccagcaactgacccgacatgtgttgctgtgtttacttctcatcattggcctgttcgctaatctttccagttgtttatggtggctattcaaccaagagcctggaagactttatgttgagttacagtttttctgtgccgtgtttaactttggtcagggatttatttcctttggaatctttggattagataaacatttaatcatcctgcctttcaaaagaagacttgaattcctatggaacaataaagacacagcagaaaacagggattctcctgtttcagaggaaataaaaatgacctgtcaacaatttatccattatcaccgtgacctctgtatccgaaacattgtcaaagaaagaaggtgtggtgcaaagacttctgctggaactttctgtggctgtgacctggtgagctggctaattgaagtcggccttgcctccgaccgtggtgaagctgtgatatacggagacaggctggtacaagggggagtcatccaacatattaccaacgagtatgaattccgggatgagtacttgttttacagatttcttcaaaagagtcctgaacagagtcctcctgctattaatgcaaacactctccaacaggaaagatataaagaaattgagcattcatccccaccctcacattcccctaagacctaaattatgcaggggagaaccctacatggaatcatattctagccgcgtattcattagtttttagctgggtgaccttgggcaagttaacagaggcaacctctctgagcctcagttgtctcttctgtaaaatgtgaaaagatgtgctcccaccacatgcgcagggtctgtgattttacatgtatgtaaaacacataggaagctgacttaggaaaaagagaaaaccaaattaaagttctgataatgaatataatatagtcatcctttagtatccaaggggattggttccaggactcctgaagatcccaaaatctgaggatactcaagtcccttatataaaatggtgtaggccgggcatggtggctcacgcctgtaatcccagtactttgggaggccgagtcaggtggatcacctgaggtcaggagttcaagaccagcctggccaacatggcgaaaccccgtctctactataaaatacaaaaaattagttgggtgtggtggcgggtgcctgtaatcccagctactcaggaggctgaggcaggagaatcgcttgaatctgggaggcagaggttgctgtgagccgagatcgtgccactgcactccagcctgagcaacagagcaagactctatctcaaaaataaaataaaataaaataaaataattaataaaatggtgtagtatttgcatataacctatgcacattctcccatatagtttaatcatctttagatacttataatgcctaatacaatgtaaatgctatgtaaatagttgttgttatactgtattgtttagggaataacaataagaaaaacagtctgtacatgttcactacagatgcaaccattgttaagcctgactacatctttttatctgcggttgattgaatctatggatgtggaacctgtgcatatggagggtcaactgtactataaataatacgaatatgccaacattatataatcattgctttctgc

SEQ ID NO: 8832 - protein, 870 aa, Homo sapiens; identical to SEQ ID NO: 696

SEQ ID NO: 8833 - DNA, 1030 bp, Homo sapiens
cttccggcttccctgctcccacaaaatggtagccgccgtgggggatgtccagttttttttcctcttcccaagtacagacgcagagcagacttgtctttccgcttaacctcaacctcgtgtgatctgccagtttcgctcccggttagcccaggactttttatagcatagagttttaaagcaagggcttagaatcagacctgggtcaaaatcctgccttccaccttcaccaaggcagtgtgaccttgacgttcctacataagagattaaaatgtaaacccttagccctgagcttgttttagaatctgggccccgtccatgactgcttctattctattgcggtacgggggtggggtgggggtggggaactacatgcatgtccactcagtatactgaaactggttacattgatggaaaacttccaaagcttcttgaaataaagacgccaaattccagcgaaacagctgatgccagccagcttgaagacccctgccacagaagaagggaatcagcatgagaatacagcttcttcatctcgctgtcccatgacttcgccctgtactcttcagccaattaatgatctccacacttgggaccactctaaaacccttaagaacctgagactcaaagtcctcctggagacgaatttgaggtttcctcctatctgtgtttggtggccctatgattaaacctctttctcttctgcaacctggtgtcccagtgtattaacttgccatgggcatcagacaacaaacctatatatagtatcccaaatatggtgctccactttgaaacctgaagaaatcctgcaattgagttagccttttgaaataaaaattatttcaaattttaaaatatttatatatgtttccacttaagatatctacaagcatttgtttacaaccttttatcttgctttgcatcttaaacatttctgtatggcaatttccgtgtcttcctatcatctcggccatcttagtgcaaagatacaaaattgtgtggcttattaagaaaaattacagtaagctaaggg

SEQ ID NO: 8834 - protein, 46 aa, Homo sapiens
MSTQYTETGYIDGKLPKLLEIKTPNSSETADASQLEDPCHRRRESA

SEQ ID NO: 8835 - DNA, 391 bp, Homo sapiens
gctcccacaaaatggtagccgccgtgggggatgtccagttttttttcctcttcccaagtacagacgcagagcagacttgtctttccgcttaacctcaacctcgtgtgatctgccagtttcgctcccgacgccaaattccagcgaaacagctgatgccagccagcttgaagacccctgccacagaagaagggaatcagcatgagaatacagcttcttcatctcgctgtcccatgacttcgccctgtactcttcagccaattaatgatctccacacttgggaccactctaaaacccttaagaacctgagactcaaagtcctcctggagacgaatttgaggtttcctcctatctgtgtttggtggccctatgattaaacctctttctcttctgc

SEQ ID NO: 8836 - protein, 73 aa, Homo sapiens
MPASLKTPATEEGNQHENTASSSRCPMTSPCTLQPINDLHTWDHSKTLKNLRLKVLLETNLRFPPICVWWPYD

SEQ ID NO: 8837 - DNA, 718 bp, Homo sapiens
gctcccacaaaatggtagccgccgtgggggatgtccagttttttttcctcttcccaagtacagacgcagagcagacttgtctttccgcttaacctcaacctcgtgtgatctgccagtttcgctcccgacgccaaattccagcgaaacagctgatgccagccagcttgaagacccctgccacagaagaagggaatcagcatgagaatacagcttcttcatctcgctgtcccatgacttcgccctgtactcttcagccaattaatgatctccacacttgggaccactctaaaacccttaagaacctgagactcaaagtcctcctggagacgaatttgaggtttcctcctatctgtgtttggtggccctatgattaaacctctttctcttctgcaacctggtgtcccagtgtattaacttgccatgggcatcagacaacaaacctatatatagtatcccaaatatggtgctccactttgaaacctgaagaaatcctgcaattgagttagccttttgaaataaaaattatttcaaattttaaaatatttatatatgtttccacttaagatatctacaagcatttgtttacaaccttttatcttgctttgcatcttaaacatttctgtatggcaatttccgtgtcttcctatcatctcggccatcttagtgcaaagatacaaaattgtgtggcttattaagaaaaattacagtaagctaaggg

SEQ ID NO: 8838 - protein, 73 aa, Homo sapiens; identical to SEQ ID NO: 8836

SEQ ID NO: 8839 - DNA, 2397 bp, Homo sapiens
gcagagttttgaggcagagctgatcaagggaacctcaacaaacaaccccagccatggaggcggcggtgtctttgaagaccccatgagagcatcaaacaagggagagagcctggaacaaatcatggtagtaaaatggcggcagagagctagtaatgtgtctgcaattggtgggttcttggtcgcactgacttcaagaatgaagccgcggaccctcacggtggtgtctttggtggctgttcacccttccacagtaaacatgcttgggaagcaactttgccaaaagccttcggacagtccagcgtcaacaccgcaagccaagtggaggagaaaaatctgcgcctctttctctcaagggatactttgtctctggggtactttctgacccagtggacccctggcagaagtaagcgtggactgtggctgcaggaccacgcagagtcaacacgaaccgaagccaggccttggccacggcagctctggggtccaaccacttgatcaatgcaggaaatgctttgatggcagaattcttccatggccagcttctcatattctctgggacagacacaaaccaagaaaaatgagtgtggcgcagaatctgatgtgtccttccttaccccgtgctggtagcaaaaagtatgtcttgaacttttctttgttacacacagtctgggtaataacagactgaaggaaaactaaagaagcttgggaggctaagttcaatgacaaatgaagaactaaggcagagaaaaaagagaattgagaaagtgtctgggtgtctggagaggttgggggaatagagagggaggagatataattggccagataacttgagagtgggagaggagtgcaaacattatttttgaggcgctttgttggatatttaaaatgcactcctacctttggcattttctcaaaaggcaagaaagatttgttttcaattctatttttctgctggactgaaccagtgccaagactggaccatgtaggatcctgggtttatttcagttacataagcaaacgttgctgtgatttggaatagtcaaagtcatgaatgtttctcaacttccattttgtcagctgcttgagtttctattctgagaggtgctaactgtgaacattgttattcacttgtgttccctaaatcacttttaattagttttaatttgaaccaagaatgttctactgttgaaactatgtcaagaatgatcaaaaatgaaattaataaagaattcgcgtcaaaaaaaatttgcactaatattacagtattttataatgtctatctcagcagagtcacagataatttagaatttttaattttgtttttaagtgattttcctcaaagctataatagccttggtaaagagtttagttaaacattatttttcacctctcacgcattttgtgtaatgaaatttttctatcatcttccagtggaattaattgcattggtgcaaaaaatgcaatcaaatcgatgactgaatttagcctttgaaacctcacgtctagctgggatagttactatattcattacatactgaaaaatgataagcagtaagcttttctgctaaaaaactgccaaagataagtttttcaaggctctcaaaatatcctaaagctgacaatacaagaaatgttaaaatattgttggaatttttaacggaatcttccttctcttcttttcctgtttaagacaatagtagttagttgtccactaatcgttaatacacgattttctaacaaagacttgcatatccttttggctaaaaagtggccaaatatcagagagctagaagtttgggagacagcctttagtcttttccaaagcatgtaagcccttttgaatcattttgggtaaatggcgaagattaaacagaattcataaagggtttctgatacataagtggaatgtgcctgtgaggacactacacatgacaataatctaagcatgctctcttttagtcccaaaacgtgtagagtaatgtcacatgaaatttacaggaggccattgacttggactgagctcctgcaccaggcctaacagaccaaaccaaaatggagtcactcatgctgaagttcacaccaccaagccaaaactgagttgtttatccgatcttccaagaaatcaagaaagacagggagataacagcccaatccccaaacaggccagtttttgctggcatgataggaaggcccctctgcttcaaactttccaaagaaagtaacttggaaacaaccaatctgctttttgttctccgtttctgctttcctcaaccattttctgaccataaaaccaacatcctttgctcggctcatgggaacattcattctattttgtagaatgaggtgttgcccgatattctagatttgcaaataaaagccaattaagatctttaaatt

SEQ ID NO: 8840 - protein, 99 aa, Homo sapiens
MRASNKGESLEQIMVVKWRQRASNVSAIGGFLVALTSRMKPRTLTVVSLVAVHPSTVNMLGKQLCQKPSDSPASTPQAKWRRKICASFSQGILCLWGTF

SEQ ID NO: 8841 - DNA, 1405 bp, Homo sapiens
aacaaatcatggtagtaaaatggcggcagagagctagtaatgtgtctgcaattggtgggttcttggtcgcactgacttcaagaatgaagccgcggaccctcacggtatgacagctcctctcccaacagctctactttctacatctactctctaccaccacaaaacttctttcagttccatgaaagggccatgtttttctggtctcttggcctaggagcatgttgttcttctgccagcaaccttcttcaaccatctccacaggatgactcctctattggatacttccatgaaaagtccaggcctgggttatgtacccttcccaaagtgcaccccagacacccaacagtttttccagcccagactcaccacactgtgtggtaatttcctgatcactcagttgtgctccccacagactataagctctatgagggcaggggccacagtttgcttgttcactactatatgctcagtacctggtaaatattagttgactgaagaatgactatgtggtaatctattccattggtggcctccagtgaaccatgtcttctggtatttacatcttgtgtggtcccctccattaaatttgggctttaaccaacagaatgctgcagaagcgacaccctgccacttgtgcttttgtgatcctagccaccagtaagaagccctgtgaccttgctgagaccctgaagagaccacatagagaggccacttgaagggcaaggggtcctgactctacatggagagagaagcccagccatccctgtttcccagctgagtcctgaccagataactcactacaagactgaccacaggcaagaacagcagaagagctgcccagctgagcccatccaagagtgcagaatttcaagcaagtaaaatgactaatgttagaactcagaatgaaggggcctcaggttacctgcatcattctggttttttgctcctgttttactacgaagcaaacacctcgactataagccgccatagaccagggtctgtgtctcattcgtgtctggacaatgcatcacagacactcaactgttttctgcctgagcagaattaagacttggcctcctaactcctccatcaccatcttctccactctcttccttggccttcatcaccaacaccacctcatcaaccgtgaaagattcaaagagtaaggaaaaccatttctaggaccatgaaatgtgtcactggatctcctgcagaaatctgccagagctacaatgtgactggtttctacatgtctgacaaatttctatttaaataagtatttttcaaaatgcaaattgctacctattctttggccatcaaatcactttagtgggttgcaaccggctttttcttcttaatagaaaaggaaatgtgttgcatttggtaaacatggaaattgttttat

SEQ ID NO: 8842 - protein, 61 aa, Homo sapiens
MTNVRTQNEGASGYLHHSGFLLLFYYEANTSTISRHRPGSVSHSCLDNASQTLNCFLPEQN

SEQ ID NO: 8843 - DNA, 2914 bp, Homo sapiens
gtgctccaccactccctcccatcccgaggtgatctttgcctgctcttctctacccaagctcaagagctgcttctgttgctatctaagaactgcataccctcctccctgcttcttcccttgtgcctcatgctattgcttgcttcagctgcagcctgcctgtgctggctgctggggtcgataggcttttgtcgtaataggcagagatgacttgcatcccagctttccaccaaccaaattcaaacattcactgcttatttgttacagactgtaattattaaagtccctgagagctgttttctcccgttcctttttcgcatgcttggcctcctctctgtttctatgaaccacagaccacctaagcaagctgctgagtaagggctcactggaaacttgcagtcacaggatgtccaatctttggcagtccgagcttggctctaggacagagctgtccaatagaaatataatgtgagccccatatacaatttttacatttctaatatattttaaacaagtgaagttaatatgcatccaaaatatttcaacctgtaatcaacataaaattttaatgagatattttatattattttttggtactgaatcttcaaaatccagagtgtattttacacttaccgcacatctccattcagactagtcacatttttaagtgctcagtagccacatgtggctggtggctactggattagacagcacgagtctggaagatggaagctagtgcagaaacctcttgtttaaaaaacaaaaaaggcaagatgggcttgagcgattcaagaggcaactaaaaataaaattaggacccagcaccttgtttgacacacagtttgaccttcgattttcctcccttaacttccctcttcccttaatatctgtatacaagtgttgcttcaaagtaccaaggtcagaaattgattgagtacggtttactaaagtcatgtggaataaagccattggaaacaaatggaaagcctgtcgggacttctgggctcagaaccagctggctcacgcactccacttgtcagctggacttctgccttgtgaaatggaagcagcctttgttcctttctggctgagcaagctcctgaggctgggagagactaggaaggcttggtaggaggggaaaaaagtcaggaaaatatatcaaatcagaaacatggaagaagaagggaaccgatttgagttggtgggcaaaactctaaaaatctaaatctgatgcttatgtaagggttgagcgaattagggagattgctagtggaaattggagggaatttgttttgcatcatttgtctaggatctatgcaaatatagctccactaaaggaccatagggaagagccagccttgccttttcttatatgattttgtttacaaaattttactgggacttttaaatctagctatagagttgggaaaaaatatttccacttagatattttacatggttttgtttaaaattaccattacttgttttttaaaaacacatgaccacatatgtatatgtatatctacctaaacattgtatcatggtttcagtatgttattcatgtattactgggagatgctaccaagaaaccaacccaaagaaaattctgaaaaatacatttctatttatagaataaatgtttcatttatataaaagcaaaagaacttagagttctaataaatgggatgtctaataaattatgaagttactgatttgaatatattatatttctataacttccttgccaaagtcctgatttagtacattagagaacctgtgtttcctctctcctctaccattcatctctcttccatacagtcatttgggctttttactcaaagagaatcaagaaataataaggtataacaagcttggcaaagtgttggctttttaaaaaaaaatttttttaatctctagcagtttggtaatttagcagcatcatttatttgggattcttttatctgatttcaacagtgaaaaacatccctatgataaagcctaatgacccatttcacaaaagatggaatttgcccttcctagaaaatatgacggagaaaagtctgactcagagaaagtgggtctgaattttataaggggtagtaagaattggacaattcctttgcatatctgaacttggcaggtaccgttctaaatctgaaacagggtgatagctcaaagttgccattcatccagaatagattgttttagaatgtagtgtttaagtgactgtttcattaatacacctacaccctttctttgaaagtttgcaacctaattgcatctaaaactatgaataagttctgtggtaaaatcttaaactatggaaaattacaaaaatgaatttttcttccctgaaatcagagcttacatgtgtgtttttttataacattttcagataaatgtattcaacatgtaatacagtattttaacattcacctcttattttatattgaaatgtattacagtattaaaactcagtgttcagtatttatttcactatgcattttatttagtaaaagccaggagaaatgtttaatccaatggtgccttactttgtgatttaaaagaaatcaacttttttttatgtctaagtagtagattatttgcatatttgtaaaaactgttaggtctttatattttaaagtgtaataccagttttgttattttagtagcagaaatgggatgattgttaaagttccccaaaaatgttggcatgaaattaatttttccctccttatagtcaaggaccgtagaggaagaaaaacttttttttcataccatgcactatgtaaacagacacattttgctatctgtgtcatcaggatagtgtaagtggtagggtagagactaccctagacatctgcatctttgtaagttagccagacaataaagaaaagcagaatgatatggtgtcaac

SEQ ID NO: 8844 - protein, 59 aa, Homo sapiens [sequence omitted]

SEQ ID NO: 8845 - DNA, 4594 bp, Homo sapiens
tagaagacagcaggggaactcgagaagttggttgttttcagcagattaaaacaatacagatttatcagcaagactgttgaacgcataactgcccaagatgcctgtccctccccctccagcacccccgccgcccccgacgtttgcactggccaatacagagaagcctaccttgaataagacagagcaggctgggagaaatgctctcctttctgatatcagcaaagggaagaaactaaagaagacggtcaccaatgacagaagtgcaccaatactggacaaacctaaaggagctggtgctggaggcggtggtggtggctttggtggaggcggcggatttggcggaggaggtggtggcggaggcggtggaagttttggagggggcggacctccaggtctgggaggattgttccaggctggaatgccgaagctgagatccacggccaacagggataatgattctggaggaagccgaccaccattgttgccaccgggaggaagatccacatctgcgaaacccttttcacccccaagtggcccagggaggtttcctgtgccttctccaggccacagaagtggtcccccagagcctcagaggaaccgaatgccgcccccaaggcccgacgtgggctcaaagcctgatagcattcctcctccagtacctagtactccaagacccattcaatcaagtccgcacaaccgggggtccccaccagtgcccggaggccccaggcagcccagccccgggcccactcctccccctttccctggaaaccgcggcactgctttgggaggaggctcaatacgtcagtcccccttgagctcctcctcgcccttctccaaccggcctcccctgccgcctacccccagcagggccttggatgacaaaccccctccaccacctcctccagtgggcaacaggccctccatccacagggaagcggttccccctcctcctcctcagaacaacaagcctccagtgccttccactccgcggccttcggcctcctcacaggccccacctccgccgccacctcccagcaggcccgggccgcctcctctgcctccaagttccagcggcaatgacgaaaccccaagactcccacagcggaatctgtccctcagttcgtccacgcccccgttaccttcgccaggacgttcaggtcctcttcctcccccgcccagtgagagacccccacctccagtgagggacccgccaggccgatcaggccccctcccaccacctcctccagtaagcagaaacggcagcacatctcgggccctgcctgctacccctcagttgccatccaggagtggagtagacagtcccaggagtggacccaggcctccccttcctcctgataggcccagtgctggggcacctcccccacctccaccatcaacatctattagaaatggcttccaagactctccatgtgaagatgagtgggaaagcagattctacttccatccgatttccgatttgccacctccagagccatatgtacaaacgaccaaaagttatcccagcaaactggcaagaaacgaaagccggagtggatccaaccgaagagaaaggggtgctccaccactccctcccatcccgaggtgatctttgcctgctcttctctacccaagctcaagagctgcttctgttgctatctaagaactgcataccctcctccctgcttcttcccttgtgcctcatgtatgggcaggaggaaaggtgggagggggagtgggaatatgcgtgtgtgggtgggaatcggtaagaaatgcacctagcttttcatattgtgtttattctccaggctattgcttgcttcagctgcagcctgcctgtgctggctgctggggtcgataggcttttgtcgtaataggcagagatgacttgcatcccagctttccaccaaccaaattcaaacattcactgcttatttgttacagactgtaattattaaagtccctgagagctgttttctcccgttcctttttcgcatgcttggcctcctctctgtttctatgaaccacagaccacctaagcaagctgctgagtaagggctcactggaaacttgcagtcacaggatgtccaatctttggcagtccgagcttggctctaggacagagctgtccaatagaaatataatgtgagccccatatacaatttttacatttctaatatattttaaacaagtgaagttaatatgcatccaaaatatttcaacctgtaatcaacataaaattttaatgagatattttatattattttttggtactgaatcttcaaaatccagagtgtattttacacttaccgcacatctccattcagactagtcacatttttaagtgctcagtagccacatgtggctggtggctactggattagacagcacgagtctggaagatggaagctagtgcagaaacctcttgtttaaaaaacaaaaaaggcaagatgggcttgagcgattcaagaggcaactaaaaataaaattaggacccagcaccttgtttgacacacagtttgaccttcgattttcctcccttaacttccctcttcccttaatatctgtatacaagtgttgcttcaaagtaccaaggtcagaaattgattgagtacggtttactaaagtcatgtggaataaagccattggaaacaaatggaaagcctgtcgggacttctgggctcagaaccagctggctcacgcactccacttgtcagctggacttctgccttgtgaaatggaagcagcctttgttcctttctggctgagcaagctcctgaggctgggagagactaggaaggcttggtaggaggggaaaaaagtcaggaaaatatatcaaatcagaaacatggaagaagaagggaaccgatttgagttggtgggcaaaactctaaaaatctaaatctgatgcttatgtaagggttgagcgaattagggagattgctagtggaaattggagggaatttgttttgcatcatttgtctaggatctatgcaaatatagctccactaaaggaccatagggaagagccagccttgccttttcttatatgattttgtttacaaaattttactgggacttttaaatctagctatagagttgggaaaaaatatttccacttagatattttacatggttttgtttaaaattaccattacttgttttttaaaaacacatgaccacatatgtatatgtatatctacctaaacattgtatcatggtttcagtatgttattcatgtattactgggagatgctaccaagaaaccaacccaaagaaaattctgaaaaatacatttctatttatagaataaatgtttcatttatataaaagcaaaagaacttagagttctaataaatgggatgtctaataaattatgaagttactgatttgaatatattatatttctataacttccttgccaaagtcctgatttagtacattagagaacctgtgtttcctctctcctctaccattcatctctcttccatacagtcatttgggctttttactcaaagagaatcaagaaataataaggtataacaagcttggcaaagtgttggctttttaaaaaaaaatttttttaatctctagcagtttggtaatttagcagcatcatttatttgggattcttttatctgatttcaacagtgaaaaacatccctatgataaagcctaatgacccatttcacaaaagatggaatttgcccttcctagaaaatatgacggagaaaagtctgactcagagaaagtgggtctgaattttataaggggtagtaagaattggacaattcctttgcatatctgaacttggcaggtaccgttctaaatctgaaacagggtgatagctcaaagttgccattcatccagaatagattgttttagaatgtagtgtttaagtgactgtttcattaatacacctacaccctttctttgaaagtttgcaacctaattgcatctaaaactatgaataagttctgtggtaaaatcttaaactatggaaaattacaaaaatgaatttttcttccctgaaatcagagcttacatgtgtgtttttttataacattttcagataaatgtattcaacatgtaatacagtattttaacattcacctcttattttatattgaaatgtattacagtattaaaactcagtgttcagtatttatttcactatgcattttatttagtaaaagccaggagaaatgtttaatccaatggtgccttactttgtgatttaaaagaaatcaacttttttttatgtctaagtagtagattatttgcatatttgtaaaaactgttaggtctttatattttaaagtgtaataccagttttgttattttagtagcagaaatgggatgattgttaaagttccccaaaaatgttggcatgaaattaatttttccctccttatagtcaaggaccgtagaggaagaaaaacttttttttcataccatgcactatgtaaacagacacattttgctatctgtgtcatcaggatagtgtaagtggtagggtagagactaccctagacatctgcatctttgtaagttagccagacaataaagaaaagcagaatgatatggtgtcaac

SEQ ID NO: 8846 - protein, 503 aa, Homo sapiens; identical to SEQ ID NO: 700

SEQ ID NO: 8847 - DNA, 4236 bp, Homo sapiens
gcagcctcccggcgctgagcgcttttcctgcccgcccggctcagccctgcggaccccgggagaagtttcccagaaaaaatgcccagcgcggcgcggggctgcggagtcgtccggagccgctgcgcgatttatcagcaagactgttgaacgcataactgcccaagatgcctgtccctccccctccagcacccccgccgcccccgacgtttgcactggccaatacagagaagcctaccttgaataagacagagcaggctgggagaaatgctctcctttctgatatcagcaaagggaagaaactaaagaagacggtcaccaatgacagaagtgcaccaatactggacaaacctaaaggagctggtgctggaggcggtggtggtggctttggtggaggcggcggatttggcggaggaggtggtggcggaggcggtggaagttttggagggggcggacctccaggtctgggaggattgttccaggctggaatgccgaagctgagatccacggccaacagggataatgattctggaggaagccgaccaccattgttgccaccgggaggaagatccacatctgcgaaacccttttcacccccaagtggcccagggaggtttcctgtgccttctccaggccacagaagtggtcccccagagcctcagaggaaccgaatgccgcccccaaggcccgacgtgggctcaaagcctgatagcattcctcctccagtacctagtactccaagacccattcaatcaagtccgcacaaccgggggtccccaccagtgcccggaggccccaggcagcccagccccgggcccactcctccccctttccctggaaaccgcggcactgctttgggaggaggctcaatacgtcagtcccccttgagctcctcctcgcccttctccaaccggcctcccctgccgcctacccccagcagggccttggatgacaaaccccctccaccacctcctccagtgggcaacaggccctccatccacagggaagcggttccccctcctcctcctcagaacaacaagcctccagtgccttccactccgcggccttcggcctcctcacaggccccacctccgccgccacctcccagcaggcccgggccgcctcctctgcctccaagttccagcggcaatgacgaaaccccaagactcccacagcggaatctgtccctcagttcgtccacgcccccgttaccttcgccaggacgttcaggtcctcttcctcccccgcccagtgagagacccccacctccagtgagggacccgccaggccgatcaggccccctcccaccacctcctccagtaagcagaaacggcagcacatctcgggccctgcctgctacccctcagttgccatccaggagtggagtagacagtcccaggagtggacccaggcctccccttcctcctgataggcccagtgctggggcacctcccccacctccaccatcaacatctattagaaatggcttccaagactctccatgtgaagatgagtgggaaagcagattctacttccatccgatttccgatttgccacctccagagccatatgtacaaacgaccaaaagttatcccagcaaactggcaagaaacgaaagccggagtggatccaaccgaagagaaaggggtgctccaccactccctcccatcccgagaccacctaagcaagctgctgagtaagggctcactggaaacttgcagtcacaggatgtccaatctttggcagtccgagcttggctctaggacagagctgtccaatagaaatataatgtgagccccatatacaatttttacatttctaatatattttaaacaagtgaagttaatatgcatccaaaatatttcaacctgtaatcaacataaaattttaatgagatattttatattattttttggtactgaatcttcaaaatccagagtgtattttacacttaccgcacatctccattcagactagtcacatttttaagtgctcagtagccacatgtggctggtggctactggattagacagcacgagtctggaagatggaagctagtgcagaaacctcttgtttaaaaaacaaaaaaggcaagatgggcttgagcgattcaagaggcaactaaaaataaaattaggacccagcaccttgtttgacacacagtttgaccttcgattttcctcccttaacttccctcttcccttaatatctgtatacaagtgttgcttcaaagtaccaaggtcagaaattgattgagtacggtttactaaagtcatgtggaataaagccattggaaacaaatggaaagcctgtcgggacttctgggctcagaaccagctggctcacgcactccacttgtcagctggacttctgccttgtgaaatggaagcagcctttgttcctttctggctgagcaagctcctgaggctgggagagactaggaaggcttggtaggaggggaaaaaagtcaggaaaatatatcaaatcagaaacatggaagaagaagggaaccgatttgagttggtgggcaaaactctaaaaatctaaatctgatgcttatgtaagggttgagcgaattagggagattgctagtggaaattggagggaatttgttttgcatcatttgtctaggatctatgcaaatatagctccactaaaggaccatagggaagagccagccttgccttttcttatatgattttgtttacaaaattttactgggacttttaaatctagctatagagttgggaaaaaatatttccacttagatattttacatggttttgtttaaaattaccattacttgttttttaaaaacacatgaccacatatgtatatgtatatctacctaaacattgtatcatggtttcagtatgttattcatgtattactgggagatgctaccaagaaaccaacccaaagaaaattctgaaaaatacatttctatttatagaataaatgtttcatttatataaaagcaaaagaacttagagttctaataaatgggatgtctaataaattatgaagttactgatttgaatatattatatttctataacttccttgccaaagtcctgatttagtacattagagaacctgtgtttcctctctcctctaccattcatctctcttccatacagtcatttgggctttttactcaaagagaatcaagaaataataaggtataacaagcttggcaaagtgttggctttttaaaaaaaaatttttttaatctctagcagtttggtaatttagcagcatcatttatttgggattcttttatctgatttcaacagtgaaaaacatccctatgataaagcctaatgacccatttcacaaaagatggaatttgcccttcctagaaaatatgacggagaaaagtctgactcagagaaagtgggtctgaattttataaggggtagtaagaattggacaattcctttgcatatctgaacttggcaggtaccgttctaaatctgaaacagggtgatagctcaaagttgccattcatccagaatagattgttttagaatgtagtgtttaagtgactgtttcattaatacacctacaccctttctttgaaagtttgcaacctaattgcatctaaaactatgaataagttctgtggtaaaatcttaaactatggaaaattacaaaaatgaatttttcttccctgaaatcagagcttacatgtgtgtttttttataacattttcagataaatgtattcaacatgtaatacagtattttaacattcacctcttattttatattgaaatgtattacagtattaaaactcagtgttcagtatttatttcactatgcattttatttagtaaaagccaggagaaatgtttaatccaatggtgccttactttgtgatttaaaagaaatcaacttttttttatgtctaagtagtagattatttgcatatttgtaaaaactgttaggtctttatattttaaagtgtaataccagttttgttattttagtagcagaaatgggatgattgttaaagttccccaaaaatgttggcatgaaattaatttttccctccttatagtcaaggaccgtagaggaagaaaaacttttttttcataccatgcactatgtaaacagacacattttgctatctgtgtcatcaggatagtgtaagtggtagggtagagactaccctagacatctgcatctttgtaagttagccagacaataaagaaaagcagaatgatatggtgtcaac

SEQ ID NO: 8848 - protein, 510 aa, Homo sapiens
MPVPPPPAPPPPPTFALANTEKPTLNKTEQAGRNALLSDISKGKKLKKTVTNDRSAPILDKPKGAGAGGGGGGFGGGGGFGGGGGGGGGGSFGGGGPPGLGGLFQAGMPKLRSTANRDNDSGGSRPPLLPPGGRSTSAKPFSPPSGPGRFPVPSPGHRSGPPEPQRNRMPPPRPDVGSKPDSIPPPVPSTPRPIQSSPHNRGSPPVPGGPRQPSPGPTPPPFPGNRGTALGGGSIRQSPLSSSSPFSNRPPLPPTPSRALDDKPPPPPPPVGNRPSIHREAVPPPPPQNNKPPVPSTPRPSASSQAPPPPPPPSRPGPPPLPPSSSGNDETPRLPQRNLSLSSSTPPLPSPGRSGPLPPPPSERPPPPVRDPPGRSGPLPPPPPVSRNGSTSRALPATPQLPSRSGVDSPRSGPRPPLPPDRPSAGAPPPPPPSTSIRNGFQDSPCEDEWESRFYFHPISDLPPPEPYVQTTKSYPSKLARNESRSGSNRRERGAPPLPPIPRPPKQAAE

SEQ ID NO: 8849 - DNA, 1692 bp, Homo sapiens
agaaggacgtctgcctctgactcagtatgtcacatttaacaagaggccagagcttgtccaaaatggctgtccaaaaacgaccccacacttgcgttagaagatgatacctttttcagggacagttttctctcttggctcctgtcccgctggccctctgtctgcctgtgtccctgaccatggctccctgcagtaccctttaacgatttatcagcaagactgttgaacgcataactgcccaagatgcctgtccctccccctccagcacccccgccgcccccgacgtttgcactggccaatacagagaagcctaccttgaataagacagagcaggctgggagaaatgctctcctttctgatatcagcaaagggaagaaactaaagaagacggtcaccaatgacagaagtgcaccaatactggacaaacctaaaggagctggtgctggaggcggtggtggtggctttggtggaggcggcggatttggcggaggaggtggtggcggaggcggtggaagttttggagggggcggacctccaggtctgggaggattgttccaggctggaatgccgaagctgagatccacggccaacagggataatgattctggaggaagccgaccaccattgttgccaccgggaggaagatccacatctgcgaaacccttttcacccccaagtggcccagggaggtttcctgtgccttctccaggccacagaagtggtcccccagagcctcagaggaaccgaatgccgcccccaaggcccgacgtgggctcaaagcctgatagcattcctcctccagtacctagtactccaagacccattcaatcaagtccgcacaaccgggggtccccaccagtgcccggaggccccaggcagcccagccccgggcccactcacccccacctccagtgagggacccgccaggccgatcaggccccctcccaccacctcctccagtaagcagaaacggcagcacatctcgggccctgcctgctacccctcagttgccatccaggagtggagtagacagtcccaggagtggacccaggcctccccttcctcctgataggcccagtgctggggcacctcccccacctccaccatcaacatctattagaaatggcttccaagactctccatgtgaagatgagtgggaaagcagattctacttccatccgatttccgatttgccacctccagagccatatgtacaaacgaccaaaagttatcccagcaaactggcaagaaacgaaagccggagtggatccaaccgaagagaaaggggtgctccaccactccctcccatcccgaggtgatctttgcctgctcttctctacccaagctcaagagctgcttctgttgctatctaagaactgcataccctcctccctgcttcttcccttgtgcctcatgtatgggcaggaggaaaggtgggagggggagtgggaatatgcgtgtgtgggtgggaatcggtaagaaatgcacctagcttttcatattgtgtttattctccaggctattgcttgcttcagctgcagcctgcctgtgctggctgctggggtcgataggcttttgtcgtaataggcagagatgacttgcatcccagctttccaccaaccaaattcaaacattcactgcttatttgttacagactgtaattattaaagtccctgagagctgttttctcccgtt

SEQ ID NO: 8850 - protein, 223 aa, Homo sapiens
MPVPPPPAPPPPPTFALANTEKPTLNKTEQAGRNALLSDISKGKKLKKTVTNDRSAPILDKPKGAGAGGGGGGFGGGGGFGGGGGGGGGGSFGGGGPPGLGGLFQAGMPKLRSTANRDNDSGGSRPPLLPPGGRSTSAKPFSPPSGPGRFPVPSPGHRSGPPEPQRNRMPPPRPDVGSKPDSIPPPVPSTPRPIQSSPHNRGSPPVPGGPRQPSPGPTHPHLQ

SEQ ID NO: 8851 - DNA, 1985 bp, Homo sapiens
tagaagacagcaggggaactcgagaagttggttgttttcagcagattaaaacaatacagatttatcagcaagactgttgaacgcataactgcccaagatgcctgtccctccccctccagcacccccgccgcccccgacgtttgcactggccaatacagagaagcctaccttgaataagacagagcaggctgggagaaatgctctcctttctgatatcagcaaagggaagaaactaaagaagacggtcaccaatgacagaagtgcaccaatactggacaaacctaaaggagctggtgctggaggcggtggtggtggctttggtggaggcggcggatttggcggaggaggtggtggcggaggcggtggaagttttggagggggcggacctccaggtctgggaggattgttccaggctggaatgccgaagctgagatccacggccaacagggataatgattctggaggaagccgaccaccattgttgccaccgggaggaagatccacatctgcgaaacccttttcacccccaagtggcccagggaggtttcctgtgccttctccaggccacagaagtggtcccccagagcctcagaggaaccgaatgccgcccccaaggcccgacgtgggctcaaagcctgatagcattcctcctccagtacctagtactccaagacccattcaatcaagtccgcacaaccgggggtccccaccagtgcccggaggccccaggcagcccagccccgggcccactcctccccctttccctggaaaccgcggcactgctttgggaggaggctcaatacgtcagtcccccttgagctcctcctcgcccttctccaaccggcctcccctgccgcctacccccagcagggccttggatgacaaaccccctccaccacctcctccagtgggcaacaggccctccatccacagggaagcggttccccctcctcctcctcagaacaacaagcctccagtgccttccactccgcggccttcggcctcctcacaggccccacctccgccgccacctcccagcaggcccgggccgcctcctctgcctccaagttccagcggcaatgacgaaaccccaagactcccacagcggaatctgtccctcagttcgtccacgcccccgttaccttcgccaggacgttcaggtcctcttcctcccccgcccagtgagagacccccacctccagtgagggacccgccaggccgatcaggccccctcccaccacctcctccagtaagcagaaacggcagcacatctcgggccctgcctgctacccctcagttgccatccaggagtggagtagacagtcccaggagtggacccaggcctccccttcctcctgataggcccagtgctggggcacctcccccacctccaccatcaacatctattagaaatggcttccaagactctccatgtgaagatgagtgggaaagcagattctacttccatccgatttccgatttgccacctccagagccatatgtacaaacgaccaaaagttatcccagcaaactggcaagaaacgaaagccggagtggatccaaccgaagagaaaggggtgctccaccactccctcccatcccgaggtgatctttgcctgctcttctctacccaagctcaagagctgcttctgttgctatctaagaactgcataccctcctccctgcttcttcccttgtgcctcatgtatgggcaggaggaaaggtgggagggggagtgggaatatgcgtgtgtgggtgggaatcggtaagaaatgcacctagcttttcatattgtgtttattctccaggctattgcttgcttcagctgcagcctgcctgtgctggctgctggggtcgataggcttttgtcgtaataggcagagatgacttgcatcccagctttccaccaaccaaattcaaacattcactgcttatttgttacagactgtaattattaaagtccctgagagctgttttctcccgtt

SEQ ID NO: 8852 - protein, 503 aa, Homo sapiens; identical to SEQ ID NO: 700

SEQ ID NO: 8853 - DNA, 1710 bp, Homo sapiens
aatgagaagaagcccttagcctaatgaagcgataagatttatcagcaagactgttgaacgcataactgcccaagatgcctgtccctccccctccagcacccccgccgcccccgacgtttgcactggccaatacagagaagcctaccttgaataagacagagcaggctgggagaaatgctctcctttctgatatcagcaaagggaagaaactaaagaagacggtcaccaatgacagaagtgcaccaatactggacaaacctaaaggagctggtgctggaggcggtggtggtggctttggtggaggcggcggatttggcggaggaggtggtggcggaggcggtggaagttttggagggggcggacctccaggtctgggaggattgttccaggctggaatgccgaagctgagatccacggccaacagggataatgattctggaggaagccgaccaccattgttgccaccgggaggaagatccacatctgcgaaacccttttcacccccaagtggcccagggaggtttcctgtgccttctccaggccacagaagtggtcccccagagcctcagaggaaccgaatgccgcccccaaggcccgacgtgggctcaaagcctgatagcattcctcctccagtacctagtactccaagacccattcaatcaagtccgcacaaccgggggtccccaccagtgcccggaggccccaggcagcccagccccgggcccactcctccccctttccctggaaaccgcggcactgctttgggaggaggctcaatacgtcagtcccccttgagctcctcctcgcccttctccaaccggcctcccctgccgcctacccccagcagggccttggatgacaaaccccctccaccacctcctccagtgggcaacaggccctccatccacagggaagcggttccccctcctcctcctcagaacaacaagcctccagtgccttccactccgcggccttcggcctcctcacaggccccacctccgccgccacctcccagcaggcccgggccgcctcctctgcctccaagttccagcggcaatgacgaaaccccaagactcccacagcggaatctgtccctcagttcgtccacgcccccgttaccttcgccaggacgttcaggtcctcttcctcccccgcccagtgagagacccccacctccagtgagggacccgccaggccgatcaggtatgacaagacgtggagtgagttgcttccaaaacccagcctgcccaaatgtaccaataatcctgtcagtcaagatagtctaacaaaagcaggcataagtaaactcagactgctttgtgcttttaagtggcacacgacacgtgtgatcgtgacctcgtgtaaaccccgggggaaagtgggaccaatatttctgttggtgttttagagatgaggacactgagtagctaataaagttaaatggtcacgagctagttaataaagaagaggcaagaactttcatcttccatctctgaagtgtacttgccagtccactaccctgcctccctagagagaatttcggcggtcttaattgggaaaataagtccccacctcccgcaggagggctctgttattccaacaagaggggaagttcttcaagagctaatgaacttctcctgtacttctctcttcattcgccaggctttgaggccatttccctattcattaaagactaatgtttaaaaagtc

SEQ ID NO: 8854 - protein, 403 aa, Homo sapiens
MPVPPPPAPPPPPTFALANTEKPTLNKTEQAGRNALLSDISKGKKLKKTVTNDRSAPILDKPKGAGAGGGGGGFGGGGGFGGGGGGGGGGSFGGGGPPGLGGLFQAGMPKLRSTANRDNDSGGSRPPLLPPGGRSTSAKPFSPPSGPGRFPVPSPGHRSGPPEPQRNRMPPPRPDVGSKPDSIPPPVPSTPRPIQSSPHNRGSPPVPGGPRQPSPGPTPPPFPGNRGTALGGGSIRQSPLSSSSPFSNRPPLPPTPSRALDDKPPPPPPPVGNRPSIHREAVPPPPPQNNKPPVPSTPRPSASSQAPPPPPPPSRPGPPPLPPSSSGNDETPRLPQRNLSLSSSTPPLPSPGRSGPLPPPPSERPPPPVRDPPGRSGMTRRGVSCFQNPACPNVPIILSVKIV

SEQ ID NO: 8855 - DNA, 1722 bp, Homo sapiens
aggggaactcgagaagttggttgttttcagcagattaaaacaatacagatttatcagcaagactgttgaacgcataactgcccaagatgcctgtccctccccctccagcacccccgccgcccccgacgtttgcactggccaatacagagaagcctaccttgaataagacagagcaggctgggagaaatgctctcctttctgatatcagcaaagggaagaaactaaagaagacggtcaccaatgacagaagtgcaccaatactggacaaacctaaaggagctggtgctggaggcggtggtggtggctttggtggaggcggcggatttggcggaggaggtggtggcggaggcggtggaagttttggagggggcggacctccaggtctgggaggattgttccaggctggaatgccgaagctgagatccacggccaacagggataatgattctggaggaagccgaccaccattgttgccaccgggaggaagatccacatctgcgaaacccttttcacccccaagtggcccagggaggtttcctgtgccttctccaggccacagaagtggtcccccagagcctcagaggaaccgaatgccgcccccaaggcccgacgtgggctcaaagcctgatagcattcctcctccagtacctagtactccaagacccattcaatcaagtccgcacaaccgggggtccccaccagtgcccggaggccccaggcagcccagccccgggcccactcctccccctttccctggaaaccgcggcactgctttgggaggaggctcaatacgtcagtcccccttgagctcctcctcgcccttctccaaccggcctcccctgccgcctacccccagcagggccttggatgacaaaccccctccaccacctcctccagtgggcaacaggccctccatccacagggaagcggttccccctcctcctcctcagaacaacaagcctccagtgccttccactccgcggccttcggcctcctcacaggccccacctccgccgccacctcccagcaggcccgggccgcctcctctgcctccaagttccagcggcaatgacgaaaccccaagactcccacagcggaatctgtccctcagttcgtccacgcccccgttaccttcgccaggacgttcaggtcctcttcctcccccgcccagtgagagacccccacctccagtgagggacccgccaggccgatcaggtatgacaagacgtggagtgagttgcttccaaaacccagcctgcccaaatgtaccaataatcctgtcagtcaagatagtctaacaaaagcaggcataagtaaactcagactgctttgtgcttttaagtggcacacgacacgtgtgatcgtgacctcgtgtaaaccccgggggaaagtgggaccaatatttctgttggtgttttagagatgaggacactgagtagctaataaagttaaatggtcacgagctagttaataaagaagaggcaagaactttcatcttccatctctgaagtgtacttgccagtccactaccctgcctccctagagagaatttcggcggtcttaattgggaaaataagtccccacctcccgcaggagggctctgttattccaacaagaggggaagttcttcaagagctaatgaacttctcctgtacttctctcttcattcgccaggctttgaggccatttccctattcattaaagactaatgtttaaaaagtc

SEQ ID NO: 8856 - protein, 403 aa, Homo sapiens; identical to SEQ ID NO: 8854

SEQ ID NO: 8857 - DNA, 810 bp, Homo sapiens
agaaggacgtctgcctctgactcagtatgtcacatttaacaagaggccagagcttgtccaaaatggctgtccaaaaacgaccccacacttgcgttagaagatgatacctttttcagggacagttttctctcttggctcctgtcccgctggccctctgtctgcctgtgtccctgaccatggctccctgcagtaccctttaacgatttatcagcaagactgttgaacgcataactgcccaagatgcctgtccctccccctccagcacccccgccgcccccgacgtttgcactggccaatacagagaagcctaccttgaataagacagagcaggctgggagaaatgctctcctttctgatatcagcaaagggaagaaactaaagaagacggtcaccaatgacagaagtgcaccaatactggacaaacctaaaggagctggtgctggaggcggtggtggtggctttggtggaggcggcggatttggcggaggaggtggtggcggaggcggtggaagttttggagggggcggacctccaggtctgggaggattgttccaggctggaatgccgaagctgagatccacggccaacagggataatgggttagctggagtgggaagaaaagggaggagcaaatagaacttgctggccctggaaatctgcctggtgacctgacagattcagctttctttgtgaggtagcccagctgtctagtagagtaaatacttgtgagccgcttttcaaacacgatggagcacatcttgtggaatatgattacaaatctcactaaatctgaaaaagtgttttgcatga

SEQ ID NO: 8858 - protein, 131 aa, Homo sapiens
MPVPPPPAPPPPPTFALANTEKPTLNKTEQAGRNALLSDISKGKKLKKTVTNDRSAPILDKPKGAGAGGGGGGFGGGGGFGGGGGGGGGGSFGGGGPPGLGGLFQAGMPKLRSTANRDNGLAGVGRKGRSK

SEQ ID NO: 8859 - DNA, 482 bp, Homo sapiens
ctcagcttcggcattccagcctggaacaatcctcccagacctggaggtccgccccctccaaaacttccaccgcctccgccaccacctcctccgccaaatccgccgcctccaccaaagccaccaccaccgcctccagcaccagctcctttaggttctgtagaagaagagacacccgacagactatgccccctggtctggcccagaaatggactggagaagctaaaaaagacactgctggacttgtcacagccgccgggaaacaagaattaagacagttcggaagagtcccattcaaagtgggcggtctagaaaatgaaaattttaaattccacagcagcaacagcagctctcatgtatggagaatctgctggatccagggctctatccttgcgtggtctctgactcctaagacagcggaagccagcatcgctgtgctcatttgatagactcagagaaattaaatcactccctaaaacaccctg

SEQ ID NO: 8860 - protein, 86 aa, Homo sapiens
MPPGLAQKWTGEAKKDTAGLVTAAGKQELRQFGRVPFKVGGLENENFKFHSSNSSSHVWRICWIQGSILAWSLTPKTAEASIAVLI

SEQ ID NO: 8861 - DNA, 593 bp, Homo sapiens
acagaaggacgtctgcctctgactcagtatgtcacatttaacaagaggccagagcttgtccaaaatggctgtccaaaaacgaccccacacttgcgttagaagatgatacctttttcagggacagttttctctcttggctcctgtcccgctggccctctgtctgcctgtgtccctgaccatggctccctgcagtaccctttaacgatttatcagcaagactgttgaacgcataactgcccaagatgcctgtccctccccctccagcacccccgccgcccccgacgtttgcactggccaatacagagaagcctaccttgaataagacagagcaggctgggagaaatgctctcctttctgatatcagcaaagggaagaaactaaagaagacggtcaccaatgacagaagtgcaccaatactggacagtaagtaaaaaaaggctatctaccatggagaggaacagtttatggcctaataatcaaccctaccctcaccactcaatttttattttattttattttttggttaacaacagctgcaaagctagcaaaataagggactgtatcactccctgtaggccgcagctttggcttgg

SEQ ID NO: 8862 - protein, 62 aa, Homo sapiens
MPVPPPPAPPPPPTFALANTEKPTLNKTEQAGRNALLSDISKGKKLKKTVTNDRSAPILDSK

SEQ ID NO: 8863 - DNA, 611 bp, Homo sapiens
ggctagaagacagcaggggaactcgagaagttggttgttttcagcagattaaaacaatacaggaaccagaaaatgacaagaagagttgcatttgtctatgaaagtgcatagaaagcttttcctggaaaagaataaactgggaaaagatgagtccttgaagtagaaccctgtcatagtgcaacaaactgaatttaagaggcatctgttcccagcttatacaacatccagtaccagttccacagccaacaatggatagatttggtcgtccttgaagcatttagagacctgtagaatgaacttaacttctgaaaactgggtgcggggccaatagaggggctgctcaatacctcaccagcctgctacgcggaaggctagatggagggctgctaaaggaagagaactgctgttccacctccgcctcctccctgcagtgtggcttcttaggcaagagataccgctggccctccatattcacaagctctgcatctgtgggttcagccaactatggatcgaaatatgcaacttcaaattatcttcattcaggaaggagaaccctgagttcttctgggttggatctaagcatggaagccagctaccgtgttaagagctgc

SEQ ID NO: 8864 - protein, 90 aa, Homo sapiens
RGCSIPHQPATRKARWRAAKGRELLFHLRLLPAVWLLRQEIPLALHIHKLCICGFSQLWIEICNFKLSSFRKENPEFFWVGSKHGSQLPC

SEQ ID NO: 8865 - DNA, 771 bp, Homo sapiens
cagggaagggattgcctatgtgcctgattgattttttactctgccatttcaatttccctctatttcgtcatcagtcagaaggttggtgctgtttaaaggggaaaaaaaagctctaagtgtccccttctcccaaaaaaaggaaccagaaaatgacaagaagagttgcatttgtctatgaaagtgcatagaaagcttttcctggaaaagaataaactgggaaaagatgagtccttgaagtagaaccctgtcatagtgcaacaaactgaatttaagaggcatctgttcccagcttatacaacatccagtaccagttccacagccaacaatggatagatttggtcgtccttgaagcatttagagacctgtagaatgaacttaacttctgaaaactgggtgcggggccaatagaggggctgctcaatacctcaccagcctgctacgcggaaggctagatggagggctgctaaaggaagagaactgctgttccacctccgcctcctccctgcagtgtggcttcttaggcaagagataccgctggccctccatattcacaagctctgcatctgtgggttcagccaactatggatcgaaatatgcaacttcaaattatcttcattcaggaaggagaaccctgagttcttctgggttggatctaagcatgtaagactattgagttacatttgacttctgaagtcactttttgtctttactttttagtcagcttgtgaaagcaaaaagcatcttatttttaaaatacctatgttagtaccc

SEQ ID NO: 8866 - protein, 32 aa, Homo sapiens
MCLIDFLLCHFNFPLFRHQSEGWCCLKGKKKL

SEQ ID NO: 8867 - DNA, 4683 bp, Homo sapiens
ggccgcgggtcccggcggcggggtgggcgggggaggcagcgggtgacagatgtactcctctgacagctctcagtatcagcccagtggctccctgccattggctcagtgcaatggaccggcaacgccgctcactataataacactcatgcctgccagcagcagcaactccgagtgcaggcgccgagcgcgggggatgctgccgccgccgccgcttctgctgccgcgcgggcggctcccgcagccccgctccgcccggccaccgcgcgggcactgactcccgctcggttccgtttcgccggcccggccccctcctaggctggaatcctcccgcggggctcgtcgtcccgacgcgaatctgaggagaaacaggagcgagagactgaggggagagcgcggcgagcatgcggaggcgggggagcctcggcgctcaccacagaggggtgcagtgagccagtctccagaggacgtgccgggggtggctgcgtgccctcgtggcgggttcccagcccaccgtcgccggccccggcgcgctgcggctgtgggcgcggggtgcgtggaagcggcggctgcggcggaggaggcggcggctgccccatggagtgttactacattgtcatcagctccacgcatctcagcaacggacactttcgcaacatcaagggagttttccggggccctctcagcaagaacgggaacaaaactctggactatgctgagaaggaaaataccatagcaaaagctctggaagatctgaaggcaaatttttactgtgaactctgtgacaagcagtactataagcaccaggagtttgacaatcacattaattcatatgaccatgctcacaagcagaggctcaaggaactgaaacaaagggaatttgctcgaaatgtagcatctaaatccaggaaagatgaaagaaaacaggaaaaggcactccaacgcctgcacaagctggctgagctaagaaaggaaactgtatgtgctcctggaagtggccccatgttcaaatcaacaactgttactgtgagagaaaactgtaatgaaatttcccaacgagttgttgtggattcagttaataaccagcaagatttcaaatatactttgattcatagtgaagagaatactaaagatgctaccactgttgctgaagatccagaaagtgcaaataattatacagcaaaaaataaccaagttggggatcaagcccaggggattcacagacacaaaatcggcttttcttttgcatttccaaagaaagcgtccgtgaagctagagtcctcagctgcagccttctctgaatacagtgatgatgcctcagtgggaaaaggatttagcagaaaaagtagatttgtccccagtgcttgtcatcttcaacaatcttcaccaacagatgtgcttttgagttctgaggagaaaactaactcttttcatccaccagaggcaatgtgcagagacaaagaaactgttcaaactcaagagataaaagaagtctctagtgaaaaagatgcattattattaccttcattttgcaagtttcaacttcagttatcttctgatgcagataattgtcaaaattcagtcccattagcagatcaaataccactagagagtgttgttattaatgaagacatacctgttagtggtaacagttttgagttgttaggaaataaatccacagttcttgacatgtctaatgattgcatatctgtgcaagctaccacagaggaaaatgttaagcataacgaggcatccacaactgaggttgaaaataaaaatggtcccgagacattggccccttcaaatactgaagaggttaacataactatacataagaaaacaaatttctgcaaaagacaatgtgagccatttgtacctgtccttaacaaacacagatctacagttcttcagtggccatcagaaatgctggtttatacaactacgaaaccatcaatttcctatagctgtaatcctctatgttttgacttcaagtctactaaagtaaataataatctagataaaaataagccagacttaaaagatctttgttctcagcagaagcaggaagacatttgcatgggaccactttcagattacaaggatgtatctacagaaggactcactgattatgaaattggaagtagcaaaaataaatgcagccaagtcactcctcttttggctgatgatattctctccagtagttgtgattctggaaaaaatgagaacacaggtcagaggtataaaaacatttcctgtaagatcagagaaacagaaaagtataattttactaaaagtcaaataaaacaggacactctagatgaaaaatacaacaaaataaggttgaaagagacccatgaatactggttccataaaagtagaagaaagaaaaaaagaaaaaagttatgtcagcatcatcatatggagaaaaccaaagaatcagaaactcgctgcaaaatggaagcagagaatagttacactgaaaatgctgggaaatatctattggaaccaatttcagaaaagcagtatttagctgcagagcaattattagactcacatcagttacttgataaaaggcccaaatcagaatccatatccttaagtgacaatgaagaaatgtgtaaaacatggaatactgaatacaacacttatgatactatcagttctaaaaaccactgtaaaaagaacacaatacttttaaatggacaatcaaatgcaacaatgatacattctgggaaacataatttaacatattctagaacttactgttgttggaaaaccaaaatgtcaagctgtagtcaggatcacagaagcttagttcttcaaaatgatatgaaacacatgagtcagaatcaggctgttaaaagaggttacaattctgtcatgaatgaatcagaaagattctatcgaaaacgtagacaacattcacattcttattcttcagatgaaagtttaaatcgacagaatcatttaccagaagaatttttgaggccaccaagtacttcagttgctccctgcaagcctaaaaagaaacggaggcgaaaaagaggcagattccaccccggatttgaaactttagaactcaaagaaaatacagattatcccgtgaaagacaattcttccttaaatcctctggataggttaataagtgaagacaaaaaagagaaaatgaaaccacaagaagttgcaaaaatcgaaaggaactcagaacaaacaaaccaattaagaaacaaactgtctttccaccctaacaatctccttccttctgaaaccaatggtgaaactgagcatttagaaatggagaccacttctggtgaattgtcagatgtttccaatgatcccaccacatctgtctgtgtagctagtgccccaacaaaagaagcaattgacaataccctgcttgaacacaaagaaagaagtgagaatataaatcttaatgaaaagcaaattccttttcaggtgcctaatattgaaaggaactttagacagtcacagcctaaatcctatctttgccattatgaactggctgaggcccttccacaaggaaagatgaatgagacaccaactgagtggctgcgttataattcaggaatccttaacacacaaccaccattaccattcaaagaagcacatgtcagtggtcatacttttgtaacagctgagcaaatcctggctccattagctttaccagagcaagcattattgatcccactagaaaaccatgacaaattcaaaaatgtaccatgtgaggtctaccagcacattctgcagccaaacatgctggccaacaaggttaaatttacctttcctccagctgccctcccaccccctagcacacctctgcagcctttgcctttgcagcagtccttatgttctacctctgtaaccactatccatcacactgttttgcagcagcacgctgcagctgctgcagctgcagctgcagccgcagctgcaggaacctttaaagtgcttcagccacaccaacagtttctttcccaaatcccagctctcaccagaacctcattacctcagctctcagtaggaccagtaggaccgaggctttgtcctgggaaccagccaacttttgttgctcctcctcagatgccaatcattccagcttccgttcttcatcctagccatctggctttcccatctttaccccatgcactctttccttcactgctttccccacaccctactgtcatccctttgcaacctctcttctagtcatcaccataatgggaaaaaaatactcttgtgaaaactattgctatatgcgttaagtgttcatctatgtgggtacatggctatttaactggtggaaataaactggccgatacatggcgtcattggtttgaaatcatttactgtaagtgcaatgatgcaaataaatccctaagtttctgatatataatattattaaagcactgaatagtttgaaaatcaatacaatatatgctatatattaaaatgatgtcttaagagtatgtataatgtacataaaatatatttatagtactctaatttatgttgtaaagtatgctcccttggtttttcttaatctttgtgtatttgcacctatttaatgtttagacaaagctgatggcactatgttttgtatcatgttccttgaaactgtaaattcagtgaaaaatatctcttgcaataaatttttgttaactattt

SEQ ID NO: 8868 - protein, 1209 aa, Homo sapiens; identical to SEQ ID NO: 702

SEQ ID NO: 8869 - DNA, 817 bp, Homo sapiens
ggactatgctgagaaggaaaataccatagcaaaagctctggaagatctgaaggcaaatttttactgtgaactctgtgacaagcagtactataagcaccaggagtttgacaatcacattaattcatatgaccatgctcacaagcaggtgggattctaagatggccatcaagattaccagtacccctaatgtatacacctcatcaatcagacattaatttattttctactgtgaagtaattttgcgatacaattaagatctcaaatcagctaagtttaacattgtcccattggggctaatctaattccctgagctctttaaaaatgtggagttttctgtggctgctctaaaaagaggaagccagagatttgaagcatgagaagaatttgacacatgagaaattccccagtgctggctttgaagatggaaggagcaacataacaaagaatgaggcagcatgcagtagataagggagatctctgactgacagccaacaagaaaacaggtatctcagacctccagccatgaagaactgaatcctgccaacaacatgagtaagctcagaaacagatatttctccagagcttccagatgagaacccagtctttgatcccagtcatatataccctgaggagagaacacagccactgtgcctcacttttcatctatgaaactgtgacaatctatgaaacatggattattttaagccatttagtttctgttaattttttacacagcagtagaaaactagcacattctctcaccatcctgtatttgttatgttaaactctaaaaattacttctacattctcatgtcat

SEQ ID NO: 8870 - protein, 64 aa, Homo sapiens
MRTQSLIPVIYTLRREHSHCASLFIYETVTIYETWIILSHLVSVNFLHSSRKLAHSLTILYLLC

SEQ ID NO: 8871 - DNA, 615 bp, Homo sapiens
tgcagggttgcctagaagccgatgatcactgtaaagttccccaatgaattaagtttgggccaggagatactaaaggatacaaaaatggcagactcactgctgttctggaggttgtgaaaaatctttttaaaaattatcatgaagaaaattcaggtctccaaatgtacctctactcgattaactaaggaaaagctgtttgtaatctagggaccgcaatagctgtcacaattaatactgagtatgtgctgttctatcatttttggcaaggattggtgtttcatcatttagacacatcaggtacttacattgcagtgtcatataatttaaattggcattgtttaaaatgatgaaaaaataacaaagtaccaatcagaaactaaattttagtacagtgggaaggattcatccattgaattggattgatagaagatgagacagcaatttaatagagttttgttcatcttttcctttcttggttgactaacactgacatttttgaggtcttttatttctacagaacgttctctgcagtctcctcttcaaatacggctcttggctatgcttgtgaattttgtgaatatacaattatttcaaattaaatactaactgaatgtg

SEQ ID NO: 8872 - protein, 31 aa, Homo sapiens
MITVKFPNELSLGQEILKDTKMADSLLFWRL

SEQ ID NO: 8873 - DNA, 446 bp, Homo sapiens
aatgtagacagaaacaaacaggcaaccctgcagtggtagtagtggtgacagcagcagcggcaatgatggaagcctgcaggagccaagagtgtaagaaatggaaaccgctttctctattttctctggagctatagattcagacggttatcttaacagtctgcaacaatatactgagagaagcactaacgaaactgcatttctctgtcatgctgtgccagctgtagtatgtgggaaaccttgtctctcccaagtaccttctgtctctggcagctccatgtaaacttcaggaatggtcagtgctgagcttttagttgctgtatccaccatctccacagaccaagacccagtgacttgcatttcttgcctccatgtccatggcttattttctccctactcagttatgttatcctacttcattcaccgatgttgtagacactgttctgaat

SEQ ID NO: 8874 - protein, 60 aa, Homo sapiens
METAFSIFSGAIDSDGYLNSLQQYTERSTNETAFLCHAVPAVVCGKPCLSQVPSVSGSSM

SEQ ID NO: 8875 - DNA, 421 bp, Homo sapiens
tagaaagaagttggaagaggaaacattaggaatttcctttcaaactccaatcaaaacagcccatttgaatatttttttaaaaaaattccaaaaattcttcctgtgaggatgcattggctaaagcaggtcaaagttgctgaagaggactaagcgagcctcttggggaagatgatatcatctgatctgtacacatgtcacattcagaacattctgcatggctgctgctgagctcccatctgtcagatctcaacagagagaacaaagactagagatgtgagtaattcaagaaacatccatttactagctgaaaaaacaaataaaattaggaggagccactttcttcttgttacatgttactgatacgtgttctacctggccataccacacattacataaaatgtattcaactactttactgtca

SEQ ID NO: 8876 - protein, 34 aa, Homo sapiens
RKKLEEETLGISFQTPIKTAHLNIFLKKFQKFFL

SEQ ID NO: 8877 - DNA, 2528 bp, Homo sapiens
aatgcaagcagatgaagaggaaagaactgagcagcagtatttcaggattctcaataaggcatcaatgaaaaaaggtcaaaactgtgatccctgctacttgggaggctgagacacaagaattgcttgaatccaggaggcggaggttgcagtgaaccaagatcatgccactgaactccagcctgggtgacagagcaagagtctgtctcaaaaaaaaaaaaaagaaaagaaaaagatattgcttagaaaagtaacttgagtcctgttgagcctaagtaaaggacaataatggaagtttctagtctgcaaaatatgaagatgcccctcagagacacagctgtgggtgcctctcacaagacagatgttcaggaaaactgggctgttgctctggaattttcaatgagttattttacttgtttttgcctcagtttacagaaaataaactggcaacaatatctccttgttattgtgaggataaaataaaaggtgtgacatttctattttaaatgtataaaatgccgaaaaattggaggcaactggaaggtacagtagtggatgtgaggtagtaagggggaaaaaaggatatgtaaatcacctaagatgaaatagacattcagaaggccgtaacgtgaagtgtgagtgacactgattcgctaaaaatcctatatagtgtcttaaaacagcagcagtaacaacaacaaagtttatttgagaggaggaattctggaaaaaagcttctttcaaaaaaaaaaaaagagtcttctagtgctcagacagttcgttcctctgcaaaggcgggttactctgttggggtccattatagttctgaggatgaataggacaggacaaggagatggttcctggcccctgttctcctgccacagatctgtcccacctcccaggctccatgcatacagtgacagagatggaaagcccagaaccagtccctttaatgcacttatttgcaaaacaagatgtcactatgcagcagagtgacagtcctttcccctggaactgtcccagagttctccaagctgaagccagggctacattcaccatctcagactcctgctgagctaagtaaccaccctctcctaccttctcttcaggagccctggcacccttgctctggggagagtttgaagagcaacctgaaagttcccacagtttttcctcaaatctgggtttccatgagcatgggccaccagtcgggagagccacatgcctgcccttgcctggctcaagactgtcactctgtcagattcatatcgctctctgacccttagccttccagtctggatcttgaccttgaactggactctgtaggaagttcttaacattaaaggaagttatttatctcttttcaactaacccaagcactttctagcaccttttagcagtttaagctctatgactccattggataaaatgctggggagcaggacattgacacagtcacagaatatcacacacggaatcctcattcattcccccagggaaacagcacctgtagaagacaaatctggtagacactactgtgacaggtgattttatatgtcagcttgactaggccacaggatgtgtagacatttgtcaaatttttttttatatgtctgtgaggatgtttctggatgagattaacattgaatcagtagactgagtaaagaagaccgccctccccagtgggggtgtccctcatccaacctgtggaagccctacatagaacaaaaaggctgaacctcccccaaaatacggtgatctcaagctgcctgacttctggtgctggaacattgttctttttctgccttccgactcaaactgaaaatcagctcatcttgtatcctgagtctgctggcttccagactgaactatacattgactctcccaggtttccagcttgcaactgctggtcttgggacttctcagcctccataatcatgcattagccaatttctatatagatctagaaattcatatatatatatgtgtgtgtgtgtgtgtatgtgtgtgtgtgtgtgtacgcatatatatacagtcatgaatcactgagcagtgggcataccttctgagaaatgtgtcattaggcactgttatcattgtgtgaacatcatagtgtacttacacacacctagacggtatagcctacaacacacctaggctatatagtataacttgttgctggtagattacaaacctgtacaacctgttactgtactgaatactgtaggcaattgtaaaacaatggtaagtatttgtgtatctaaacatagctaaccatagaaaaggtacagtaaaaatactgtataagagataaaacatggtgtgcctgtataggttgcttaccataaataaagcttgcaggttggaagttactctgggtgagtcagtgagtaaatgatgagtgaatgtgaggcccttggacatcactgtaccctactgtagactttataaacactgtacacttaggttaccctaaatctattttaaaattgttttctttcttcaataataaattacccttagcttactgt

SEQ ID NO: 8878 - protein, 35 aa, Homo sapiens
MQADEEERTEQQYFRILNKASMKKGQNCDPCYLGG

SEQ ID NO: 8879 - DNA, 1206 bp, Homo sapiens
gtgaaggagactgagaaggaacagtcaaagatattgcaggaagaccagtagtacatggaagtcaaaggagagagcatcaagaaagagatgcgatgagtcaacaagaagtttacagcactgagaaagacgagtcaacaacagaaggaaaaaaatccagagaaaatggcacttgctgcattggaatgaaagataatctgcagaaggacctgctcagtggcaataaacattggcattcttggaaacagtgtttgcctaagaatcttctgtctgcctttgttgctttggccatattatgataagggcatgactggatttaccaaaatgggcatgattggatctacttattctcttatcagacaccttttcctagacaacatcctgaaacataagaataagcacaaaaatgaacatattacatcaaacgtaccactgagaagaatggtaagtttaacagtttcccacgtgggaggcatattgacgattacaattttaagttagcagaacaccagctcacatggaaacagtctcctccgtgaattctttctttggctgacagacatgagatgttagctgtctaagaagaccttcacaccaacaccttcttagaagatattgtaagataacaatccttgagtggaacctgaattctttctaaacactgcatgtaggaaaacaagaggcagttcacacaatcacttaacacctcttcttaaaagtgaatccttgaaggagtggtgttcaaatatttaagtacattagatactttatacacgccacatccaaaatgctcagtattcctaatacatttcattttctcccaagttttaatggttgatgcacaatcacattaatttcctattaatttctaggaatatgtacacagtagccttaggagaaagaagataactattactttacatttttaactgttttgttttcatgtccatgagagaaaaattaaagtaagttaaaaaattaactcagacactctatttatttttaggaagacatacaccccccacagggagacttttacatgttgtaataatgttcacaaacagctactctttaagtgtaacactattctaagcctcttttcctccattttatttcatatacatttatgcatctgcatgcatatataaccacatgtatttatatttagtaggtatagtttattacacataaatctaaatatctatcata

SEQ ID NO: 8880 - protein, 67 aa, Homo sapiens
MSQQEVYSTEKDESTTEGKKSRENGTCCIGMKDNLQKDLLSGNKHWHSWKQCLPKNLLSAFVALAIL

SEQ ID NO: 8881 - DNA, 358 bp, Homo sapiens
gggaggagaaagggaggaaagggagtagagaaggccacacacaatcttaaattcaatatttcactcccgttaaagataagctgtttataagctccagtgtagggcatgtaattctatgtaaaaactctgtggttcctcttcccacatgtaaatcatgatcactctacattctgctctctgggagccctcaaggcaaagagacaacaagactcgagaccacagaaaggacttatcacaagtctttgtggtagctgaggagtgccccctacagactgatatgcacaatgcaagcagatgaagaggaaagaactgagcagcagtatttcaggattctcaataaggcatcaatgaaaaaagg

SEQ ID NO: 8882 - protein, 47 aa, Homo sapiens
MITLHSALWEPSRQRDNKTRDHRKDLSQVFVVAEECPLQTDMHNASR

SEQ ID NO: 8883 - DNA, 3618 bp, Homo sapiens
gcggccgcccctccccgattcccgccacctgccgcctggccaggtggaaggggcgctgccgcgagcctccgggcctcagggtgttccggggagcggcgccccgggtctctgggcccacccgccccgggcgtcctccgagagtgggggctgcgcccgcggggtcagacacctgttcggcccggcccggcgtggtcgccgggggccaggatgaaagtgaccgtgtgcttcggcaggacgggcatcgtggtgccctgcaaggagggccagctgcgcgtcggcgagctcacccagcaggcgctgcagcggtacctgaagacccgggagaagggtcctggttactgggtgaagattcatcacttagaatatacagatggaggaatcctggatccagatgatgtcttggcagatgttgttgaagataaagacaagctgattgctgtgtttgaagaacaagaaccactccacaagattgagagccccagtggaaaccctgcagatcggcagagcccagatgcttttgagacagaagtggccgcccaactggccgcatttaagccaattggtggggagattgaagtaaccccttctgctctaaaactaggcactccactgctggtgaggagaagcagtgacccagtgccaggcccacctgctgatacccagccaagcgcttcacaccctggtggccagagtctgaaactggttgttccagattccacgcagaacttggaagacagagaagttttgaatggtgtacagacagaactactaacttcgccaagaactaaggacacattgagtgatatgacaagaacagtggagatttctggggaaggaggcccattgggaatacatgtagtgcccttcttttcatctctgagtggaaggattctaggactcttcatccgaggcattgaagacaacagcaggtccaagcgggagggactatttcacgaaaatgaatgtattgtaaaaatcaacaatgtggatctcgtagacaaaacctttgctcaggctcaagatgtcttccgccaggcaatgaaatctccaagtgtgctcctccacgtgcttcctccacaaaaccgtgaacagtatgaaaagtcagtcattggctctcttaacatttttggtaataatgatggcgttttgaaaaccaaagtgccgcctcctgtccatggaaaatcgggactaaagacagcaaatctcacaggaaccgatagtcctgaaacagatgcatcagcttccctgcaacaaaacaagagtccccgagtaccaaggctgggaggaaaaccatcctctccctcactctcgcctctcatgggatttggcagcaataaaaatgcaaagaaaattaagattgacctaaagaaaggccctgaaggacttggtttcactgtggttaccagagactcttccatacatggtcccggtcccatttttgtaaaaaacattttaccaaagggagcagcaataaaagatggccgcctacaatcaggggacagaattttggaggtaaatgggagagatgtcaccggacgaacccaggaagagcttgtggccatgctcaggagcaccaagcagggggagacagcatcgctggtcattgcccgccaagaaggacattttctgccccgagagttgaaaggagaacctgactgctgtgcactctctctggagacaagcgagcagctcacctttgagatccccctgaatgattcaggttctgctggcctcggggtgagcttaaaagggaacaaatccagagaaactggaacagacttggggatttttatcaaatccatcattcatggaggcgctgcttttaaggatggtcgtctgcgaatgaatgaccagctgattgcagttaatggggaatctcttttgggaaagtccaaccacgaagctatggaaacacttaggcggtcaatgtccatggagggaaacatccgagggatgatccagttggtgattctgaggaggccagagagaccaatggaggatcctgcagagtgtggggcattttccaagccatgctttgagaactgtcaaaatgctgtaaccacctctaggcgaaatgataatagtatcctgcatccacttggcacttgcagtccacaagacaaacagaaaggtctattgctgcccaatgacggatgggccgagagtgaagttccaccttctccaacaccacattctgctctgggattgggcctcgaagattacagccacagctctggggtggattcagcagtatattttccagatcagcacatcaacttcagatctgtgacaccggccaggcagcctgaatcaattaatttgaaagcctcgaagagcatggaccttgtgccagatgaaagcaaggttcactcattggctggacaaaaatcggacggtctgtctgataagagctctcactctggccaaggagctctgaattgtgagtctgcccctcaggggaattcggagctagaggacatggaaaataaagccaggaaagtcaaaaaaacgaaagagaaggagaagaaaaaggaaaagggcaaattgaaagtcaaggagaaaaagcgcaaagaggagaatgaagatccagaaaggaaaataaagaagaagggcttcggcgccatgctgagatttggaaagaagaaagaggataagggtggaaaggctgagcagaaaggtactctgaaacatggtggcctgagagaagaagagctggagaaaatgaaagaagagcgtgaaaggattggagcaaaacatcaggagctaagggaaaagcaggcaagaggtcttcttgattatgctactggtgcaattggatcagtgtatgatatggatgatgatgaaatggaccccaattatgccagagtgaaccactttcgggaaccatgcacatcagcaaatgtctttagatctccatctccccctcgagctggaccatttggttaccctcgggatggccatccactgtctccagaaagagaccacttagagggtctctatgccaaggtcaacaagccataccatccactggttccagctgacagtggccgtcctacgggtggaagcactgaccgtatccagaagttgcggaaagagtattatcaggctcggagggaaggtttccctttatatgaagacgacgaaggaagagcaaggccatctgagtatgacctactctgggtgcctggaaggggtccagatgggaatgcacacaacctccgctttgaagggatggagaggcagtacgcatccttacccaggggaggacccgcagatcctgtagactatctgccagcagcacctcgggggctctacaaggaaagggagcttccctattatccaggggctcatcctatgcaccctcccaaagggagctatccccgccccacagagctcagggtggcagatctccggtatcctcagcactacccacccccgccagctccccagcacaaaggaccctttcgacaagacgttccgccttcccctccccagcaccaaagaatgccagcctatcaggaaacaggcagaccagggccccgtgggggcagcccagaccagtacccttaccgaacccaggattcccggcagaagaaccccatgactgcagccgtatag

SEQ ID NO: 8884 - protein, 1136 aa, Homo sapiens
MKVTVCFGRTGIVVPCKEGQLRVGELTQQALQRYLKTREKGPGYWVKIHHLEYTDGGILDPDDVLADVVEDKDKLIAVFEEQEPLHKIESPSGNPADRQSPDAFETEVAAQLAAFKPIGGEIEVTPSALKLGTPLLVRRSSDPVPGPPADTQPSASHPGGQSLKLVVPDSTQNLEDREVLNGVQTELLTSPRTKDTLSDMTRTVEISGEGGPLGIHVVPFFSSLSGRILGLFIRGIEDNSRSKREGLFHENECIVKINNVDLVDKTFAQAQDVFRQAMKSPSVLLHVLPPQNREQYEKSVIGSLNIFGNNDGVLKTKVPPPVHGKSGLKTANLTGTDSPETDASASLQQNKSPRVPRLGGKPSSPSLSPLMGFGSNKNAKKIKIDLKKGPEGLGFTVVTRDSSIHGPGPIFVKNILPKGAAIKDGRLQSGDRILEVNGRDVTGRTQEELVAMLRSTKQGETASLVIARQEGHFLPRELKGEPDCCALSLETSEQLTFEIPLNDSGSAGLGVSLKGNKSRETGTDLGIFIKSIIHGGAAFKDGRLRMNDQLIAVNGESLLGKSNHEAMETLRRSMSMEGNIRGMIQLVILRRPERPMEDPAECGAFSKPCFENCQNAVTTSRRNDNSILHPLGTCSPQDKQKGLLLPNDGWAESEVPPSPTPHSALGLGLEDYSHSSGVDSAVYFPDQHINFRSVTPARQPESINLKASKSMDLVPDESKVHSLAGQKSDGLSDKSSHSGQGALNCESAPQGNSELEDMENKARKVKKTKEKEKKKEKGKLKVKEKKRKEENEDPERKIKKKGFGAMLRFGKKKEDKGGKAEQKGTLKHGGLREEELEKMKEERERIGAKHQELREKQARGLLDYATGAIGSVYDMDDDEMDPNYARVNHFREPCTSANVFRSPSPPRAGPFGYPRDGHPLSPERDHLEGLYAKVNKPYHPLVPADSGRPTGGSTDRIQKLRKEYYQARREGFPLYEDDEGRARPSEYDLLWVPGRGPDGNAHNLRFEGMERQYASLPRGGPADPVDYLPAAPRGLYKERELPYYPGAHPMHPPKGSYPRPTELRVADLRYPQHYPPPPAPQHKGPFRQDVPPSPPQHQRMPAYQETGRPGPRGGSPDQYPYRTQDSRQKNPMTAAV

SEQ ID NO: 8885 - DNA, 3339 bp, Homo sapiens
gcggccgcccctccccgattcccgccacctgccgcctggccaggtggaaggggcgctgccgcgagcctccgggcctcagggtgttccggggagcggcgccccgggtctctgggcccacccgccccgggcgtcctccgagagtgggggctgcgcccgcggggtcagacacctgttcggcccggcccggcgtggtcgccgggggccaggatgaaagtgaccgtgtgcttcggcaggacgggcatcgtggtgccctgcaaggagggccagctgcgcgtcggcgagctcacccagcaggcgctgcagcggtacctgaagacccgggagaagggtcctggttactgggtgaagattcatcacttagaatatacagatggaggaatcctggatccagatgatgtcttggcagatgttgttgaagataaagacaagctgattgctgtgtttgaagaacaagaaccactccacaagattgagagccccagtggaaaccctgcagatcggcagagcccagatgcttttgagacagaagtggccgcccaactggccgcatttaagccaattggtggggagattgaagtaaccccttctgctctaaaactaggcactccactgctggtgaggagaagcagtgacccagtgccaggcccacctgctgatacccagccaagcgcttcacaccctggtggccagagtctgaaactggttgttccagattccacgcagaacttggaagacagagaagttttgaatggtgtacagacagaactactaacttcgccaagaactaaggacacattgagtgatatgacaagaacagtggagatttctggggaaggaggcccattgggaatacatgtagtgcccttcttttcatctctgagtggaaggattctaggactcttcatccgaggcattgaagacaacagcaggtccaagcgggagggactatttcacgaaaatgaatgtattgtaaaaatcaacaatgtggatctcgtagacaaaacctttgctcaggctcaagatgtcttccgccaggcaatgaaatctccaagtgtgctcctccacgtgcttcctccacaaaaccgtgaacagtatgaaaagtcagtcattggctctcttaacatttttggtaataatgatggcgttttgaaaaccaaagtgccgcctcctgtccatggaaaatcgggactaaagacagcaaatctcacaggaaccgatagtcctgaaacagatgcatcagcttccctgcaacaaaacaagagtccccgagtaccaaggctgggaggaaaaccatcctctccctcactctcgcctctcatgggatttggcagcaataaaaatgcaaagaaaattaagattgacctaaagaaaggccctgaaggacttggtttcactgtggttaccagagactcttccatacatggtcccggtcccatttttgtaaaaaacattttaccaaagggagcagcaataaaagatggccgcctacaatcaggggacagaattttggaggtaaatgggagagatgtcaccggacgaacccaggaagagcttgtggccatgctcaggagcaccaagcagggggagacagcatcgctggtcattgcccgccaagaaggacattttctgccccgagagttgaaaggagaacctgactgctgtgcactctctctggagacaagcgagcagctcacctttgagatccccctgaatgattcaggttctgctggcctcggggtgagcttaaaagggaacaaatccagagaaactggaacagacttggggatttttatcaaatccatcattcatggaggcgctgcttttaaggatggtcgtctgcgaatgaatgaccagctgattgcagttaatggggaatctcttttgggaaagtccaaccacgaagctatggaaacacttaggcggtcaatgtccatggagggaaacatccgagggatgatccagttggtgattctgaggaggccagagagaccaatggaggatcctgcagagtgtggggcattttccaagccatgctttgagaactgtcaaaatgctgtaaccacctctaggcgaaatgataatagtatcctgcatccacttggcacttgcagtccacaagacaaacagaaaggtctattgctgcccaatgacggatgggccgagagtgaagttccaccttctccaacaccacattctgctctgggattgggcctcgaagattacagccacagctctggggtggattcagcagtatattttccagatcagcacatcaacttcagatctgtgacaccggccaggcagcctgaatcaattaatttgaaagcctcgaagagcatggaccttgtgccagatgaaagcaaggttcactcattggctggacaaaaatcggaatctccaagcaaagattttggtccaactctgggtttgaaaaagtccagctccttggagagtctgcagactgcagtggccgaggtcaggaagaatgaccttccctttcacaggccccggccgcacatggttcgaggccgaggctgcaatgagagctttagagcagccattgacaaatcctacgatggacctgaagaaatagaagctgacggtctgtctgataagagctctcactctggccaaggagctctgaattgtgagtctgcccctcaggggaattcggagctagaggacatggaaaataaagccaggaaagtcaaaaaaacgaaagagaaggagaagaaaaaggaaaagggcaaattgaaagtcaaggagaaaaagcgcaaagaggagaatgaagatccagaaaggaaaataaagaagaagggcttcggcgccatgctgagagtggccgtcctacgggtggaagcactgaccgtatccagaagttgcggaaagagtattatcaggctcggagggaaggtttccctttatatgaagacgacgaaggaagagcaaggccatctgagtatgacctactctgggtccaggggaggacccgcagatcctgtagactatctgccagcagcacctcgggggctctacaaggaaagggagcttccctattatccaggggctcatcctatgcaccctcccaaagggagctatccccgccccacagagctcagggtggcagatctccggtatcctcagcactacccacccccgccagctccccagcacaaaggaccctttcgacaagacgttccgccttcccctccccagcaccaaagaatgccagcctatcaggaaacaggcagaccagggccccgtgggggcagcccagaccagtacccttaccgaacccaggattcccggcagaagaaccccatgactgcagccgtatag

SEQ ID NO: 8886 - protein, 1043 aa, Homo sapiens
MKVTVCFGRTGIVVPCKEGQLRVGELTQQALQRYLKTREKGPGYWVKIHHLEYTDGGILDPDDVLADVVEDKDKLIAVFEEQEPLHKIESPSGNPADRQSPDAFETEVAAQLAAFKPIGGEIEVTPSALKLGTPLLVRRSSDPVPGPPADTQPSASHPGGQSLKLVVPDSTQNLEDREVLNGVQTELLTSPRTKDTLSDMTRTVEISGEGGPLGIHVVPFFSSLSGRILGLFIRGIEDNSRSKREGLFHENECIVKINNVDLVDKTFAQAQDVFRQAMKSPSVLLHVLPPQNREQYEKSVIGSLNIFGNNDGVLKTKVPPPVHGKSGLKTANLTGTDSPETDASASLQQNKSPRVPRLGGKPSSPSLSPLMGFGSNKNAKKIKIDLKKGPEGLGFTVVTRDSSIHGPGPIFVKNILPKGAAIKDGRLQSGDRILEVNGRDVTGRTQEELVAMLRSTKQGETASLVIARQEGHFLPRELKGEPDCCALSLETSEQLTFEIPLNDSGSAGLGVSLKGNKSRETGTDLGIFIKSIIHGGAAFKDGRLRMNDQLIAVNGESLLGKSNHEAMETLRRSMSMEGNIRGMIQLVILRRPERPMEDPAECGAFSKPCFENCQNAVTTSRRNDNSILHPLGTCSPQDKQKGLLLPNDGWAESEVPPSPTPHSALGLGLEDYSHSSGVDSAVYFPDQHINFRSVTPARQPESINLKASKSMDLVPDESKVHSLAGQKSESPSKDFGPTLGLKKSSSLESLQTAVAEVRKNDLPFHRPRPHMVRGRGCNESFRAAIDKSYDGPEEIEADGLSDKSSHSGQGALNCESAPQGNSELEDMENKARKVKKTKEKEKKKEKGKLKVKEKKRKEENEDPERKIKKKGFGAMLRVAVLRVEALTVSRSCGKSIIRLGGKVSLYMKTTKEEQGHLSMTYSGSRGGPADPVDYLPAAPRGLYKERELPYYPGAHPMHPPKGSYPRPTELRVADLRYPQHYPPPPAPQHKGPFRQDVPPSPPQHQRMPAYQETGRPGPRGGSPDQYPYRTQDSRQKNPMTAAV

SEQ ID NO: 8887 - DNA, 3639 bp, Homo sapiens
gcggccgcccctccccgattcccgccacctgccgcctggccaggtggaaggggcgctgccgcgagcctccgggcctcagggtgttccggggagcggcgccccgggtctctgggcccacccgccccgggcgtcctccgagagtgggggctgcgcccgcggggtcagacacctgttcggcccggcccggcgtggtcgccgggggccaggatgaaagtgaccgtgtgcttcggcaggacgggcatcgtggtgccctgcaaggagggccagctgcgcgtcggcgagctcacccagcaggcgctgcagcggtacctgaagacccgggagaagggtcctggttactgggtgaagattcatcacttagaatatacagatggaggaatcctggatccagatgatgtcttggcagatgttgttgaagataaagacaagctgattgctgtgtttgaagaacaagaaccactccacaagattgagagccccagtggaaaccctgcagatcggcagagcccagatgcttttgagacagaagtggccgcccaactggccgcatttaagccaattggtggggagattgaagtaaccccttctgctctaaaactaggcactccactgctggtgaggagaagcagtgacccagtgccaggcccacctgctgatacccagccaagcgcttcacaccctggtggccagagtctgaaactggttgttccagattccacgcagaacttggaagacagagaagttttgaatggtgtacagacagaactactaacttcgccaagaactaaggacacattgagtgatatgacaagaacagtggagatttctggggaaggaggcccattgggaatacatgtagtgcccttcttttcatctctgagtggaaggattctaggactcttcatccgaggcattgaagacaacagcaggtccaagcgggagggactatttcacgaaaatgaatgtattgtaaaaatcaacaatgtggatctcgtagacaaaacctttgctcaggctcaagatgtcttccgccaggcaatgaaatctccaagtgtgctcctccacgtgcttcctccacaaaaccgtgaacagtatgaaaagtcagtcattggctctcttaacatttttggtaataatgatggcgttttgaaaaccaaagtgccgcctcctgtccatggaaaatcgggactaaagacagcaaatctcacaggaaccgatagtcctgaaacagatgcatcagcttccctgcaacaaaacaagagtccccgagtaccaaggctgggaggaaaaccatcctctccctcactctcgcctctcatgggatttggcagcaataaaaatgcaaagaaaattaagattgacctaaagaaaggccctgaaggacttggtttcactgtggttaccagagactcttccatacatggtcccggtcccatttttgtaaaaaacattttaccaaagggagcagcaataaaagatggccgcctacaatcaggggacagaattttggaggtaaatgggagagatgtcaccggacgaacccaggaagagcttgtggccatgctcaggagcaccaagcagggggagacagcatcgctggtcattgcccgccaagaaggacattttctgccccgagagttggatggtcgtctgcgaatgaatgaccagctgattgcagttaatggggaatctcttttgggaaagtccaaccacgaagctatggaaacacttaggcggtcaatgtccatggagggaaacatccgagggatgatccagttggtgattctgaggaggccagagagaccaatggaggatcctgcagagtgtggggcattttccaagccatgctttgagaactgtcaaaatgctgtaaccacctctaggcgaaatgataatagtatcctgcatccacttggcacttgcagtccacaagacaaacagaaaggtctattgctgcccaatgacggatgggccgagagtgaagttccaccttctccaacaccacattctgctctgggattgggcctcgaagattacagccacagctctggggtggattcagcagtatattttccagatcagcacatcaacttcagatctgtgacaccggccaggcagcctgaatcaattaatttgaaagcctcgaagagcatggaccttgtgccagatgaaagcaaggttcactcattggctggacaaaaatcggaatctccaagcaaagattttggtccaactctgggtttgaaaaagtccagctccttggagagtctgcagactgcagtggccgaggtcaggaagaatgaccttccctttcacaggccccggccgcacatggttcgaggccgaggctgcaatgagagctttagagcagccattgacaaatcctacgatggacctgaagaaatagaagctgacggtctgtctgataagagctctcactctggccaaggagctctgaattgtgagtctgcccctcaggggaattcggagctagaggacatggaaaataaagccaggaaagtcaaaaaaacgaaagagaaggagaagaaaaaggaaaagggcaaattgaaagtcaaggagaaaaagcgcaaagaggagaatgaagatccagaaaggaaaataaagaagaagggcttcggcgccatgctgagatttggaaagaagaaagaggataagggtggaaaggctgagcagaaaggtactctgaaacatggtggcctgagagaagaagagctggagaaaatgaaagaagagcgtgaaaggattggagcaaaacatcaggagctaagggaaaagcaggcaagaggtcttcttgattatgctactggtgcaattggatcagtgtatgatatggatgatgatgaaatggaccccaattatgccagagtgaaccactttcgggaaccatgcacatcagcaaatgtctttagatctccatctccccctcgagctggaccatttggttaccctcgggatggccatccactgtctccagaaagagaccacttagagggtctctatgccaaggtcaacaagccataccatccactggttccagctgacagtggccgtcctacgggtggaagcactgaccgtatccagaagttgcggaaagagtattatcaggctcggagggaaggtttccctttatatgaagacgacgaaggaagagcaaggccatctgagtatgacctactctgggtgcctggaaggggtccagatgggaatgcacacaacctccgctttgaagggatggagaggcagtacgcatccttacccaggggaggacccgcagatcctgtagactatctgccagcagcacctcgggggctctacaaggaaagggagcttccctattatccaggggctcatcctatgcaccctcccaaagggagctatccccgccccacagagctcagggtggcagatctccggtatcctcagcactacccacccccgccagctccccagcacaaaggaccctttcgacaagacgttccgccttcccctccccagcaccaaagaatgccagcctatcaggaaacaggcagaccagggccccgtgggggcagcccagaccagtacccttaccgaacccaggattcccggcagaagaaccccatgactgcagccgtatag

SEQ ID NO: 8888 - protein, 1143 aa, Homo sapiens
MKVTVCFGRTGIVVPCKEGQLRVGELTQQALQRYLKTREKGPGYWVKIHHLEYTDGGILDPDDVLADVVEDKDKLIAVFEEQEPLHKIESPSGNPADRQSPDAFETEVAAQLAAFKPIGGEIEVTPSALKLGTPLLVRRSSDPVPGPPADTQPSASHPGGQSLKLVVPDSTQNLEDREVLNGVQTELLTSPRTKDTLSDMTRTVEISGEGGPLGIHVVPFFSSLSGRILGLFIRGIEDNSRSKREGLFHENECIVKINNVDLVDKTFAQAQDVFRQAMKSPSVLLHVLPPQNREQYEKSVIGSLNIFGNNDGVLKTKVPPPVHGKSGLKTANLTGTDSPETDASASLQQNKSPRVPRLGGKPSSPSLSPLMGFGSNKNAKKIKIDLKKGPEGLGFTVVTRDSSIHGPGPIFVKNILPKGAAIKDGRLQSGDRILEVNGRDVTGRTQEELVAMLRSTKQGETASLVIARQEGHFLPRELDGRLRMNDQLIAVNGESLLGKSNHEAMETLRRSMSMEGNIRGMIQLVILRRPERPMEDPAECGAFSKPCFENCQNAVTTSRRNDNSILHPLGTCSPQDKQKGLLLPNDGWAESEVPPSPTPHSALGLGLEDYSHSSGVDSAVYFPDQHINFRSVTPARQPESINLKASKSMDLVPDESKVHSLAGQKSESPSKDFGPTLGLKKSSSLESLQTAVAEVRKNDLPFHRPRPHMVRGRGCNESFRAAIDKSYDGPEEIEADGLSDKSSHSGQGALNCESAPQGNSELEDMENKARKVKKTKEKEKKKEKGKLKVKEKKRKEENEDPERKIKKKGFGAMLRFGKKKEDKGGKAEQKGTLKHGGLREEELEKMKEERERIGAKHQELREKQARGLLDYATGAIGSVYDMDDDEMDPNYARVNHFREPCTSANVFRSPSPPRAGPFGYPRDGHPLSPERDHLEGLYAKVNKPYHPLVPADSGRPTGGSTDRIQKLRKEYYQARREGFPLYEDDEGRARPSEYDLLWVPGRGPDGNAHNLRFEGMERQYASLPRGGPADPVDYLPAAPRGLYKERELPYYPGAHPMHPPKGSYPRPTELRVADLRYPQHYPPPPAPQHKGPFRQDVPPSPPQHQRMPAYQETGRPGPRGGSPDQYPYRTQDSRQKNPMTAAV

SEQ ID NO: 8889 - DNA, 3312 bp, Homo sapiens
atgaaagtgaccgtgtgcttcggcaggacgggcatcgtggtgccctgcaaggagggccagctgcgcgtcggcgagctcacccagcaggcgctgcagcggtacctgaagacccgggagaaggagctgattgctgtgtttgaagaacaagaaccactccacaagattgagagccccagtggaaaccctgcagatcggcagagcccagatgcttttgagacagaagtggccgcccaactggccgcatttaagccaattggtggggagattgaagtaaccccttctgctctaaaactaggcactccactgctggtgaggagaagcagtgacccagtgccaggcccacctgctgatacccagccaagcgcttcacaccctggtggccagagtctgaaactggttgttccagattccacgcagaacttggaagacagagaagttttgaatggtgtacagacagaactactaacttcgccaagaactaaggacacattgagtgatatgacaagaacagtggagatttctggggaaggaggcccattgggaatacatgtagtgcccttcttttcatctctgagtggaaggattctaggactcttcatccgaggcattgaagacaacagcaggtccaagcgggagggactatttcacgaaaatgaatgtattgtaaaaatcaacaatgtggatctcgtagacaaaacctttgctcaggctcaagatgtcttccgccaggcaatgaaatctccaagtgtgctcctccacgtgcttcctccacaaaaccgtgaacagtatgaaaagtcagtcattggctctcttaacatttttggtaataatgatggcgttttgaaaaccaaagtgccgcctcctgtccatggaaaatcgggactaaagacagcaaatctcacaggaaccgatagtcctgaaacagatgcatcagcttccctgcaacaaaacaagagtccccgagtaccaaggctgggaggaaaaccatcctctccctcactctcgcctctcatgggatttggcagcaataaaaatgcaaagaaaattaagattgacctaaagaaaggccctgaaggacttggtttcactgtggttaccagagactcttccatacatggtcccggtcccatttttgtaaaaaacattttaccaaagggagcagcaataaaagatggccgcctacaatcaggggacagaattttggaggtaaatgggagagatgtcaccggacgaacccaggaagagcttgtggccatgctcaggagcaccaagcagggggagacagcatcgctggtcattgcccgccaagaaggacattttctgccccgagagttgaaaggagaacctgactgctgtgcactctctctggagacaagcgagcagctcacctttgagatccccctgaatgattcaggttctgctggcctcggggtgagcttaaaagggaacaaatccagagaaactggaacagacttggggatttttatcaaatccatcattcatggaggcgctgcttttaaggatggtcgtctgcgaatgaatgaccagctgattgcagttaatggggaatctcttttgggaaagtccaaccacgaagctatggaaacacttaggcggtcaatgtccatggagggaaacatccgagggatgatccagttggtgattctgaggaggccagagagaccaatggaggatcctgcagagtgtggggcattttccaagccatgctttgagaactgtcaaaatgctgtaaccacctctaggcgaaatgataatagtatcctgcatccacttggcacttgcagtccacaagacaaacagaaaggtctattgctgcccaatgacggatgggccgagagtgaagttccaccttctccaacaccacattctgctctgggattgggcctcgaagattacagccacagctctggggtggattcagcagtatattttccagatcagcacatcaacttcagatctgtgacaccggccaggcagcctgaatcaattaatttgaaagcctcgaagagcatggaccttgtgccagatgaaagcaaggttcactcattggctggacaaaaatcggacggtctgtctgataagagctctcactctggccaaggagctctgaattgtgagtctgcccctcaggggaattcggagctagaggacatggaaaataaagccaggaaagtcaaaaaaacgaaagagaaggagaagaaaaaggaaaagggcaaattgaaagtcaaggagaaaaagcgcaaagaggagaatgaagatccagaaaggaaaataaagaagaagggcttcggcgccatgctgagatttggaaagaagaaagaggataagggtggaaaggctgagcagaaaggtactctgaaacatggtggcctgagagaagaagagctggagaaaatgaaagaagagcgtgaaaggattggagcaaaacatcaggagctaagggaaaagcaggcaagaggtcttcttgattatgctactggtgcaattggatcagtgtatgatatggatgatgatgaaatggaccccaattatgccagagtgaaccactttcgggaaccatgcacatcagcaaatgtctttagatctccatctccccctcgagctggaccatttggttaccctcgggatggccatccactgtctccagaaagagaccacttagagggtctctatgccaaggtcaacaagccataccatccactggttccagctgacagtggccgtcctacgggtggaagcactgaccgtatccagaagttgcggaaagagtattatcaggctcggagggaaggtttccctttatatgaagacgacgaaggaagagcaaggccatctgagtatgacctactctgggtgcctggaaggggtccagatgggaatgcacacaacctccgctttgaagggatggagaggcagtacgcatccttacccaggggaggacccgcagatcctgtagactatctgccagcagcacctcgggggctctacaaggaaagggagcttccctattatccaggggctcatcctatgcaccctcccaaagggagctatccccgccccacagagctcagggtggcagatctccggtatcctcagcactacccacccccgccagctccccagcacaaaggaccctttcgacaagacgttccgccttcccctccccagcaccaaagaatgccagcctatcaggaaacaggcagaccagggccccgtgggggcagcccagaccagtacccttaccgaacccaggattcccggcagaagaaccccatgactgcagccgtatag

SEQ ID NO: 8890 - protein, 1103 aa, Homo sapiens
MKVTVCFGRTGIVVPCKEGQLRVGELTQQALQRYLKTREKELIAVFEEQEPLHKIESPSGNPADRQSPDAFETEVAAQLAAFKPIGGEIEVTPSALKLGTPLLVRRSSDPVPGPPADTQPSASHPGGQSLKLVVPDSTQNLEDREVLNGVQTELLTSPRTKDTLSDMTRTVEISGEGGPLGIHVVPFFSSLSGRILGLFIRGIEDNSRSKREGLFHENECIVKINNVDLVDKTFAQAQDVFRQAMKSPSVLLHVLPPQNREQYEKSVIGSLNIFGNNDGVLKTKVPPPVHGKSGLKTANLTGTDSPETDASASLQQNKSPRVPRLGGKPSSPSLSPLMGFGSNKNAKKIKIDLKKGPEGLGFTVVTRDSSIHGPGPIFVKNILPKGAAIKDGRLQSGDRILEVNGRDVTGRTQEELVAMLRSTKQGETASLVIARQEGHFLPRELKGEPDCCALSLETSEQLTFEIPLNDSGSAGLGVSLKGNKSRETGTDLGIFIKSIIHGGAAFKDGRLRMNDQLIAVNGESLLGKSNHEAMETLRRSMSMEGNIRGMIQLVILRRPERPMEDPAECGAFSKPCFENCQNAVTTSRRNDNSILHPLGTCSPQDKQKGLLLPNDGWAESEVPPSPTPHSALGLGLEDYSHSSGVDSAVYFPDQHINFRSVTPARQPESINLKASKSMDLVPDESKVHSLAGQKSDGLSDKSSHSGQGALNCESAPQGNSELEDMENKARKVKKTKEKEKKKEKGKLKVKEKKRKEENEDPERKIKKKGFGAMLRFGKKKEDKGGKAEQKGTLKHGGLREEELEKMKEERERIGAKHQELREKQARGLLDYATGAIGSVYDMDDDEMDPNYARVNHFREPCTSANVFRSPSPPRAGPFGYPRDGHPLSPERDHLEGLYAKVNKPYHPLVPADSGRPTGGSTDRIQKLRKEYYQARREGFPLYEDDEGRARPSEYDLLWVPGRGPDGNAHNLRFEGMERQYASLPRGGPADPVDYLPAAPRGLYKERELPYYPGAHPMHPPKGSYPRPTELRVADLRYPQHYPPPPAPQHKGPFRQDVPPSPPQHQRMPAYQETGRPGPRGGSPDQYPYRTQDSRQKNPMTAAV

SEQ ID NO: 8891 - DNA, 261 bp, Homo sapiens
tccccaaaacgccacatgtcatcaccatacttttctctgttgaatattgttttcctttcttctgccttaggatggtcgtctgcgaatgaatgaccagctgattgcagttaatggggaatctcttttgggaaagtccaaccacgaagctatggaaacacttaggcggtcaatgtccatggagggaaacatccgagggatgatccagttggtgattctgaggaggccagagagaccaatggaggatcctgcagagtgtggggc

SEQ ID NO: 8892 - protein, 57 aa, Homo sapiens
MNDQLIAVNGESLLGKSNHEAMETLRRSMSMEGNIRGMIQLVILRRPERPMEDPAEC

SEQ ID NO: 8893 - DNA, 3796 bp, Homo sapiens
gggcttggcttggagggggcaagggagggaaagagagaagggggaaacacaaaaaacttctttctttctccctccgtttatcttcagcccgacattgtcacctcctctttgaggggttagaagaagctgagatctcccgacagagctggaaatgcattgcactttgactatggaaacagaggctattgatggctatataacgtgtgacaatgagctttcacccgaaagggagcactccaatatggcaattgacctcacctcaagcacacccaatggacagcatgcctcaccaagtcacatgacaagcacaaattcagtaaagctagaaatgcagagtgatgaagagtgtgacaggaaacccctgagccgtgaagatgagatcaggggccatgatgagggtagcagcctagaagaacccctaattgagagcagcgaggtggctgacaacaggaaagtccaggagcttcaaggcgagggaggaatccggcttccgaatggtaaactgaaatgtgacgtctgtggcatggtttgcattgggcccaatgtgcttatggtacataaaaggagtcacactggtgaacgccccttccactgtaaccagtgtggagcttcttttactcagaagggcaaccttctgagacacataaagttacactctggagagaagccgttcaaatgtcctttctgtagctacgcctgtagaagaagggacgccctcacaggacacctcaggacccattctgtgggtaaacctcacaagtgcaactactgtggacgaagctacaagcagcgcagttcactggaggagcacaaggaacgctgccacaactatctccagaatgtcagcatggaggctgctgggcaggtcatgagtcaccatgtacctcctatggaagattgtaaggaacaagagcctattatggacaacaatatttctctggtgccttttgagagacctgctgtcatagagaagctcacggggaatatgggaaaacgtaaaagctccactccacaaaagtttgtgggggaaaagctcatgcgattcagctacccagatattcactttgatatgaacttaacatatgagaaggaggctgagctgatgcagtctcatatgatggaccaagccatcaacaatgcaatcacctaccttggagctgaggcccttcaccctctgatgcagcacccgccaagcacaatcgctgaagtggccccagttataagctcagcttattctcaggtctatcatccaaataggatagaaagacccattagcagggaaactgctgatagtcatgaaaacaacatggatggccccatctctctcatcagaccaaagagtcgaccccaggaaagagaggcctctcccagcaatagctgcctggattccactgactcagaaagcagccatgatgaccaccagtcctaccaaggacaccctgccttaaatcccaagaggaaacaaagcccagcttacatgaaggaggatgtcaaagctttggatactaccaaggctcctaagggctctctgaaggacatctacaaggtcttcaatggagaaggagaacagattagggccttcaagtgtgagcactgccgagtccttttcctagaccatgtcatgtacaccattcacatgggttgccatggctaccgggacccactggaatgcaacatctgtggctacagaagccaggaccgttatgagttttcatcacacattgttcgaggggagcacacattccactaggccttttcattccaaaggggacccctatgaagtaaagaactgcacatgaagaaatactgcacttacaatcccacctttcctcaaatgttgacataccttttattttttttaatattattactgttgataattcttattttgtggaggcagtgtcatttgctctgcctaattacgataaggaagaaacagaagagagaaggggcgggaatattgtttctttatcacctggcttgtttattttgtgggaatttaagagcagtccatttctaccaaggcatatcatgctttgaaaaatcacttgattcataaagattcacctaagagattctgatttgccactgatattcagaattatgatggaagacaggaaagttcagagttttctgggtaggactttggtggtttaaaaatggtataagtaactttattcttgaaagaagaatgtgtttcaaactgtaaaccaattttttgttcttcagagatcatggaacacaaacacattgttattttcagtgataactcctaagaggagctgagttgttgtgggttctatgtttacttcccctatggaatttataattcagtatgttttacactgtaccatatagcaaaacttttaaactacaggtagttaagggccacctacaatacatctgaggtcctgtgatcttatttttctaaacgtaagcactgtttttccatagttttgatgactggcattttatagacaccctggcagccttacttttaacacctttaaggaatagtatttttatgtagttttcagaataacatatggtctaagagtggataaaaggcagtcaataatttctgggagggacttctactttcataaatttgtttgagaggttttcttttaaagttgtaatgtgatggcagcatagtatatgtatttgtttctaaaagtatgcttacgattgtcactttatcagcatttaatcagtgttaaccagtcagcagaaaaatataattatgctaacagtagggggagaaaacccacttagaaatcccttttctggtatttctcttttcactagtttttttcaagatgtgacctcccggtgttctgtccatagttcattcatcctttactcttcgagtagaaggtcttaaaagtcttcctgtcggctgtttctttcaaaatctcctcagagcaattgctaatttggcctgaatctggtaacttgaaccctgtaaggttacagaactagggctatttattttagcatttcttcagtagtatttactactcttgttgcaaagaaaagggaatgggacttctttgtaacctgtaccttggacaacagataaaagaaacaaaaaaataagaaagtttacttttacccttcttggagtctagaatgtgacagaacccccaaaggaaagtcctgcacatttttctgtttccaaaacatttaattgtgtaagtccttgtcagaaatgaatctcaatcccttagtatagaattccccttacatggtataggttgccatatttcatgtgcagattttaatttcatttatgtgggcgctctgttttttctttgcagtccagccacattagaggggaggaaccgagtgatattgattcaagtcattttagggggacatacttggaaggcagaacttgctgcttctgtttggggaggacagacctgactgtgactggattatctgataaccatttgtgaatactgaaattctgttaggcagtaactgataactgctctaaaggatcattaaataggatgctgaaattatgtatcttaatacagtgtggtatgagaattaccaagtcaagagaattgtggacataagcaagtttggccccaatactgctcttaactcattttccagcttactatttgctatttaaatggtaggcaccagctaagcacttctaagcactaacacagctagaactaggcaaaaatggttagaactcagctctcttctactagtccctgtcataattatttttgggaaaatgtccaaactgccccctttaaatctaagggaatgcacc

SEQ ID NO: 8894 - protein, 532 aa, Homo sapiens
MHCTLTMETEAIDGYITCDNELSPEREHSNMAIDLTSSTPNGQHASPSHMTSTNSVKLEMQSDEECDRKPLSREDEIRGHDEGSSLEEPLIESSEVADNRKVQELQGEGGIRLPNGKLKCDVCGMVCIGPNVLMVHKRSHTGERPFHCNQCGASFTQKGNLLRHIKLHSGEKPFKCPFCSYACRRRDALTGHLRTHSVGKPHKCNYCGRSYKQRSSLEEHKERCHNYLQNVSMEAAGQVMSHHVPPMEDCKEQEPIMDNNISLVPFERPAVIEKLTGNMGKRKSSTPQKFVGEKLMRFSYPDIHFDMNLTYEKEAELMQSHMMDQAINNAITYLGAEALHPLMQHPPSTIAEVAPVISSAYSQVYHPNRIERPISRETADSHENNMDGPISLIRPKSRPQEREASPSNSCLDSTDSESSHDDHQSYQGHPALNPKRKQSPAYMKEDVKALDTTKAPKGSLKDIYKVFNGEGEQIRAFKCEHCRVLFLDHVMYTIHMGCHGYRDPLECNICGYRSQDRYEFSSHIVRGEHTFH

SEQ ID NO: 8895 - DNA, 2006 bp, Homo sapiens
aaccctgctcctcgctgaagatggaggaagtaaaaacaggattacccttagctacagatccactgccttagtttccaccaccaactgcagtgcacaaacacacgttaggcacaggaaagaaagaaagacagaggacacattaacagtaaacacaaacaaaagggtgatgggattattttactgcatgcactgctgagcccgacattgtcacctcctctttgaggggttagaagaagctgagatctcccgacagagctggaaatggtgatgaatcttttttaatcaaaggacaatttcttttcattgcactttgactatggaaacagaggctattgatggctatataacgtgtgacaatgagctttcacccgaaagggagcactccaatatggcaattgacctcacctcaagcacacccaatggacagcatgcctcaccaagtcacatgacaagcacaaattcagtaaagctagaaatgcagagtgatgaagagtgtgacaggaaacccctgagccgtgaagatgagatcaggggccatgatgagggtagcagcctagaagaacccctaattgagagcagcgaggtggctgacaacaggaaagtccaggagcttcaaggcgagggaggaatccggcttccgaatggtgaacgccccttccactgtaaccagtgtggagcttcttttactcagaagggcaaccttctgagacacataaagttacactctggagagaagccgttcaaatgtcctttctgtagctacgcctgtagaagaagggacgccctcacaggacacctcaggacccattctgtgggtaaacctcacaagtgcaactactgtggacgaagctacaagcagcgcagttcactggaggagcacaaggaacgctgccacaactatctccagaatgtcagcatggaggctgctgggcaggtcatgagtcaccatgtacctcctatggaagattgtaaggaacaagagcctattatggacaacaatatttctctggtgccttttgagagacctgctgtcatagagaagctcacggggaatatgggaaaacgtaaaagctccactccacaaaagtttgtgggggaaaagctcatgcgattcagctacccagatattcactttgatatgaacttaacatatgagaaggaggctgagctgatgcagtctcatatgatggaccaagccatcaacaatgcaatcacctaccttggagctgaggcccttcaccctctgatgcagcacccgccaagcacaatcgctgaagtggccccagttataagctcagcttattctcaggtctatcatccaaataggatagaaagacccattagcagggaaactgctgatagtcatgaaaacaacatggatggccccatctctctcatcagaccaaagagtcgaccccaggaaagagaggcctctcccagcaatagctgcctggattccactgactcagaaagcagccatgatgaccaccagtcctaccaaggacaccctgccttaaatcccaagaggaaacaaagcccagcttacatgaaggaggatgtcaaagctttggatactaccaaggctcctaagggctctctgaaggacatctacaaggtcttcaatggagaaggagaacagattagggccttcaagtgtgagcactgccgagtccttttcctagaccatgtcatgtacaccattcacatgggttgccatggctaccgggacccactggaatgcaacatctgtggctacagaagccaggaccgttatgagttttcatcacacattgttcgaggggagcacacattccactaggccttttcattccaaaggggacccctatgaagtaaagaactgcacatgaagaaatactgcacttacaatcccacctttcctcaaatgttgacataccttttattttttttaatattattactgttgataattcttattttgtggaggcagtgtcatttgctctgcctaattacgataaggaagaaac

SEQ ID NO: 8896 - protein, 500 aa, Homo sapiens
METEAIDGYITCDNELSPEREHSNMAIDLTSSTPNGQHASPSHMTSTNSVKLEMQSDEECDRKPLSREDEIRGHDEGSSLEEPLIESSEVADNRKVQELQGEGGIRLPNGERPFHCNQCGASFTQKGNLLRHIKLHSGEKPFKCPFCSYACRRRDALTGHLRTHSVGKPHKCNYCGRSYKQRSSLEEHKERCHNYLQNVSMEAAGQVMSHHVPPMEDCKEQEPIMDNNISLVPFERPAVIEKLTGNMGKRKSSTPQKFVGEKLMRFSYPDIHFDMNLTYEKEAELMQSHMMDQAINNAITYLGAEALHPLMQHPPSTIAEVAPVISSAYSQVYHPNRIERPISRETADSHENNMDGPISLIRPKSRPQEREASPSNSCLDSTDSESSHDDHQSYQGHPALNPKRKQSPAYMKEDVKALDTTKAPKGSLKDIYKVFNGEGEQIRAFKCEHCRVLFLDHVMYTIHMGCHGYRDPLECNICGYRSQDRYEFSSHIVRGEHTFH

SEQ ID NO: 8897 - DNA, 442 bp, Homo sapiens
gcactttgactatggaaacagaggctattgatggctatataacgtgtgacaatgagctttcacccgaaagggagcactccaatatggcaattgacctcacctcaagcacacccaatggacagcatgcctcaccaagtcacatgacaagcagtaagtcttcattttatgatttttttttgtgtgtgtgtgtctctccagcaacagactttaatttgttaggtctgtggggtcctctcacattgtggtatagctactgttatagattttgctaaagaaagaacaacacagatttattcctgttcattctagtattataaaacatgagcctgcttactagtctgaactatcccaaggtggcatttgggagctggtgcttacctgtatcaggtaagaaaggttagaatttgctggttgttgttttgacttgccaggtttatgactg

SEQ ID NO: 8898 - protein, 86 aa, Homo sapiens
METEAIDGYITCDNELSPEREHSNMAIDLTSSTPNGQHASPSHMTSSKSSFYDFFLCVCVSPATDFNLLGLWGPLTLWYSYCYRFC

SEQ ID NO: 8899 - DNA, 460 bp, Homo sapiens
aaaaccgataacttcttttatttttgtcaggtgatgttgttcttgtctttgaagtagtgttctctttttaagcgggatatggaacaatggtctcacttactcctgttgacctagattggcaccagtgtttgtgagaagcttcaactctttataaaccaaaattctttcacagtaaagcaaagtctaatcacttgcttaacaatcctgttaagccgcaagtctttggaaatattgccttcagaggtcattcttgatgtgagggggacactgcaggctgtcaggcctggtaccattaggcagtctatcgtacacaaaactctttgatcagttctaagcccaacattagcgactttctgatattttcactctccatgtgattttcctgcttctgtaattgtgcatgcataaagtatgcctgaaggctttggaaagagagattctgcaaactgaatactaattt

SEQ ID NO: 8900 - protein, 69 aa, Homo sapiens
IGTSVCEKLQLFINQNSFTVKQSLITCLTILLSRKSLEILPSEVILDVRGTLQAVRPGTIRQSIVHKTL

SEQ ID NO: 8901 - DNA, 576 bp, Homo sapiens
ggaaatattgccttcagaggtcattcttgatgtgagggggacactgcaggctgtcaggcctggtaccattaggcagtctatcgtacacaaaactctttgatcagttctaagcccaacattagcgactttctgatattttcactctccatgtgattttcctgactgttttactctgattgggtgacttcattgctcttgtccttgtttcttcctatgtgaaatgaagggataataccagagaatgatcaaagagtcaggctgcttctgtaattgtgcatgcataaagtatgcctgaaggctttggaaagagagattctgcaaactgaatactaattttgtgaatactgtaatttcatgtctgccatccatgttcaagccggttgtggcttgaggagcagctgaggctttatggaaaactttgtaaaacattctatttagaagcaattcttgttctttgcattatgtgctctgggtatttttcttcctttgtgttttattttgagcgcatttgtatgaaaacaagatctttgtttcttacaagcacatctgctcttgctgcttatagattaggagaag

SEQ ID NO: 8902 - protein, 37 aa, Homo sapiens
MCSGYFSSFVFYFERICMKTRSLFLTSTSALAAYRLG

SEQ ID NO: 8903 - DNA, 1727 bp, Homo sapiens
attgcaccttcctacccaagcagcttggttttctttcgctttgaccctgtaatttctttcccacttcgttgtcgtctctgaattacctttctcttgattcttgcccattagcatcctccaatttcagatgtttgtagatccccaagtgttcccagggaaaactactagaaaaggtcaagctgatgcaagagatggtttcccatggtcttgggcagctccacccctgtggctttgcagggtacaatctccctcctggctgctttcatgggctggcattgagtgtctgcagcttttccaggtgcacagtgcaagctatcggtggatctacctttctggggcctgtgatgagaagggctgccgtgaagacctctcacatgccctggaggcatttttcctattgtcttggggattaacattcggttacttgttacttacgcaaatttctgcaactggcttgaatttctcgtcagaaaatgggatttttcttttctatcacattgtcaggctgcaaattttccgaacatttatgctctgcttcccttataaaactgaatgcctttaacagcacccaagtcacctcttgaatgctttgctgcttagaaatttcttctgccagataccctaaattatctctctcaagttcaaagttcgacaaatctctagggcaggggcaaaatgccactaatctctttattaaaacataacaagagccacctttgctccagttcccaacaaggtcctcatctccatctgagattacctcagcctggatttcattgtccatattgctatcagcattttgggcaaagccattcaacaagtctctaggaagttccaaactctccgacattttcctgtcttctgagccctccaagctgttccaacctctgcctattacaaagttccaaagttgctttcacatttttggctgtcttttcagcaacaccccactcctggaaccaatttactgtattagtctgttttcatgctgctaataaaaacatacctgagactgggcaatttacaaaataaagaggtttaattggactcacagttccacgtggctgaggaggcctcagaatcatggtggaaggcaaggaggagcaagtcacatcttatatcaatgtcagcaggcaaagagagcttgtgcagggaactcctgttttgaaaaccatcagatcttgtgtgacttattcactaccacaagaacagtatgggggaaaccacccccatgatttaattttctcccacagaatttttccctcaacatgtgagaattatgggagtacaattcaagatgatatttgggtgggacacagccaaaccatatcaatcatcaaacaagaaaagagggaaactttcacaaccaagagatccctaaagaggtatgctgactgaatgtaatgtgggatcctagggcaaaaagaatattatgtaaaaacgaaggatatctgaataaagtatggactttatttagttaataataatgtgtcaataatggttcattagatgtaacaaatgcaccatattgatgtaagatgttcaaagtagggaaaactgaatatgagtatatgggaactttctttatctttgcaacttcttggtacatctaaaactattctgaaataaaaaaatttttaaagagttgcttgaacctttattctaacatttccttaaacaagcctcaccattgacctttcttttaaaacaataaattccttttgctt

SEQ ID NO: 8904 - protein, 144 aa, Homo sapiens
MFVDPQVFPGKTTRKGQADARDGFPWSWAAPPLWLCRVQSPSWLLSWAGIECLQLFQVHSASYRWIYLSGACDEKGCREDLSHALEAFFLLSWGLTFGYLLLTQISATGLNFSSENGIFLFYHIVRLQIFRTFMLCFPYKTECL

SEQ ID NO: 8905 - DNA, 2362 bp, Homo sapiens
gccggaatctcgcgagagctcccgggggccgttgggtagcgtcttcgctgttgcccttagggacggctgtgggcctgctgggggtgggggcccgaagcgccagagatggctgctcagcgagggatgcccagctccgccgtgagggtcctggaagaggcgttgggcatgggtttgacggcagccggggacgcgagggacacggcggacgcggtggcggctgagggcgcctactacctggaaccttatctatatccagtgcccttgctactgaatgattaaaacttgacaagatattcagaggtcaccataactgaagcatctgaagatgactatgaatatgaagagataaaagcagttgcccacaaactaatcctgaatttattagaagtgacgtttattgacatttacaaggaagtcagaagaaagcagttattcatttttcatggatcttcagaatgacatgataccagatgacaattttagcatcccagaaggtgaagaagatctggcaaaagcaattcagatggcccaagaacaggctacagatactgaaattttggaacggaaaacagttcttccttcaaagcatgcagtacctgaagtaatagaagactttctctgcaatttcttgatcaaaatgggaatgaccagaactcttgattgctttcagtctgaatggtatgagttaatacagaaaggagtgactgaacttagaactgttgggaatgttccagatgtctacacccagattatgcttttggaaaatgagaacaaaaatttaaagaaagatttgaagcactacaaacaagcagctgacaaagctagagaagatttgctgaaaattcagaaagaacgtgattttcatcgaatgcatcataagcgaatagtccaggaaaaaaacaaattaattaatgacctcaaagggttgaagttacattatgcatcttatgaaccgactataagggtgttacatgagaaacaccacactttactgaaggagaaaatgctgacctccttggaaagagacaaagtagttgggcagatttctggacttcaagaaacattgaagaaactgcaaagaggacatagttaccatggtcctcaaattaaagttgatcatagtcgtgaaaaagaaaatgcaccagaaggtcctactcagaaaggtcttcgtgaagccagggaacaaaacaaatgtaaaacaaagatgaaaggcaatacaaaggattcagaatttcccatagatatgcaaccaaatccaaacctgaatgtttctaaagaaagtctttctccagcaaaatttgactacaagctgaaaaacatttttagactccatgaacttccagtgagctgtgtctccatgcaaccccacaaagacatcctagtctcctgtggcgaggaccgactctggaaggtgttgggccttccaaaatgcaatgtgcttctcacgggatttggccacactgactggctttcagactgctgcttccatcccagtggcgacaaattggctacttcaagtggtgacactacagttaaattatgggatctatgtaaaggcgattgcattttgacctttgaaggacacagccgcgcagtgtggtcctgcacatggcactcctgcggcaattttgtggcttcctcctcactggataaaactagcaaaatttgggatgttaatagtgaaagatgcagatgtactttgtatggacatacagattctgtgaacagcattgagttttttcctttctccaatactcttctcacaagctctgcagacaagaccctgtctatatgggatgcaagaacaggtatatgtgagcagtcactttatggtcacatgcattctatcaatgatgccatttttgatcccaggggtcacatgatagcatcctgtgatgcctgtggggttacaaagctgtgggactttcggaagctgttaccaattgtgtccatcgatataggtccaagtcctggcaatgaggtgaattttgattcatcaggtcgagttttagctcaggcaagtggcaatggtgttatccatttgctagatcttaaatctggggagattcacaaattgatgggccacgaaaacgaggcacacacggttgtgttttctcacgacggggagattctcttttctggaggctctgacggcacagttcgaacgtggtcttgaccgtcagcacatcccgctgcagagggcattccctttaaggcttgaaaatgcctcctgtagtcccaaaccagcaaagaactggttaaatgtgccagcaggtaacatttacagtctgctttaaaacatgctttggacatatattttagtgctcatactgttactaataaaaaaataactttatgctca

SEQ ID NO: 8906 - protein, 577 aa, Homo sapiens
MDLQNDMIPDDNFSIPEGEEDLAKAIQMAQEQATDTEILERKTVLPSKHAVPEVIEDFLCNFLIKMGMTRTLDCFQSEWYELIQKGVTELRTVGNVPDVYTQIMLLENENKNLKKDLKHYKQAADKAREDLLKIQKERDFHRMHHKRIVQEKNKLINDLKGLKLHYASYEPTIRVLHEKHHTLLKEKMLTSLERDKVVGQISGLQETLKKLQRGHSYHGPQIKVDHSREKENAPEGPTQKGLREAREQNKCKTKMKGNTKDSEFPIDMQPNPNLNVSKESLSPAKFDYKLKNIFRLHELPVSCVSMQPHKDILVSCGEDRLWKVLGLPKCNVLLTGFGHTDWLSDCCFHPSGDKLATSSGDTTVKLWDLCKGDCILTFEGHSRAVWSCTWHSCGNFVASSSLDKTSKIWDVNSERCRCTLYGHTDSVNSIEFFPFSNTLLTSSADKTLSIWDARTGICEQSLYGHMHSINDAIFDPRGHMIASCDACGVTKLWDFRKLLPIVSIDIGPSPGNEVNFDSSGRVLAQASGNGVIHLLDLKSGEIHKLMGHENEAHTVVFSHDGEILFSGGSDGTVRTWS

SEQ ID NO: 8907 - DNA, 1256 bp, Homo sapiens
gagagctcccgggggccgttgggtagcgtcttcgctgttgcccttagggacggctgtgggcctgctgggggtgggggcccgaagcgccagagatggctgctcagcgagggatgcccagctccgccgtgagggtcctggaagaggcgttgggcatgggtttgacggcagccggggacgcgagggacacggcggacgcggtggcggctgagggcgcctactacctggaacaggtcaccataactgaagcatctgaagatgactatgaatatgaagagataccagatgacaattttagcatcccagaaggtgaagaagatctggcaaaagcaattcagatggcccaagaacaggctacagatactgaaattttggaacggaaaacagttcttccttcaaagcatgcagtacctgaagtaatagaagactttctctgcaatttcttgatcaaaatgggaatgaccagaactcttgattgctttcagtctgaatggtatgagttaatacagaaaggagtgactgaacttagaactgttgggaatgttccagatgtctacacccagattatgcttttggaaaatgagaacaaaaatttaaagaaagatttgaagcactacaaacaagcagctgagtatgttattttttaaatgacattttcttctttttcttttggactaaataaaagagttgagtgaagctgatatatgtaatataccagagccttaatttttgaaaactgaatttttctagttgtaaagaatgtgagaggcttcattagcaaattaattaaacagatgatcagaactatcacaattataacttaccaacaagaagggaatgcaggtagttgtttaggagatggtacattttttatataacattcacttccttgtgtatttgatagtcttttcatggtttataacattttctcctgtaaagataggctaatttctgaaataataattaaatttatagaaagccgagaggaaattgctagtttattcctggtagaggaatttctgtatttgaaaattctccagaaggaataatataaactgtggactttgggtgataatgatatgtaggttcgtcagttgttaacaaatgtatccctctgttgggggctattgataatggggaaggctgtgcatgtgtgggagtaggaggtgtatgggacatctctgtaccttctaatcaattttgctatgaacttaaaactgctctaaaaataaagtttattaaaaaaaagttaattctct

SEQ ID NO: 8908 - protein, 183 aa, Homo sapiens; identical to SEQ ID NO: 712

SEQ ID NO: 8909 - DNA, 689 bp, Homo sapiens
ccgggggccgttgggtagcgtcttcgctgttgcccttagggacggctgtgggcctgctgggggtgggggcccgaagcgccagagatggctgctcagcgagggatgcccagctccgccgtgagggtcctggaagaggcgttgggcatgggtttgacggcagccggggacgcgagggacacggcggacgcggtggcggctgagggcgcctactacctggaacaggtcaccataactgaagcatctgaagatgactatgaatatgaagagataccagatgacaattttagcatcccagaaggtgaagaagatctggcaaaagcaattcagatggcccaagaacaggctacagatactgaaattttggaacggaaaacagttcttccttcaaagcatgcagtacctgaagtaatagaagactttctctgcaatttcttgatcaaaatgggaatgaccagaactcttgattgctttcagtctgaatggtatgagttaatacagaaaggagtgactgaacttagaactgttgggaatgttccagatgtctacacccagattatgcttttggaaaatgagaacaaaaatttaaagaaagatttgaagcactacaaacaagcagctgagtatgttattttttaaatgacattttcttctttttcttttggactaaataaaagagttgagtgaagctg

SEQ ID NO: 8910 - protein, 183 aa, Homo sapiens; identical to SEQ ID NO: 712

SEQ ID NO: 8911 - DNA, 4059 bp, Homo sapiens
ccgggggccgttgggtagcgtcttcgctgttgcccttagggacggctgtgggcctgctgggggtgggggcccgaagcgccagagatggctgctcagcgagggatgcccagctccgccgtgagggtcctggaagaggcgttgggcatgggtttgacggcagccggggacgcgagggacacggcggacgcggtggcggctgagggcgcctactacctggaacaggtcaccataactgaagcatctgaagatgactatgaatatgaagagataccagatgacaattttagcatcccagaaggtgaagaagatctggcaaaagcaattcagatggcccaagaacaggctacagatactgaaattttggaacggaaaacagttcttccttcaaagcatgcagtacctgaagtaatagaagactttctctgcaatttcttgatcaaaatgggaatgaccagaactcttgattgctttcagtctgaatggtatgagttaatacagaaaggagtgactgaacttagaactgttgggaatgttccagatgtctacacccagattatgcttttggaaaatgagaacaaaaatttaaagaaagatttgaagcactacaaacaagcagctgacaaagctagagaagatttgctgaaaattcagaaagaacgtgattttcatcgaatgcatcataagcgaatagtccaggaaaaaaacaaattaattaatgacctcaaagggttgaagttacattatgcatcttatgaaccgactataagggtgttacatgagaaacaccacactttactgaaggagaaaatgctgacctccttggaaagagacaaagtagttgggcagatttctggacttcaagaaacattgaagaaactgcaaagaggacatagttaccatggtcctcaaattaaagttgatcatagtcgtgaaaaagaaaatgcaccagaaggtcctactcagaaaggtcttcgtgaagccagggaacaaaacaaatgtaaaacaaagatgaaaggcaatacaaagcagtggacagggaactctcaaacttggaataagaccgtacctctgcaggacactattggcaggagacaagagaacaacagtgcacaccagcacatcgactaagactgcccatcttcaggacatttgtcagcaggagccaaatgggaaattctgagcaacaggtgttcctggcttgttctcctccaatcctccctttcgtcaacacccataccctttatctgtgttctttacagtcttcataaaaggagtccaggacttccagttaatcatttatcccagaactctaatcctccgtaaggatcctttttttttgacccaatatttccctcttctgactccccaaaccctttctttgtactctattgaattcaaggtcagtcaacaaaaaagtcctttatattttaatattttactatgagtgttcccttcaccttctgtgctaatgaaaatctagattttccttcatgatagtttcccctgcatccattgaggttctggtaaatgttttaacaatcaactctttggaagaagaaaacaaaagccttgatttgtatagtgttttccagtttctgtgctgttaaacactcacaccatagccatttaagctatcttctcacttcactgaataaggagcctgggacttgatgtccacactcagctctcctaagccagtatgagagagcaacaacacatcacatcttacagtacctttaagggtaactgttctctctactccactcaaatgtagcataggtcctgaaagtcagataagtgtcccctttgcttctcattgctgctttcagtttgttctccctccttcatgaacatacccttccgtgaatctcatgtcatcagatttgcccactcattgtacctttttgttatgggcacctcttctcacctcatctttttgtcaattaaaaaaattaatccccgtgatattgtcactttcttaaaagtgattcctccataatgcttcatgattgaaatgttgatatggatgatccttctaactctctgaagtttcagttccttgacagcctctcctccagtgatccacttaactcactttcatagtcatttcctaggccttgttattgcaagtaactgctataatttttcattgcctctattgtttgctccctaccccccgaatctctgcatactgaggtgtttcaaggctcagttcttgaccctctgttggttgtcttcactccctaggtgatctcatccagtcttatggctttaaattctgcctatatattaattatcccttaatttacatcttcaactgagatctcttctctgaactctagtttcatatatccaactgcttactgaacacctccagttaaatgtcatttcttcatttcaattatctccccttccatgttctccttcttaattaatggaaactccacactttagttacttagccaaaaaactctagagtcatccctgagacgtctctctctctcacatctcacatctgataagaaaaagaaattattttggctctatctttgaaaaaatatctacattttcattttttcttaccactagcacttttgctctctgtttttttttttttgccaccgtctgtagtttgtattattgcaaaagcctcctaactgatctctgcttttgtctttacttttcttcagtctcttttgaacacagcagccacagtcatcttcttaaaacataagtctgtccatgacatttctctgctgaaaattttccagtaacctcccatcttactgagttacaggtaaggtcattataacctctgaggccctacattacctagatcccttttacctctctgacattatctcctgctaccctcccatcttttgctcaattgcaggcacactagcctcctacaaattctacttatttatagaacactgtaggtatgccccaccttgaggctcttgcacttgagtttttatcttctgtctgtgttattttccttcagataattcagatggctcatctctcactttatttaaagctttactcaaatgttcccttttcagagagacttttcatagccatccaatctaaattttaatgctgcctctaattcactggcacttctttggcctctatcctactttaatttttctttttgcctatcttacatatctctcatatgctatgttgtacttattaactcattgtatcacttcccactagaatgtaagtcccatgaaagcaggaatatttattaattgtattcactgctatattctcagtgccagaaaaatgcctggcaaatagtaattatcccataaatatgtaaatttgaaggaatgcataaattaaaaaatgtgttttgttagttgctattgtatagatatgcattgattactacaagttgatcagaaatagagtgtttctgctaaaccccctgtttctataatttgtctataggctttttgggaattttctttgtaagtagtatcatctgtgaaaaataatagttgtgactttcatttttcaattctaaaaatttttatttgtatttcttatatttgtgctttgtctaggtcctccagaaagttaaatagaagtggttaaatagtggtggttatactatttgtgattttaaaggtgatgcatctgatgtttcaacacaaggaatgatatttattgtctttggtggttattctttatcaagttgaaaaaatttgttttcctttgatatttaaagtttgtgttttaccatgagtatattaatttttttgaccataagtgattggtaattttatcatgtttaagttttaagattttattttatcatgaataagtattgtattttctgcttctgagactgttttctccattaatattttaatgtggtaaatgttgccatggattttaaaatgtaaacattctctttcattcctggaataaaactaatgtattcatcatgtgttatttgagttacataacactggacctagttaatcattttttcataggatgcttacttctagtttatgaataaaattgatctttaatttt

SEQ ID NO: 8912 - protein, 347 aa, Homo sapiens
MAAQRGMPSSAVRVLEEALGMGLTAAGDARDTADAVAAEGAYYLEQVTITEASEDDYEYEEIPDDNFSIPEGEEDLAKAIQMAQEQATDTEILERKTVLPSKHAVPEVIEDFLCNFLIKMGMTRTLDCFQSEWYELIQKGVTELRTVGNVPDVYTQIMLLENENKNLKKDLKHYKQAADKAREDLLKIQKERDFHRMHHKRIVQEKNKLINDLKGLKLHYASYEPTIRVLHEKHHTLLKEKMLTSLERDKVVGQISGLQETLKKLQRGHSYHGPQIKVDHSREKENAPEGPTQKGLREAREQNKCKTKMKGNTKQWTGNSQTWNKTVPLQDTIGRRQENNSAHQHID

SEQ ID NO: 8913 - DNA, 2166 bp, Homo sapiens
ccgggggccgttgggtagcgtcttcgctgttgcccttagggacggctgtgggcctgctgggggtgggggcccgaagcgccagagatggctgctcagcgagggatgcccagctccgccgtgagggtcctggaagaggcgttgggcatgggtttgacggcagccggggacgcgagggacacggcggacgcggtggcggctgagggcgcctactacctggaacaggtcaccataactgaagcatctgaagatgactatgaatatgaagagataccagatgacaattttagcatcccagaaggtgaagaagatctggcaaaagcaattcagatggcccaagaacaggctacagatactgaaattttggaacggaaaacagttcttccttcaaagcatgcagtacctgaagtaatagaagactttctctgcaatttcttgatcaaaatgggaatgaccagaactcttgattgctttcagtctgaatggtatgagttaatacagaaaggagtgactgaacttagaactgttgggaatgttccagatgtctacacccagattatgcttttggaaaatgagaacaaaaatttaaagaaagatttgaagcactacaaacaagcagctgacaaagctagagaagatttgctgaaaattcagaaagaacgtgattttcatcgaatgcatcataagcgaatagtccaggaaaaaaacaaattaattaatgacctcaaagggttgaagttacattatgcatcttatgaaccgactataagggtgttacatgagaaacaccacactttactgaaggagaaaatgctgacctccttggaaagagacaaagtagttgggcagatttctggacttcaagaaacattgaagaaactgcaaagaggacatagttaccatggtcctcaaattaaagttgatcatagtcgtgaaaaagaaaatgcaccagaaggtcctactcagaaaggtcttcgtgaagccagggaacaaaacaaatgtaaaacaaagatgaaaggcaatacaaaggattcagaatttcccatagatatgcaaccaaatccaaacctgaatgtttctaaagaaagtctttctccagcaaaatttgactacaagctgaaaaacatttttagactccatgaacttccagtgagctgtgtctccatgcaaccccacaaagacatcctagtctcctgtggcgaggaccgactctggaaggtgttgggccttccaaaatgcaatgtgcttctcacgggatttggccacactgactggctttcagactgctgcttccatcccagtggcgacaaattggctacttcaagtggtgacactacagttaaattatgggatctatgtaaaggcgattgcattttgacctttgaaggacacagccgcgcagtgtggtcctgcacatggcactcctgcggcaattttgtggcttcctcctcactggataaaactagcaaaatttgggatgttaatagtgaaagatgcagatgtactttgtatggacatacagattctgtgaacagcattgagttttttcctttctccaatactcttctcacaagctctgcagacaagaccctgtctatatgggatgcaagaacaggtatatgtgagcagtcactttatggtcacatgcattctatcaatgatgccatttttgatcccaggggtcacatgatagcatcctgtgatgcctgtggggttacaaagctgtgggactttcggaagctgttaccaattgtgtccatcgatataggtccaagtcctggcaatgaggtgaattttgattcatcaggtcgagttttagctcaggcaagtggcaatggtgttatccatttgctagatcttaaatctggggagattcacaaattgatgggccacgaaaacgaggcacacacggttgtgttttctcacgacggggagattctcttttctggaggctctgacggcacagttcgaacgtggtcttgaccgtcagcacatcccgctgcagagggcattccctttaaggcttgaaaatgcctcctgtagtcccaaaccagcaaagaactggttaaatgtgccagcaggtaacatttacagtctgctttaaaacatgctttggacatatattttagtgctcatactgttactaataaaaaaataactttatgctca

SEQ ID NO: 8914 - protein, 631 aa, Homo sapiens; identical to SEQ ID NO: 714

SEQ ID NO: 8915 - DNA, 2363 bp, Homo sapiens
agcgtcttcgctgttgcccttagggacggctgtgggcctgctgggggtgggggcccgaagcgccagagatggctgctcagcgagggatgcccagctccgccgtgagggtcctggaagaggcgttgggcatgggtttgacggcagccggggacgcgagggacacggcggacgcggtggcggctgagggcgcctactacctggaacgtatccttcccgtggaggcgcggcccgctgcgctggcgggtaatgggtgttgggacgaaggcgagggcctcccactggcggcgccttttgagccttggggccactccggaggagcctctgttggacttcaagataccagatgacaattttagcatcccagaaggtgaagaagatctggcaaaagcaattcagatggcccaagaacaggctacagatactgaaattttggaacggaaaacagttcttccttcaaagcatgcagtacctgaagtaatagaagactttctctgcaatttcttgatcaaaatgggaatgaccagaactcttgattgctttcagtctgaatggtatgagttaatacagaaaggagtgactgaacttagaactgttgggaatgttccagatgtctacacccagattatgcttttggaaaatgagaacaaaaatttaaagaaagatttgaagcactacaaacaagcagctgacaaagctagagaagatttgctgaaaattcagaaagaacgtgattttcatcgaatgcatcataagcgaatagtccaggaaaaaaacaaattaattaatgacctcaaagggttgaagttacattatgcatcttatgaaccgactataagggtgttacatgagaaacaccacactttactgaaggagaaaatgctgacctccttggaaagagacaaagtagttgggcagatttctggacttcaagaaacattgaagaaactgcaaagaggacatagttaccatggtcctcaaattaaaggtaaatgtaaaatgtgatgaagctctcatttaatatagtttggtgatttctcaaccttatcagtgattaatattctagagatatttaaaggtgagtaagtggtggctatttcacaaattaaaattttaataaaaagattaagaagaaatatagatatcatactgtatggattaattatagagaaaaacaagtcaactataatggaaggacttctgcttctggtcattatacctggtaccagactagccttctctgtgtaaataactctaaagctaagctgtaagatcagacaactacttttaggcagtagaaaacagacagctcaagtaacagaaggcaattgacagaaggaaaatttataaggtgagctctgccatcaccatggctttgggtctgtggaaagttccaaactgagctttgtggagatggaagccaataagagcatgacaatcctgataattggaaatgtcagagaccctagttcacagcttttgaagccactggaatctgtagggaaagacaccagagaagagagctgcaatgaggagtggctcagtttgtgagggagtttactatgagtccttagctgaggctgcaatactatacataacaacactacctgacacttacaagagagatacaattatataggatcaagaggaggccagagattgtagaagttaagtagtgatgcgaaacattgcaaatctggccatgcctgggtggaaagacctctttcacaccttgttaacaacacagtaacattcagcatcccatatccgccttataaaaccaggaacaaagcttacacagcattcttagagaggacacagaatttggagtttgagtcttgccaagttatagggccttgagaaacatttagggctttccatggatccaccctaacgaagcataaaattaagcctaggattttagggtcatcagccaaaaatggaactgccttctagaacaaaaaatgacatccttttgaggaagacagtcatccagagtctttacaatcttttacccacattgcctagtacataattaaacatttctagatatgaataggaacaggaaaatgtgacccataatcaagacaacaagcaataaatggaaacctacccttaagtagctaaactgttgcatttagcagatagaaagtgctaaagtagatactttgattatgttcaaggacttaatggaaaatactaataagtgaacagatggggaatttaagcaaagaaatgagaacaagcatacattccaaagcaaaaaaaaaaaaaaaaaaagaagaaagataaaagattaaaggaaaacttgcctatttaacatatataaaattaaagtcccaaagaagagaatgaaaatggagcat

SEQ ID NO: 8916 - protein, 251 aa, Homo sapiens
MGVGTKARASHWRRLLSLGATPEEPLLDFKIPDDNFSIPEGEEDLAKAIQMAQEQATDTEILERKTVLPSKHAVPEVIEDFLCNFLIKMGMTRTLDCFQSEWYELIQKGVTELRTVGNVPDVYTQIMLLENENKNLKKDLKHYKQAADKAREDLLKIQKERDFHRMHHKRIVQEKNKLINDLKGLKLHYASYEPTIRVLHEKHHTLLKEKMLTSLERDKVVGQISGLQETLKKLQRGHSYHGPQIKGKCKM

SEQ ID NO: 8917 - DNA, 249 bp, Homo sapiens
gttaatcttcagtaatttgaattgtgctatgggctttcttccgtaagaccctgagccttaatggattgaattgtcactccttgtttttgcctcagatgttttcttgccttgaatattggtttatctttctttatctgttgtatttcctcatcgtctgtaacgttcaacctaatagtctccttaacatagccttcattcacatatctaaggcaagggaaatattcttctccattgtgtatcacttcacct

SEQ ID NO: 8918 - protein, 50 aa, Homo sapiens
MFSCLEYWFIFLYLLYFLIVCNVQPNSLLNIAFIHISKAREIFFSIVYHF

SEQ ID NO: 8919 - DNA, 759 bp, Homo sapiens
ctttatgaacttcctcacaatgcccctgccttctactctatcctcactgcctgatcactccctagtctattatgatatttttccttcatagcagtcatttatctgctttcctcaacaggttatgaataagattgccatttatttaaagtaggacttgaatagatatttgttacttaaatccaaagctatcataatgccaatctctttaacaggggcacagaaggcccttcctttccattctatctttaaacacattatcatttatcctatgccttaaacagaatcgtgtttatagtttgctgaatatgctatatgctctttcatttttcatgaggatttctgttttttttttttctttgcatgcacagaatttaaaaaaaatttaaaaaaaggaaaagtcacaaggtggattaggttgctagaccttaaaacactccatgatttctttgtcttagtcatttcctttttttaattgctaaattttctttccagattccctgcttttcttttagtaagagtttaactgtaccttatacaaatcagtaattattctcttaataactagttatactacagggttagatagttggctcattcattaacaaagttaaacattttattttaaaacaagttttattttgtaaatataaccatttagcaataacttaaatttaagtttaagccataaatggaaaaattactacaacggtaaagcaacatgtaagtcagtctcaagagtgtttaaattttatgcaatga

SEQ ID NO: 8920 - protein, 58 aa, Homo sapiens
FAEYAICSFIFHEDFCFFFFFACTEFKKNLKKGKVTRWIRLLDLKTLHDFFVLVISFF

SEQ ID NO: 8921 - DNA, 2181 bp, Homo sapiens
ccgggcaggcggcgggcggcgctcggagcgggctccgcggcttgcaaggcgcctgcgactcggtcccaggtcggcgggcggcgcacggcgggctcgcgcgggggccccggcgcgccgggcggcgcagtacgcagcgcgcggacccacgccacggccaggagcccagagcagcgcggccacactgcccaggggtcggccctcggccccggcgctcggagcgcggcggctgcctgggctttaatggctgctccgcggagcagcgcctagggctggaaggcggctgcggctcaggaagtcacccgagcaagcctccttcggggccggccgcacccgccgcggcgcgctccatgggggcgcgctccccccgggcggcccgctgacccgggacgccggggcccgctcgctcgccggccgcgcgtcccggccatgaactgagcccgcgggccagccccgcgcctgctccgcccgcgcctttcttctcgcgcctcctccgcccgccgccggcgggcccggctccccgggggctgcggcgccccgggctcggcggcccgcgggccccggggcgcggggcggcggcggcggggggcgcgcggctccgggcgcggcgcctgcaccatgaactaccagcagcagctggccaactcggctgccatccgggccgagatccagcgcttcgagtcggtccaccccaacatctactccatctacgagctgctggagcgcgtggaggagccggtgctgcagaaccagatccgggagcacgtcatcgccatcgaagatgccttcgtgaacagccaggaatggacgctgagtcgatctgtcccggagctcaaagtgggaattgtgggtaacttggccagcggcaagtctgccctggtgcaccggtacctgacgggcacatatgtccaggaggagtctccggaaggtggcaggttcaagaaagagattgtcgttgatggacagagctatctgctgctgatcagagatgaagggggccccccggaggcgcagtttgccatgtgggtggacgctgttatatttgtcttcagcttggaggatgaaataagtttccagaccgtttaccactactacagtcgaatggccaactatcggaacacgagcgagattcctctggttctggtgggaacccaggatgccataagttctgctaacccgagggtcatcgatgacgccagggcgaggaagctctccaacgacctgaaacggtgcacgtactacgagacgtgtgctacatacgggctgaatgtggagagggtcttccaggacgttgcccagaagattgttgccacaaggaagaagcagcagctgtccataggaccctgcaagtcgctacctaattctcccagccattcctccgtctgttccgcgcaggtgtctgccgtgcacatcagccagacaagtaatggaggtgggagtttaagcgactattcctcctccgttccatcgactcccagcaccagccagaaggaacttcggatcgatgttcctcccactgccaacacgcccacgcccgttcgcaagcagtctaagcgccggtccaacctgttcacctctcggaaagggagcgacccagacaaagagaagaaaggcctggagagtcgtgcggacagcattgggagcggccgagccatcccaattaaacagggcctgcccttctttgtccttgcactgacagccagcacttatctcaggcctgctggagcccgtgcccgtcagtcctccccctggccagggccgaggggtggtcagaccagcccgcattgtgctgaaggcccacaatcagcccagctgtccggggccatgatgaattagcggtgggagttaacatagaggtgaactccagatcggccgatagcttgcaggccgctgctgtttgtcctgacttcagcgcatctctgatagacctttgacaccttccaacaaagaggttacaggagggagagctggagaaatggagcgctcctccagaaagttcggcaactcacaaaagaccccttaatttctatagcgggcaattcagtccacaaaggaaggaaatcaatgagcgtttacgctctttctttgaggaacctttttttaaagaaaaaaacatttactggcgctttgcatgttttgggtacaagcagtggtagaaacataaaacattaaaatccaagattg

SEQ ID NO: 8922 - protein, 405 aa, Homo sapiens
MNYQQQLANSAAIRAEIQRFESVHPNIYSIYELLERVEEPVLQNQIREHVIAIEDAFVNSQEWTLSRSVPELKVGIVGNLASGKSALVHRYLTGTYVQEESPEGGRFKKEIVVDGQSYLLLIRDEGGPPEAQFAMWVDAVIFVFSLEDEISFQTVYHYYSRMANYRNTSEIPLVLVGTQDAISSANPRVIDDARARKLSNDLKRCTYYETCATYGLNVERVFQDVAQKIVATRKKQQLSIGPCKSLPNSPSHSSVCSAQVSAVHISQTSNGGGSLSDYSSSVPSTPSTSQKELRIDVPPTANTPTPVRKQSKRRSNLFTSRKGSDPDKEKKGLESRADSIGSGRAIPIKQGLPFFVLALTASTYLRPAGARARQSSPWPGPRGGQTSPHCAEGPQSAQLSGAMMN

SEQ ID NO: 8923 - DNA, 4163 bp, Homo sapiens
ccgggcaggcggcgggcggcgctcggagcgggctccgcggcttgcaaggcgcctgcgactcggtcccaggtcggcgggcggcgcacggcgggctcgcgcgggggccccggcgcgccgggcggcgcagtacgcagcgcgcggacccacgccacggccaggagcccagagcagcgcggccacactgcccaggggtcggccctcggccccggcgctcggagcgcggcggctgcctgggctttaatggctgctccgcggagcagcgcctagggctggaaggcggctgcggctcaggaagtcacccgagcaagcctccttcggggccggccgcacccgccgcggcgcgctccatgggggcgcgctccccccgggcggcccgctgacccgggacgccggggcccgctcgctcgccggccgcgcgtcccggccatgaactgagcccgcgggccagccccgcgcctgctccgcccgcgcctttcttctcgcgcctcctccgcccgccgccggcgggcccggctccccgggggctgcggcgccccgggctcggcggcccgcgggccccggggcgcggggcggcggcggcggggggcgcgcggctccgggcgcggcgcctgcaccatgaactaccagcagcagctggccaactcggctgccatccgggccgagatccagcgcttcgagtcggtccaccccaacatctactccatctacgagctgctggagcgcgtggaggagccggtgctgcagaaccagatccgggagcacgtcatcgccatcgaagatgccttcgtgaacagccaggaatggacgctgagtcgatctgtcccggagctcaaagtgggaattgtgggtaacttggccagcggcaagtctgccctggtgcaccggtacctgacgggcacatatgtccaggaggagtctccggaaggtggcaggttcaagaaagagattgtcgttgatggacagagctatctgctgctgatcagagatgaagggggccccccggaggcgcagtttgccatgtgggtggacgctgttatatttgtcttcagcttggaggatgaaataagtttccagaccgtttaccactactacagtcgaatggccaactatcggaacacgagcgagattcctctggttctggtgggaacccaggatgccataagttctgctaacccgagggtcatcgatgacgccagggcgaggaagctctccaacgacctgaaacggtgcacgtactacgagacgtgtgctacatacgggctgaatgtggagagggtcttccaggacgttgcccagaagattgttgccacaaggaagaagcagcagctgtccataggaccctgcaagtcgctacctaattctcccagccattcctccgtctgttccgcgcaggtgtctgccgtgcacatcagccagacaagtaatggaggtgggagtttaagcgactattcctcctccgttccatcgactcccagcaccagccagaaggaacttcggatcgatgttcctcccactgccaacacgcccacgcccgttcgcaagcagtctaagcgccggtccaacctgttcacctctcggaaagggagcgacccagacaaagagaagaaaggcctggagagtcgtgcggacagcattgggagcggccgagccatcccaattaaacagggcatgctgttgaagcgaagtggcaaatcgttgaataaagagtggaaaaagaaatatgtcaccctgtgtgacaatggcgtgctgacctatcatcccagtttacatgattacatgcagaatgttcatggtaaggagattgaccttctgagaaccactgtgaaagtcccagggaagaggccaccccgagccacgtcagcctgcgcacccatctccagccctaaaaccaatggcctatccaaggacatgagcagtttacacatctcacccaattcagacacagggctgggtgactccgtatgctccagccccagtatctccagcaccaccagccccaagctcgacccgcccccctcccctcacgccaacagaaagaagcaccgaaggaagaaaagcactagcaacttcaaagccgacggcctgtccggcactgctgaagaacaagaagaaaattttgagtttatcattgtgtccctcactggccaaacatggcactttgaagccacgacgtatgaggagcgggacgcctgggtccaagccatcgagagccagatcctggccagcctgcagtcgtgcgagagcagcaagaacaagtcccggctgacgagccagagcgaggccatggccctgcagtcgatccggaacatgcgcgggaactcccactgtgtggactgcgagacccagaatcccaactgggccagtttgaacttgggagccctcatgtgcatcgaatgctcagggatccaccggaatcttggcacccacctttcccgagtccgatctctggacctggatgactggccagtcgagctcatcaaggtgatgtcatccatcgggaacgagctagccaacagcgtctgggaagagagcagccaggggcggacgaaaccatcggtagactccacaagggaagagaaggaacggtggatccgtgccaagtacgagcagaagctcttcctggccccgctgccctgcacggagctgtccctgggccagcacctgctgcgggccaccgccgacgaggacctgcggacggccatcctgctgctggcacacggctcccgggacgaggtgaacgagacctgcggggagggagacggccgcacggcgctgcatctggcctgccgcaaggggaatgtggtcctggcgcagctcctgatctggtacggagtggacgtcacggcccgagatgcccacgggaacacagctctggcctacgcccggcaggcctccagccaggagtgcatcgacgtgctgctgcagtacggctgccccgacgagcgcttcgtgctcatggccacccctaacctgtccaggagaaacaataaccggaacaacagcagtgggagggtgcccaccatcatctgaggaacagccgtgcccgcctgctcgccgcacctgggacgcggcagcctcgccgcattctcgctcagaagtcgcagcacgtgagtcccgtcgcatcccctccctcttcctggtggccacctccctcccgcccacccactctcaccccaaacaaaatcacaaaacctggacatccctcaaggggcgaagaggcggccgggagactgcagaagtggctccttttcataaactcccctaaaccacacacaggagagagcgacgggcctcggccctttgatgatagcacatggcgcaggacccttgtcctggtggcacaagggatggggacgcgagggggaggggaggcgaggaacaaggagaaggggcaactttccttaactggcagttgagcacatagtacatttcccctctaccaaacggaacacttggattccatctcttctctgaggagctcgacggcataaatcagaagcaagcacagagtttgtcaggtttgaagcccctatgatggtgtgtgtcaaatcagttgtagctaatctgtccagggagaatactggcttcattacacttgtacagccgagttcttcccgcattactgctgtttaatagaacgtgattagtcatcgccgagaagaaagcatattagccgaggaggtagtcacgcggcacgcgccggtgattgccacgatgtgattgcaatactcttagaagcaccatattatcccagacatgttctttcaagcccttggagccctctctaaattcactgtcatcatttagtatctgtttaatttttcagtccaaagagaggaaatcagtcgctgagtattatttgactccggtctccttggtgcaaaaacaaaatgggaaaaataaataagaataactcagaaactcaaaaggaaaccacaaattcagctaataatagcatttcgagtatatttcgtaaactaaggaaatacacaaaaggctgttttttccgactgtaagagatatttgatgtccttttgccgaggtggatgtgttagtctcaggccctcctggaccacgttgcccaagtcacacaggcttctgtgttatgtatttagataagatgtgtgaaaatatatttgaataaaagaagttcataaatatgc

SEQ ID NO: 8924 - protein, 804 aa, Homo sapiens; identical to SEQ ID NO: 718

SEQ ID NO: 8925 - DNA, 5674 bp, Homo sapiens
ccgggcaggcggcgggcggcgctcggagcgggctccgcggcttgcaaggcgcctgcgactcggtcccaggtcggcgggcggcgcacggcgggctcgcgcgggggccccggcgcgccgggcggcgcagtacgcagcgcgcggacccacgccacggccaggagcccagagcagcgcggccacactgcccaggggtcggccctcggccccggcgctcggagcgcggcggctgcctgggctttaatggctgctccgcggagcagcgcctagggctggaaggcggctgcggctcaggaagtcacccgagcaagcctccttcggggccggccgcacccgccgcggcgcgctccatgggggcgcgctccccccgggcggcccgctgacccgggacgccggggcccgctcgctcgccggccgcgcgtcccggccatgaactgagcccgcgggccagccccgcgcctgctccgcccgcgcctttcttctcgcgcctcctccgcccgccgccggcgggcccggctccccgggggctgcggcgccccgggctcggcggcccgcgggccccggggcgcggggcggcggcggcggggggcgcgcggctccgggcgcggcgcctgcaccatgaactaccagcagcagctggccaactcggctgccatccgggccgagatccagcgcttcgagtcggtccaccccaacatctactccatctacgagctgctggagcgcgtggaggagccggtgctgcagaaccagatccgggagcacgtcatcgccatcgaagatgccttcgtgaacagccaggaatggacgctgagtcgatctgtcccggagctcaaagtgggaattgtgggtaacttggccagcggcaagtctgccctggtgcaccggtacctgacgggcacatatgtccaggaggagtctccggaaggtggcaggttcaagaaagagattgtcgttgatggacagagctatctgctgctgatcagagatgaagggggccccccggaggcgcagtttgccatgtgggtggacgctgttatatttgtcttcagcttggaggatgaaataagtttccagaccgtttaccactactacagtcgaatggccaactatcggaacacgagcgagattcctctggttctggtgggaacccaggatgccataagttctgctaacccgagggtcatcgatgacgccagggcgaggaagctctccaacgacctgaaacggtgcacgtactacgagacgtgtgctacatacgggctgaatgtggagagggtcttccaggacgttgcccagaagattgttgccacaaggaagaagcagcagctgtccataggaccctgcaagtcgctacctaattctcccagccattcctccgtctgttccgcgcaggtgtctgccgtgcacatcagccagacaagtaatggaggtgggagtttaagcgactattcctcctccgttccatcgactcccagcaccagccagaaggaacttcggatcgatgttcctcccactgccaacacgcccacgcccgttcgcaagcagtctaagcgccggtccaacctgttcacctctcggaaagggagcgacccagacaaagagaagaaaggcctggagagtcgtgcggacagcattgggagcggccgagccatcccaattaaacagggcatgctgttgaagcgaagtggcaaatcgttgaataaagagtggaaaaagaaatatgtcaccctgtgtgacaatggcgtgctgacctatcatcccagtttacatgattacatgcagaatgttcatggtaaggagattgaccttctgagaaccactgtgaaagtcccagggaagaggccaccccgagccacgtcagcctgcgcacccatctccagccctaaaaccaatggcctatccaaggacatgagcagtttacacatctcacccaattcagacacagggctgggtgactccgtatgctccagccccagtatctccagcaccaccagccccaagctcgacccgcccccctcccctcacgccaacagaaagaagcaccgaaggaagaaaagcactagcaacttcaaagccgacggcctgtccggcactgctgaagaacaagaagaaaattttgagtttatcattgtgtccctcactggccaaacatggcactttgaagccacgacgtatgaggagcgggacgcctgggtccaagccatcgagagccagatcctggccagcctgcagtcgtgcgagagcagcaagaacaagtcccggctgacgagccagagcgaggccatggccctgcagtcgatccggaacatgcgcgggaactcccactgtgtggactgcgagacccagaatcccaactgggccagtttgaacttgggagccctcatgtgcatcgaatgctcagggatccaccggaatcttggcacccacctttcccgagtccgatctctggacctggatgactggccagtcgagctcatcaaggtgatgtcatccatcgggaacgagctagccaacagcgtctgggaagagagcagccaggggcggacgaaaccatcggtagactccacaagggaagagaaggaacggtggatccgtgccaagtacgagcagaagctcttcctggccccgctgccctgcacggagctgtccctgggccagcacctgctgcgggccaccgccgacgaggacctgcggacggccatcctgctgctggcacacggctcccgggacgaggtgaacgagacctgcggggagggagacggccgcacggcgctgcatctggcctgccgcaaggggaatgtggtcctggcgcagctcctgatctggtacggagtggacgtcacggcccgagatgcccacgggaacacagctctggcctacgcccggcaggcctccagccaggagtgcatcgacgtgctgctgcagtacggctgccccgacgagcgcttcgtgctcatggccacccctaacctgtccaggagaaacaataaccggaacaacagcagtgggagggtgcccaccatcatctgaggaacagccgtgcccgcctgctcgccgcacctgggacgcggcagcctcgccgcattctcgctcagaagtcgcagcacgtgagtcccgtcgcatcccctccctcttcctggtggccacctccctcccgcccacccactctcaccccaaacaaaatcacaaaacctggacatccctcaaggggcgaagaggcggccgggagactgcagaagtggctccttttcataaactcccctaaaccacacacaggagagagcgacgggcctcggccctttgatgatagcacatggcgcaggacccttgtcctggtggcacaagggatggggacgcgagggggaggggaggcgaggaacaaggagaaggggcaactttccttaactggcagttgagcacatagtacatttcccctctaccaaacggaacacttggattccatctcttctctgaggagctcgacggcataaatcagaagcaagcacagagtttgtcaggtttgaagcccctatgatggtgtgtgtcaaatcagttgtagctaatctgtccagggagaatactggcttcattacacttgtacagccgagttcttcccgcattactgctgtttaatagaacgtgattagtcatcgccgagaagaaagcatattagccgaggaggtagtcacgcggcacgcgccggtgattgccacgatgtgattgcaatactcttagaagcaccatattatcccagacatgttctttcaagcccttggagccctctctaaattcactgtcatcatttagtatctgtttaatttttcagtccaaagagaggaaatcagtcgctgagtattatttgactccggtctccttggtgcaaaaacaaaatgggaaaaataaataagaataactcagaaactcaaaaggaaaccacaaattcagctaataatagcatttcgagtatatttcgtaaactaaggaaatacacaaaaggctgttttttccgactgtaagagatatttgatgtccttttgccgaggtggatgtgttagtctcaggccctcctggaccacgttgcccaagtcacacaggcttctgtgttatgtatttagataagatgtgtgaaaatatatttgaataaaagaagttcataaatatgcattgatttttgtacagacaaatggcacctctcttaatttataaattgaactggatgtgaactaataatgtgcaactagttgagataagagggttacagatcattgtacatggaaaatattcccagcagtaaacacttccattaatgtgatctacggcttttgaaaaggagcatctcagaataagatggtggtacaatttgcttattaaaattgagaaagaaaaaaaaagacacactggagtatattagaaaggaaaaagaaggaatgtggtctctcatgattgaaagcatgatttagatcggatacggcttttgctaaccaaggaccaagggactctggcaagatggggtggttttccgaatgccagaccgaggtgccttacgaaggcagctgccaatggttctgtggcacagactggctcctgagaacccagacgaccttgacctggcagcccggccctccacgctagtacctcgcctgattttccatcgttgcggtatccagccgcttcagacgtccgccgccttcagtggtggtagtcaaatgtagtcaaccaaaccacagcatcccttaggttaaaagcaaacggggcagctttgcctagagctcattgacagtgtgatggggggagaagggttgtcacaatggaagatgaggacactagactcatgtagcacagaaacatgaagccacacgcaccggcagcctccggggtgttcctcgctctctcgtatgttaaaccttatattttataagagtttttcctcttatttcactttttaaaaaaaattaaagtaggtggggaaaaaaataaagctttacacagaatttatatgtgggtaagtgtttcatggaaatttctaatcttaacgaagctaagtggagctcactcgtatccaaaagtataacaggtgcagaagccacaagtctgagaaccttgacgacagttccatcgtcctgccatttgatttttcagtctgcgtttcatcactgtgtagctattgtaaatgtgaatagaaaaaaacaggtcattgcctatttttgaagaacgcgttggtgttcgagtccactagacacactcgctccacacagccttcaccgtagactctgtagtggacacagatatagcataaatgaaattgttaaattatttcattgtagttaattcccactataggaatgctttatcatagtgaagtttcttttgagaagaaacggaactccttgaggcttctctttgggatgtatatgagcgtgtacatattattctatgtgtttataatataatattttcccaaatgacttcttgtttcactttgccttccacaacctgaatgccagattggttttttcccttcctggcccccagcacaagctgccatgactccccctcagaaaacacagcccctcctctaccattctcagtgatgtccatctgctccactccgcagccactttctagggcccaagttttggtagcagaaggaaaggcagtttttgagggtctttcg

SEQ ID NO: 8926 - protein, 804 aa, Homo sapiens; identical to SEQ ID NO: 718

SEQ ID NO: 8927 - DNA, 663 bp, Homo sapiens
ctaggattggagcatccagaacagagtcacttcagcctgggaagagcggggacttgagcttggagggagctggagtggccgcttgctgagtctttctccctggagctcgtgggcagctggttacctcgcgctggggcgaccctgacttaggacctcctgccgtttctctgggtgactgctctgtagtcgtgagtcgtctctttaatgctgagcatcagtacctgcacagccctgaatggagcagctgcccagaatctgtcttgtcatcgatagatggacagttgccgagtgtcctgcgtgccgactgactaaggagtttttgtctctgtcaccctgtcccctgtggttttatgaagacgttagttatgaatccgtgtttaggatgagaagatgtaaacagtgaggaggataagtgagaagctagcaagagtctggatggtgatggcgggggagcgctggtggaggagtcgggggcgtcccgctggactggggcacagctctgcagcagcagccggtgcggttttgccttgtaagtgacaccgttgcctgcaggcatctctgacagctgctcctgctccagattccagaaatttctatggaacatttcctgaaccatcctcctggtttcttcccttcccctcactgaataaaatccgtaatagc

SEQ ID NO: 8928 - protein, 55 aa, Homo sapiens
MEQLPRICLVIDRWTVAECPACRLTKEFLSLSPCPLWFYEDVSYESVFRMRRCKQ

SEQ ID NO: 8929 - DNA, 1025 bp, Homo sapiens
ctaggattggagcatccagaacagagtcacttcagcctgggaagagcggggacttgagcttggagggagctggagtggccgcttgctgagtctttctccctggagctcgtgggcagctggttacctcgcgctggggcgaccctgacttaggacctcctgccgtttctctgggtgactgctctgtagtcgtgagtcgtctctttaatgctgagcatcagtacctgcacagccctgaatggagcagctgcccagaatctgtcttgtcatcgatagatggacagttgccgagtgtcctgcgtgccgactgactaaggagtttttgtctctgtcaccctgtcccctgtggttttatgaagacgttagttatgaatccgtgtttaggatgagaagatgtaaacagtgaggaggataagtgagaagctagcaagagtctggatggtgatggcgggggagcgctggtggaggagtcgggggcgtcccgctggactggggcacagctctgcagcagcagccggtgcggttttgccttgtaagtgacaccgttgcctgcaggcatctctgacagctgctcctgctccagattccagaaatttctatggaacatttcctgaaccatcctcctggtttcttcccttcccctcactgaataaaatccgtaatagcacctgccgcttgagtgtttgtctctgcaggacgccgtgttcagggctgggtgccctttgtgtcattttgttatcctggtcactgccagacagaggtggtaggaccctcatttgtcaggtcaggagcctgcagcctggagagtttaaagccttgcctgaatccacccacttctgaaggtggcagagtcaggattcgaactcgggacccgtggacaccagccacctatgggcctttatttttatatttttaaaaacttttagtttcaggggtacacatgcaggtgtgttatataggtaagttgggtgtcatggtggtctggtgtacagattattacaacgcatagtaagtacagtacctgatag

SEQ ID NO: 8930 - protein, 55 aa, Homo sapiens; identical to SEQ ID NO: 8928

SEQ ID NO: 8931 - DNA, 2745 bp, Homo sapiens
aatgctgaaagcttagtctttggaatgttatacattgtttggatcttaaaaatgtcagctcacaaaataatgtttttacatccttcctccaacatcatcaaccgcattagctcaccaccactcctcctctccgcttctcccccaacctgttttatcggtgtcaggaaaggggagcgatcagtctctcaggaggtacccatattgatcataatatagcctttcttaggcgtagcagtccagcaatcagggttcaatggtttcctctggaaggtagcatactgaaaaagacgaagtgcagagaaaagacagggtgggggtgcagcatgtctagtttgggggcctggctgtgggtcagaatggagagattgacacttcagagaaggccaggacgatggagacaagggaagtagaagttgaaagaaactcccaacggcaaattaggtcgagtgccagaaagaattacatcaggagaatctgagatgtagtgaaagtgcccccaagctccccgctccatttcatgtgctactggctggctgtgagatctgaaaaggactgggcccagactctgtgtgtgtgtgtgtgtgtgtgtgtgcgtgctcttaaatcaatgtaaattaggctatatacagctgccaataatctgcaaaagatgacagtttcatatgattccaatggcttaaactaacaaattcatgaatgattgacccagaccagaaatggaaacctgattcaactcacagtgtagtcctttatccatgcttgttggcttctggaacgcacagtgttcaggaggattctgaggcagggtctgtgtgcaggaggagtgctagtgtgagagctgctggtgcctgccctgggtccgaaagctggtggtggtctgttcttgttgtatgagggcagcccatgtcgccagcatttattttctgagccccatttcttaatgttgtatatttttttaaaaattaacaccaccataagcaagaaggaaaaaatcaacacttgctctttgaaggccaaatacattgaaatgaaagcgtgcctagtggagcaagagcggggcggggaggaggggaagccagcctgcagcattgccctctagacactaagaagaagggagtaggtttaggttggatgaagaagggaggtttggagcctggacgagagcaggggttgtggaggaatggtcaaaacccaggcgtgatgtgaccacaccatctggcaggggaccaggccagctgctgtgtgggtcttccatgtcccagggacggagagaggagaagtggggttggccaggcagaggcatgataagagtcagagtggctgggctccagggctccagccaggctattagcaggagcactggctttggagggggacctaagaggacagataggggaatccccaggccacctctggaccttgacattgactaatgggatgagctgctggaacccatcaccatgaagccccctgcactaactagggcgtgtgccccttgaggagccgcatccgcttattgggcctaagaaaaactgattcccaggtgtgtttgggccgtctagaaccatgtgacctggcagccacttcaacttgggcagcatctcggctgggagccccagggagcctggcagtacctcagtggcagatgcagctcgttccaagatgttccagaggcaggaggttcctggaagaaccactgggccttgcagggtcagctcagcctgagagccagtgaccccctcccccaggaggatgctgtaggggcagtctcacggcggtctcacctctgccacctgtggatgagaggctggaccgggtcttggtgctttccagctcagggcgttggtccacttggttattcttggggaccaaaatccaagctaggatggggacagaggcctggagacaacctgctggcctccttccattaaagccattacagtgtcaccacaggattgtaagaattacaaatgcgttttccagagtccccagagaaaaaggagtctggcagttagaagagtaaagtgcatctgtcaacaaaagaaataccaaagatgagactacagcagcgacttgtcacctcttccgtgttgctactgcctgagaacagaggtttttagtttctttaaagggttgtaaacataaaaacaaagaaggatacaacatgcaaggcctaaaatgtttactttctggccttttacacaggcagttcgccagccccctaccctacagtatggaaaaaaggcatagaacagtcaaatcacgtaggatttcttagtttctccatgcaggctcatcgaatagcaaccatcctttcttagtttcttgaaacaagtaccttatttacattcagagaattatatgtggacaaacagctcataagcccgtacttttacatactcacttcctgaattgcatattgaaaaagagagttcatgtaaagccgattattatttaatctaaagttatgttcacataggaagcactagtgtagagaaatagggtctgagggacaaggagcctgtgtgcccgtgtcggcagccgagtaactgccaagggtcccctgcttggcactctgctgtcccacttgcttcctgccctctctggattctaacacttgtgccattgtgcatccgtctcaggtcatggtgctgttacttggtgagaaagcattatttaaataccccagatgaggagttaggcactttctccagttttgcaatgctcttttgtttaccttttaaa

SEQ ID NO: 8932 - protein, 65 aa, Homo sapiens [sequence omitted]

SEQ ID NO: 8933 - DNA, 443 bp, Homo sapiens
aggggtattaatcaatgttttgattaattacacgtacatagaatttaagacaaagtaaaggctcttccatccccgcaagtccccagagaaaatttataacagcaaagtatcatcattactaaattagagcgtgaccagcctactggtcttgcccaagtccacgctgacttgggaaaagtgactgcctgccgtgatggaagggaagtactcaacccgacagactcagccctttttaaaaactggaagcaggggtgagtcatggaactccctctgcagcagcacctctatcttcccagccctgggctggcgacagagggggaaaaaaagttggctgaatggaccagcaggtgagatgaagagttgattgtcttcaaacgtaaaatatctcaagcaagaaaagaagaaaaaagtctcttcaataaatgttggcaatattttcgaga

SEQ ID NO: 8934 - protein, 56 aa, Homo sapiens
MEGKYSTRQTQPFLKTGSRGESWNSLCSSTSIFPALGWRQRGKKSWLNGPAGEMKS

SEQ ID NO: 8935 - DNA, 289 bp, Homo sapiens
gtccggccaaggatgagcaaggaacaaagagcttttagaacattaagcatacatctaaatttatttgacctgaggatccagcctggcctctcaagagcagacgctcacatgataaaacgtgctgggaactcaccatgtactcagcaaagggaagcaaagagggggaaaaaaagttggctgaatggaccagcaggtgagatgaagagttgattgtcttcaaacgtaaaatatctcaagcaagaaaagaagaaaaaagtctcttcaataaatgttggcaatattttcgaga

SEQ ID NO: 8936 - protein, 65 aa, Homo sapiens
MSKEQRAFRTLSIHLNLFDLRIQPGLSRADAHMIKRAGNSPCTQQREAKRGKKSWLNGPAGEMKS

SEQ ID NO: 8937 - DNA, 3700 bp, Homo sapiens; identical to SEQ ID NO: 719

SEQ ID NO: 8938 - protein, 196 aa, Homo sapiens; identical to SEQ ID NO: 720

SEQ ID NO: 8939 - DNA, 323 bp, Homo sapiens
gagcttcctgagaggctgaaggacactttagaaatgtcagcaggagagacccacttcccttttaacccatggagtcaggaggagaggaaagaaaagaggttcacctcaggctgctcagaaggaaggtgttccaggaaggccagaaaagggaggctgctctggaaaaacaaagaagagcttggcaggtcctagaacggaggagaagttagaccctgggaatccaagatgctgcaacgtcaggcagctggtccccagcaaggctggcacgtggaaacctcacggagaaaagtgattcataaccaaagcagggctcccacagcgac

SEQ ID NO: 8940 - protein, 52 aa, Homo sapiens
MSAGETHFPFNPWSQEERKEKRFTSGCSEGRCSRKARKGRLLWKNKEELGRS

SEQ ID NO: 8941 - DNA, 2487 bp, Homo sapiens
agtacccacggaaaacttgtttaccttgtcaccatgagtaaaagttaattcccactcctgaagagagcaaaccaactctgaaagagagtgaaaatgcagacaagacagttatcagataatggctatctggacgagagattctttcgtttgacagcagtttggttgttgggagttccagttcagctcctgcacagttgctctgtacaaatcctcctccatatttgcttagagaaaacgtgttgccatcccatcatgaaggaagctgcctgagagtttttaaccattacagccgtgatgatgaaagagtgaagaaccgcctctaagttaaaaagtgcacccagagataaggttcgttctcaatgccctgccgctgcttctcatcgcatggccaccgcatttctcaggccaggcacattgagcattggtcctgtgcctgacgctatgctagatgctggggttgcagccacgagcatagacacgacagacacggtcctcgccatcttctgttgagtactggtcggaacaagaggatcgtctgtagacaggatatgatcatcgtggcgcatgtattactcatccttttgggggccactgagatactgcaagctgacttacttcctgatgaaaagatttcacttctcccacctgtcaatttcaccattaaagttactggtttggctcaagttcttttacaatggaaaccaaatcctgatcaagagcaaaggaatgttaatctagaatatcaagtgaaaataaacgctccaaaagaagatgactatgaaaccagaatcactgaaagcaaatgtgtaaccatcctccacaaaggcttttcagcaagtgtgcggaccatcctgcagaacgaccactcactactggccagcagctgggcttctgctgaacttcatgccccaccagggtctcctggaacctcaattgtgaatttaacttgcaccacaaacactacagaagacaattattcacgtttaaggtcataccaagtttcccttcactgcacctggcttgttggcacagatgcccctgaggacacgcagtattttctctactataggtatggctcttggactgaagaatgccaagaatacagcaaagacacactggggagaaatatcgcatgctggtttcccaggacttttatcctcagcaaagggcgtgactggcttgcggtgcttgttaacggctccagcaagcactctgctatcaggccctttgatcagctgtttgcccttcacgccattgatcaaataaatcctccactgaatgtcacagcagagattgaaggaactcgtctctctatccaatgggagaaaccagtgtctgcttttccaatccattgctttgattatgaagtaaaaatacacaatacaaggaatggatatttgcagatagaaaaattgatgaccaatgcattcatctcaataattgatgatctttctaagtacgatgttcaagtgagagcagcagtgagctccatgtgcagagaggcagggctctggagtgagtggagccaacctatttatgtgggaaatgatgaacacaagcccttgagagagtggtttgtcattgtgattatggcaaccatctgcttcatcttgttaattctctcgcttatctgtaaaatatgtcatttatggatcaagttgtttccaccaattccagcaccaaaaagtaatatcaaagatctctttgtaaccactaactatgagaaagctgggtccagtgagacggaaattgaagtcatctgttatatagagaagcctggagttgagaccctggaggattctgtgttttgactgtcactttggcatcctctgatgaactcacacatgcctcagtgcctcagtgaaaagaacagggatgctggctcttggctaagaggtgttcagaatttaggcaacactcaatttacctgcgaagcaatacacccagacacaccagtcttgtatctcttaaaagtatggatgcttcatccaaatcgcctcacctacagcagggaagttgactcatccaagcattttgccatgttttttctccccatgccgtacagggtagcacctcctcacctgccaatctttgcaatttgcttgactcacctcagacttttcattcacaacagacagcttttaaggctaacgtccagctgtatttacttctggctgtgcccgtttggctgtttaagctgccaattgtagcactcagctaccatctgaggaagaaagcattttgcatcagcctggagtgaaccatgaacttggattcaagactgtcttttctatagcaagtgagagccacaaattcctcacccccctacattctagaatgatctttttctaggtagattgtgtatgtgtgtgtatgagagagagagagagagagagagagagagaaattatctcaagctccagaggcctgatccaggatacatcatttgaaaccaactaatttaaaagcataatagagctaatatat

SEQ ID NO: 8942 - protein, 420 aa, Homo sapiens; identical to SEQ ID NO: 722

SEQ ID NO: 8943 - DNA, 2368 bp, Homo sapiens
agtacccacggaaaacttgtttaccttgtcaccatgagtaaaagttaattcccactcctgaagagagcaaaccaactctgaaagagagtgaaaatgcagacaagacagttatcagataatggctatctggacgagagattctttcgtttgacagcagtttggttgttgggagttccagttcagctcctgcacagttgctctgtacaaatcctcctccatatttgcttagagaaaacgtgttgccatcccatcatgaaggaagctgcctgagagtttttaaccattacagccgtgatgatgaaagagtgaagaaccgcctctaagttaaaaagtgcacccagagataaggttcgttctcaatgccctgccgctgcttctcatcgcatggccaccgcatttctcaggccaggcacattgagcattggtcctgtgcctgacgctatgctagatgctggggttgcagccacgagcatagacacgacagacacggtcctcgccatcttctgttgagtactggtcggaacaagaggatcgtctgtagacaggctacagattgttttagattgaagtttcctgtcatgttcactcatctttaaatcctcatagtgaaaaaggatatgatcatcgtggcgcatgtattactcatccttttgggggccactgagatactgcaagctgacttacttcctgatgaaaagatttcacttctcccacctgtcaatttcaccattaaagttactggtttggctcaagttcttttacaatggaaaccaaatcctgatcaagagcaaaggaatgttaatctagaatatcaagtgaaaataaacgctccaaaagaagatgactatgaaaccagaatcactgaaagcaaatgtgtaaccatcctccacaaaggcttttcagcaagtgtgcggaccatcctgcagaacgaccactcactactggccagcagctgggcttctgctgaacttcatgccccaccagggtctcctggaacctcaattgtgaatttaacttgcaccacaaacactacagaagacaattattcacgtttaaggtcataccaagtttcccttcactgcacctggcttgttggcacagatgcccctgaggacacgcagtattttctctactataggtatggctcttggactgaagaatgccaagaatacagcaaagacacactggggagaaatatcgcatgctggtttcccaggacttttatcctcagcaaagggcgtgactggcttgcggtgcttgttaacggctccagcaagcactctgctatcaggccctttgatcagctgtttgcccttcacgccattgatcaaataaatcctccactgaatgtcacagcagagattgaaggaactcgtctctctatccaatgggagaaaccagtgtctgcttttccaatccattgctttgattatgaagtaaaaatacacaatacaaggaatggatatttgcagatagaaaaattgatgaccaatgcattcatctcaataattgatgatctttctaagtacgatgttcaagtgagagcagcagtgagctccatgtgcagagaggcagggctctggagtgagtggagccaacctatttatgtgggaaatgatgaacacaagcccttgagagagtggtttgtcattgtgattatggcaaccatctgcttcatcttgttaattctctcgcttatctgtaaaatatgtcatttatggatcaagttgtttccaccaattccagcaccaaaaagtaatatcaaagatctctttgtaaccactaactatgagaaagctgggtccagtgagacggaaattgaagtcatctgttatatagagaagcctggagttgagaccctggaggattctgtgttttgactgtcactttggcatcctctgatgaactcacacatgcctcagtgcctcagtgaaaagaacagggatgctggctcttggctaagaggtgttcagaatttaggcaacactcaatttacctgcgaagcaatacacccagacacaccagtcttgtatctcttaaaagtatggatgcttcatccaaatcgcctcacctacagcagggaagttgactcatccaagcattttgccatgttttttctccccatgccgtacagggtagcacctcctcacctgccaatctttgcaatttgcttgactcacctcagacttttcattcacaacagacagcttttaaggctaacgtccagctgtatttacttctggctgtgcccgtttggctgtttaagctgccaattgtagcactcagctaccatctgaggaagaaagcattttgcatcagcctggagtgaaccatgaacttggattcaagactgtcttttctatagcaa

SEQ ID NO: 8944 - protein, 420 aa, Homo sapiens; identical to SEQ ID NO: 722

SEQ ID NO: 8945 - DNA, 1695 bp, Homo sapiens
agtacccacggaaaacttgtttaccttgtcaccatgagtaaaagttaattcccactcctgaagagagcaaaccaactctgaaagagagtgaaaatgcagacaagacagttatcagataatggctatctggacgagagattctttcgtttgacagcagtttggttgttgggagttccagttcagctcctgcacagttgctctgtacaaatcctcctccatatttgcttagagaaaacgtgttgccatcccatcatgaaggaagctgcctgagagtttttaaccattacagccgtgatgatgaaagagtgaagaaccgcctctaagttaaaaagtgcacccagagataaggttcgttctcaatgccctgccgctgcttctcatcgcatggccaccgcatttctcaggccaggcacattgagcattggtcctgtgcctgacgctatgctagatgctggggttgcagccacgagcatagacacgacagacacggtcctcgccatcttctgttgagtactggtcggaacaagaggatcgtctgtagacaggctacagattgttttagattgaagtttcctgtcatgttcactcatctttaaatcctcatagtgaaaaaggatatgatcatcgtggcgcatgtattactcatccttttgggggccactgagatactgcaagctgacttacttcctgatgaaaagatttcacttctcccacctgtcaatttcaccattaaagttactggtttggctcaagttcttttacaatggaaaccaaatcctgatcaagagcaaaggaatgttaatctagaatatcaagtgaaaataaacgctccaaaagaagatgactatgaaaccagaatcactgaaagcaaatgtgtaaccatcctccacaaaggcttttcagcaagtgtgcggaccatcctgcagaacgaccactcactactggccagcagctgggcttctgctgaacttcatgccccaccagggtctcctggaacctcaattgtgaatttaacttgcaccacaaacactacagaagacaattattcacgtttaaggtcataccaagtttcccttcactgcacctggcttgttggcacagatgcccctgaggacacgcagtattttctctactataggtatggctcttggactgaagaatgccaagaatacagcaaagacacactggggagaaatatcgcatgctggtttcccaggacttttatcctcagcaaagggcgtgactggcttgcggtgcttgttaacggctccagcaagcactctgctatcaggccctttgatcagctgtttgcccttcacgccattgatcaaataaatcctccactgaatgtcacagcagagattgaaggaactcgtctctctatccaatgggagaaaccagtgtctgcttttccaatccattgctttgattatgaagtaaaaatacacaatacaaggaatggatatttgcagatagaaaaattgatgaccaatgcattcatctcaataattgatgatctttctaagtacgatgttcaagtgagagcagcagtgagctccatgtgcagagaggcagggctctggagtgagtggagccaacctatttatgtggggttctcaagataaaggagataacatccagctttcctgccccacaccgtatctgaaataaaaacaacagcagggatagcagatt

SEQ ID NO: 8946 - protein, 335 aa, Homo sapiens; identical to SEQ ID NO: 726

SEQ ID NO: 8947 - DNA, 1626 bp, Homo sapiens; identical to SEQ ID NO: 731

SEQ ID NO: 8948 - protein, 335 aa, Homo sapiens; identical to SEQ ID NO: 726

SEQ ID NO: 8949 - DNA, 2031 bp, Homo sapiens
agtacccacggaaaacttgtttaccttgtcaccatgagtaaaagttaattcccactcctgaagagagcaaaccaactctgaaagagagtgaaaatgcagacaagacagttatcagataatggctatctggacgagagattctttcgtttgacagcagtttggttgttgggagttccagttcagctcctgcacagttgctctgtacaaatcctcctccatatttgcttagagaaaacgtgttgccatcccatcatgaaggaagctgcctgagagtttttaaccattacagccgtgatgatgaaagagtgaagaaccgcctctaagttaaaaagtgcacccagagataaggttcgttctcaatgccctgccgctgcttctcatcgcatggccaccgcatttctcaggccaggcacattgagcattggtcctgtgcctgacgctatgctagatgctggggttgcagccacgagcatagacacgacagacacggtcctcgccatcttctgttgagtactggtcggaacaagaggatcgtctgtagacaggctacagattgttttagattgaagtttcctgtcatgttcactcatctttaaatcctcatagtgaaaaaggatatgatcatcgtggcgcatgtattactcatccttttgggggccactgagatactgcaagctgacttacttcctgatgaaaagatttcacttctcccacctgtcaatttcaccattaaagttactggtttggctcaagttcttttacaatggaaaccaaatcctgatcaagagcaaaggaatgttaatctagaatatcaagtgaaaataaacgctccaaaagaagatgactatgaaaccagaatcactgaaagcaaatgtgtaaccatcctccacaaaggcttttcagcaagtgtgcggaccatcctgcagaacgaccactcactactggccagcagctgggcttctgctgaacttcatgccccaccagggtctcctggaacctcaattgtgaatttaacttgcaccacaaacactacagaagacaattattcacgtttaaggtcataccaagtttcccttcactgcacctggcttgttggcacagatgcccctgaggacacgcagtattttctctactataggtatggctcttggactgaagaatgccaagaatacagcaaagacacactggggagaaatatcgcatgctggtttcccaggacttttatcctcagcaaagggcgtgactggcttgcggtgcttgttaacggctccagcaagcactctgctatcaggccctttgatcagctgtttgcccttcacgccattgatcaaataaatcctccactgaatgtcacagcagagattgaaggaactcgtctctctatccaatgggagaaaccagtgtctgcttttccaatccattgctttgattatgaagtaaaaatacacaatacaaggaatggatatttgcagatagaaaaattgatgaccaatgcattcatctcaataattgatgatctttctaagtacgatgttcaagtgagagcagcagtgagctccatgtgcagagaggcagggctctggagtgagtggagccaacctatttatgtgggtaagtagcttatgtttattttacattggcagccttccttgtgatcaaaaaaggtaatcccagaaacgtacccgttcactcgtgggtcttaaaatggtttcatatctctattgtgactaattttctctcggtctactgccttttcaatcaggaatagatttgccatgaagccagtgaagtttttaagtgtctaggcttctcattagcgccaactctcctagacctggtgcctgttttttttccaagttttgtttctacttctatccattttttaaattaaactttttattttgaaataattatcacactcacaagctgtgggaagaaataatagagatcctgtgtctctttcatccagttttcctcaagggtaacatcttacaaaactatagtacaatagtggaatagaatattggtgtt

SEQ ID NO: 8950 - protein, 333 aa, Homo sapiens; identical to SEQ ID NO: 724

SEQ ID NO: 8951 - DNA, 1956 bp, Homo sapiens; identical to SEQ ID NO: 729

SEQ ID NO: 8952 - protein, 333 aa, Homo sapiens; identical to SEQ ID NO: 724

SEQ ID NO: 8953 - DNA, 2194 bp, Homo sapiens
accagcccggaagtgcgcgtggcggcggtggcggctgcggcaacagcggggccgatgtgtagttggtgactgcctctccagatgctgaggtgcctgtatcattggcacaggccagtgctgaaccgtaggtggagtaggctgtgccttccgaagcagtatctattcacaatgaagttgcagtctcccgaattccagtcacttttcacagaaggactgaagagtctgacagaattatttgtcaaagagaatcacgaattaagaatagcaggaggagcagtgagggatttattaaatggagtaaagcctcaggatatagattttgccaccactgctacccctactcaaatgaaggagatgtttcagtcggctgggattcggatgataaacaacagaggagaaaagcacggaacaattactgccaggcttcatgaagaaaattttgagattactacactacggattgatgtcaccactgatggaagacatgctgaggtagaatttacaactgactggcagaaagatgcggaacgcagagatctcactataaattctatgtttttaggttttgatggcactttatttgactactttaatggttatgaagatttaaaaaataagaaagttagatttgttggacatgctaaacagagaatacaagaggattatcttagaattttaagatacttcaggttttatgggagaattgtagacaaacctggtgaccatgatcctgagactttggaagcaattgcagaaaatgcaaaaggcttggctggaatatcaggagaaaggatttgggtggaactgaaaaaaattcttgttggtttacctgctaatgcaagtttagaagaatttgacaaagtcagtaaaaatgttgatggtttttcaccaaagccagtgactcttttggcctcattattcaaagtacaagatgatgtcacaaaattggatttgaggttgaagatcgcaaaagaggagaaaaaccttggcttatttatagttaaaaataggaaagatttaattaaagcaacagatagttcagacccattgaaaccctatcaagacttcattatagattctagggaacctgatgcaactactcgtgtatgtgaactactgaagtaccaaggagagcactgtctcctaaaggaaatgcagcagtggtccattcctccatttcctgtaagtggccatgacatcagaaaagtgggcatttcttcaggaaaagaaattggggctctattacaacagttgcgagaacagtggaaaaaaagtggttaccaaatggaaaaagatgaacttctgagttacataaagaagacctaaaactgatggctactaaaaagcagagcatttctggtaagactaaattttctcccctccctcttaatgaggttttagagactacaccagaataaaagacagtttaggggacctctgtagaacaacaagggtcttattttgtgaattatatatttcaagaactaaacagagatccacctttctggatctgatttatatcactgaaatgtacagttcttttggaatagtttcacctgagaaaacatagttggctattatctatcttaacctgttcaggcttttaaaaaaaactgtttttgcatagggtagtactaagatcttaaaaagtggtaactgtcttgaagaaaaaacgtttattgtttgtttgcaattgaaataacagggttaccttaacaatgactgtctatgatgtgtcagttcttatctgaattccaaaataaacctgtgcttaaaaaagaaataattgaccaagtaagtttgcataaaatgtgaatactaaatgtgtccccagttgctggcattcatatgtacaggatttgttctagcaagctatgcttcagtatgtggttgatatttttctgtcacaatgatttctttatgcatgcagagcctggggaagtcatgggattaacttgagggtcactattgagcctattaattaattattgttttaataaaacaaacattggtattggaagataaatatgtttatgtggtatctgacaatgtgtattaggtgtcatatacaatggtaatatgcctgtctttaaagtgttattttattaattaaaaggatatggctattattatatattctctaaagatttgagtcctaaatgctttcatcaggtaaataaaatgtataatacaa

SEQ ID NO: 8954 - protein, 414 aa, Homo sapiens
MLRCLYHWHRPVLNRRWSRLCLPKQYLFTMKLQSPEFQSLFTEGLKSLTELFVKENHELRIAGGAVRDLLNGVKPQDIDFATTATPTQMKEMFQSAGIRMINNRGEKHGTITARLHEENFEITTLRIDVTTDGRHAEVEFTTDWQKDAERRDLTINSMFLGFDGTLFDYFNGYEDLKNKKVRFVGHAKQRIQEDYLRILRYFRFYGRIVDKPGDHDPETLEAIAENAKGLAGISGERIWVELKKILVGLPANASLEEFDKVSKNVDGFSPKPVTLLASLFKVQDDVTKLDLRLKIAKEEKNLGLFIVKNRKDLIKATDSSDPLKPYQDFIIDSREPDATTRVCELLKYQGEHCLLKEMQQWSIPPFPVSGHDIRKVGISSGKEIGALLQQLREQWKKSGYQMEKDELLSYIKKT

SEQ ID NO: 8955 - DNA, 1864 bp, Homo sapiens
accagcccggaagtgcgcgtggcggcggtggcggctgcggcaacagcggggccgatgtgtagttggtgactgcctctccagatgctgaggtgcctgtatcattggcacaggccagtgctgaaccgtaggtggagtaggctgtgccttccgaagcagtatctattcacaatgaagttgcagtctcccgaattccagtcacttttcacagaaggactgaagagtctgacagaattatttgtcaaagagaatcacgaattaagaatagcaggaggagcagtgagggatttattaaatggagtaaagcctcaggatatagattttgccaccactgctacccctactcaaatgaaggagatgtttcagtcggctgggattcggatgataaacaacagaggagaaaagcacggaacaattactgccaggcttcatgaagaaaattttgagattactacactacggattgatgtcaccactgatggaagacatgctgaggtagaatttacaactgactggcagaaagatgcggaacgcagagatctcactataaattctatgtttttaggttttgatggcactttatttgactactttaatggttatgaagatttaaaaaataagaaagttagatttgttggacatgctaaacagagaatacaagaggattatcttagaattttaagatacttcaggttttatgggagaattgtagacaaacctggtgaccatgatcctgagactttggaagcaattgcagaaaatgcaaaaggcttggctggaatatcaggagaaaggatttgggtggaactgaaaaaaattcttgttggtaaccatgtaaatcatttgattcaccttatctatgatcttgatgtggctccttatataggtttacctgctaatgcaagtttagaagaatttgacaaagtcagtaaaaatgttgatggtttttcaccaaagccagtgactcttttggcctcattattcaaagtacaagatgatgtcacaaaattggatttgaggttgaagatcgcaaaagaggagaaaaaccttggcttatttatagttaaaaataggaaagatttaattaaagcaacagatagttcagacccattgaaaccctatcaagacttcattatagattctagggaacctgatgcaactactcgtgtatgtgaactactgaagtaccaaggagagcactgtctcctaaaggaaatgcagcagtggtccattcctccatttcctgtaagtggccatgacatcagaaaagtgggcatttcttcaggaaaagaaattggggctctattacaacagttgcgagaacagtggaaaaaaagtggttaccaaatggaaaaagatgaacttctgagttacataaagaagacctaaaactgatggctactaaaaagcagagcatttctgccagtcataacatctttgtactctatgagcaaatagtaattttggaccttgataaaacaattttgtagagtgtaatatttctaagaggaaatgtcacaggggctatgatgcaagaaagcctcagaaatgactgcatacaggaaataatctcatcatttccaaagatgtcttcatgtcccatcaatgacatgctaccagacatatcagattccacaggataatggcaccaagctacccaagtagatgtttctggtattctagactgccgttcatgcttgtttcctaaagtatacttaaaagtttcaaatacagtttcacttagaaactgcaaccctccaagtaatgttatgtttacttaggtattaatgttatgtttacttaggtatgtatcagaggcaataatttccaaagcagatcttagaatataaccaatttgttagataac

SEQ ID NO: 8956 - protein, 434 aa, Homo sapiens
MLRCLYHWHRPVLNRRWSRLCLPKQYLFTMKLQSPEFQSLFTEGLKSLTELFVKENHELRIAGGAVRDLLNGVKPQDIDFATTATPTQMKEMFQSAGIRMINNRGEKHGTITARLHEENFEITTLRIDVTTDGRHAEVEFTTDWQKDAERRDLTINSMFLGFDGTLFDYFNGYEDLKNKKVRFVGHAKQRIQEDYLRILRYFRFYGRIVDKPGDHDPETLEAIAENAKGLAGISGERIWVELKKILVGNHVNHLIHLIYDLDVAPYIGLPANASLEEFDKVSKNVDGFSPKPVTLLASLFKVQDDVTKLDLRLKIAKEEKNLGLFIVKNRKDLIKATDSSDPLKPYQDFIIDSREPDATTRVCELLKYQGEHCLLKEMQQWSIPPFPVSGHDIRKVGISSGKEIGALLQQLREQWKKSGYQMEKDELLSYIKKT

SEQ ID NO: 8957 - DNA, 975 bp, Homo sapiens
gcgcgtggcggcggtggcggctgcggcaacagcggggccgatgtgtagttggtgactgcctctccagatgctgaggtgcctgtatcattggcacaggccagtgctgaaccgtaggtggagtaggctgtgccttccgaagcagtatctattcacaatgaagttgcagtctcccgaattccagtcacttttcacagaaggactgaagagtctgacaggtataaatgctttccatgagaactgaaggaagaaggaaataggagttgcctccattgtgcacgttgcaaaacctgtctggaaggagcataggaaatggctttagctaagtgccagtagcttcttgctgttgccacagtttcattagtgttgattctcaatgttgtctgctgatgttgctaaagcagccacacagtagcattacaaagcctgtgggaattttaatagcaccttcataaatatatttagtagtatatgtagaaatatgacctatacagcactggctatctattagattcacctggggagcttttaaagcacacatgctcgggttctacctgcagcctactgaattagaatctctgggtgggatgaccatctatatttttaataaaagctccacaagttaattctgatgcacagaagatagacgaaccattactttaacatgactcaccttgtattagcttattctcaaagctactttcccattcttgaaattggatgatggctttttaggtacgtgccagagataaatggcccagaatatgttgattcttttagattgttttaggcagactttaagtagagggcttaaatgcatgtttggttttgccgatgcttcactatcttttttaattggagagagtgaaaattgctaaaaattgctgtccaatagaaatttatgagcccatatgtaatataaacttttttactaaccacattaaaaagatagaaatggtgaaataaattttaataatt

SEQ ID NO: 8958 - protein, 57 aa, Homo sapiens
MLRCLYHWHRPVLNRRWSRLCLPKQYLFTMKLQSPEFQSLFTEGLKSLTGINAFHEN

SEQ ID NO: 8959 - DNA, 1374 bp, Homo sapiens
gcgcgtggcggcggtggcggctgcggcaacagcggggccgatgtgtagttggtgactgcctctccagatgctgaggtgcctgtatcattggcacaggccagtgctgaaccgtaggtggagtaggctgtgccttccgaagcagtatctattcacaatgaagttgcagtctcccgaattccagtcacttttcacagaaggactgaagagtctgacaggtataaatgctttccatgagaactgaaggaagaaggaaataggagttgcctccattgtgcacgttgcaaaacctgtctggaaggagcataggaaatggctttagctaagtgccagtagcttcttgctgttgccacagtttcattagtgttgattctcaatgttgtctgctgatgttgctaaagcagccacacagtagcattacaaagcctgtgggaattttaatagcaccttcataaatatatttagtagtatatgtagaaatatgacctatacagcactggctatctattagattcacctggggagcttttaaagcacacatgctcgggttctacctgcagcctactgaattagaatctctgggtgggatgaccatctatatttttaataaaagctccacaagttaattctgatgcacagaagatagacgaaccattactttaacatgactcaccttgtattagcttattctcaaagctactttcccattcttgaaattggatgatggctttttaggtacgtgccagagataaatggcccagaatatgttgattcttttagattgttttaggcagactttaagtagagggcttaaatgcatgtttggttttgccgatgcttcactatcttttttaattggagagagtgaaaattgctaaaaattgctgtccaatagaaatttatgagcccatatgtaatataaacttttttactaaccacattaaaaagatagaaatggtgaaataaattttaataattatttttggttcatctaatttaatccaatatatctaagatactatcagtatgaattttgtataaaaattgttaatgaggccgggcacagtgtctcccacctgtaatcctagcactttgggaggctggacatggtggctcatacctgtaatcccagcacttttgagtggctgaggtgggtggatcacttgagcccaggagtttgagaccagcctgggcaacacggtgaaaccccatctctactaaaaatatgaaaaataggcaagcatactgatatgtgtctgtagtccctgctacttgggaggctgaggtgggaggatcactgaagcctgggaggggggcttgcggtaagccgagattgtgccactacactccagcctgggcgacacagaccgtgtcttt

SEQ ID NO: 8960 - protein, 57 aa, Homo sapiens; identical to SEQ ID NO: 8958

SEQ ID NO: 8961 - DNA, 1988 bp, Homo sapiens
ggcggctgcggcaacagcggggccggtaagcgggcgcgcgccgctcagaggggcagagttggtggcgtgagttgctgccccttccttcctgctgtgggccagaggcgccaccgcgcccggtcctcgaggaagacgggagcgggacgtggcgagaggcctcctcagcagtgggcaaaatagccccgacgcggaggtcgtgtccccgccacgtttccggcgaccgcaggcgcggattccttggcttccctcagcactttcccctccgcgcggacggccccgagacgctttttcactgggccttgtcgccagcacccggcgtggggggtgagacgcgccttttcagggctggggttccccagagcgttttcctaagtcgaggcggaggtgcgaggaaactgagtgggtctttccgccccacgtggcctgccgggaagcgcggctcctccacccgcttccgtggaatggaatggtttttctctgcaggtttacaccggggtcactcgagagctgctgcggcctccttatgggcaggacccccgtatggggagaacgaggatgtgatatgtagaagggaaggccgcggtgtgccagaaatcagaggagattgcaagatggcaggaaaagaatcaggaaaatgggggcagcaaaactaaattcatgggaaaatacaatgtctaggagctatcccagggtcgtgaatcctcgagtgcaggtggggaagtagggtgatacccacctgtgaccatgacaagttttggagaccagaaactcggttagagtttctagaaccccgcatccctctcatactgcctgaagccctgctctggggagagtgtcatcacagtaccatgtggcatgcgagtgtcgtggtaatgctccccgaccaaaccaccaaaccgagggttgggctgcttattctcgctgcccaataatgagatgcagataaactaggaaagaaaggagtttatttctgtaaccaggtacggggcgaaggcgtggaaaatatcccagaccgactcagaattacagagctttccagagcttatataccttatgtgtagttggtgactgcctctccagatgctgaggtgcctgtatcattggcacaggccagtgctgaaccgtaggtggagtaggctgtgccttccgaagcagtatctattcacaatgaagttgcagtctcccgaattccagtcacttttcacagaaggactgaagagtctgacaggtataaatgctttccatgagaactgaaggaagaaggaaataggagttgcctccattgtgcacgttgcaaaacctgtctggaaggagcataggaaatggctttagctaagtgccagtagcttcttgctgttgccacagtttcattagtgttgattctcaatgttgtctgctgatgttgctaaagcagccacacagtagcattacaaagcctgtgggaattttaatagcaccttcataaatatatttagtagtatatgtagaaatatgacctatacagcactggctatctattagattcacctggggagcttttaaagcacacatgctcgggttctacctgcagcctactgaattagaatctctgggtgggatgaccatctatatttttaataaaagctccacaagttaattctgatgcacagaagatagacgaaccattactttaacatgactcaccttgtattagcttattctcaaagctactttcccattcttgaaattggatgatggctttttaggtacgtgccagagataaatggcccagaatatgttgattcttttagattgttttaggcagactttaagtagagggcttaaatgcatgtttggttttgccgatgcttcactatcttttttaattggagagagtgaaaattgctaaaaattgctgtccaatagaaatttatgagcccatatgtaatataaacttttttactaaccacattaaaaagatagaaatggtgaaataaattttaataatt

SEQ ID NO: 8962 - protein, 57 aa, Homo sapiens; identical to SEQ ID NO: 8958

SEQ ID NO: 8963 - DNA, 2387 bp, Homo sapiens
ggcggctgcggcaacagcggggccggtaagcgggcgcgcgccgctcagaggggcagagttggtggcgtgagttgctgccccttccttcctgctgtgggccagaggcgccaccgcgcccggtcctcgaggaagacgggagcgggacgtggcgagaggcctcctcagcagtgggcaaaatagccccgacgcggaggtcgtgtccccgccacgtttccggcgaccgcaggcgcggattccttggcttccctcagcactttcccctccgcgcggacggccccgagacgctttttcactgggccttgtcgccagcacccggcgtggggggtgagacgcgccttttcagggctggggttccccagagcgttttcctaagtcgaggcggaggtgcgaggaaactgagtgggtctttccgccccacgtggcctgccgggaagcgcggctcctccacccgcttccgtggaatggaatggtttttctctgcaggtttacaccggggtcactcgagagctgctgcggcctccttatgggcaggacccccgtatggggagaacgaggatgtgatatgtagaagggaaggccgcggtgtgccagaaatcagaggagattgcaagatggcaggaaaagaatcaggaaaatgggggcagcaaaactaaattcatgggaaaatacaatgtctaggagctatcccagggtcgtgaatcctcgagtgcaggtggggaagtagggtgatacccacctgtgaccatgacaagttttggagaccagaaactcggttagagtttctagaaccccgcatccctctcatactgcctgaagccctgctctggggagagtgtcatcacagtaccatgtggcatgcgagtgtcgtggtaatgctccccgaccaaaccaccaaaccgagggttgggctgcttattctcgctgcccaataatgagatgcagataaactaggaaagaaaggagtttatttctgtaaccaggtacggggcgaaggcgtggaaaatatcccagaccgactcagaattacagagctttccagagcttatataccttatgtgtagttggtgactgcctctccagatgctgaggtgcctgtatcattggcacaggccagtgctgaaccgtaggtggagtaggctgtgccttccgaagcagtatctattcacaatgaagttgcagtctcccgaattccagtcacttttcacagaaggactgaagagtctgacaggtataaatgctttccatgagaactgaaggaagaaggaaataggagttgcctccattgtgcacgttgcaaaacctgtctggaaggagcataggaaatggctttagctaagtgccagtagcttcttgctgttgccacagtttcattagtgttgattctcaatgttgtctgctgatgttgctaaagcagccacacagtagcattacaaagcctgtgggaattttaatagcaccttcataaatatatttagtagtatatgtagaaatatgacctatacagcactggctatctattagattcacctggggagcttttaaagcacacatgctcgggttctacctgcagcctactgaattagaatctctgggtgggatgaccatctatatttttaataaaagctccacaagttaattctgatgcacagaagatagacgaaccattactttaacatgactcaccttgtattagcttattctcaaagctactttcccattcttgaaattggatgatggctttttaggtacgtgccagagataaatggcccagaatatgttgattcttttagattgttttaggcagactttaagtagagggcttaaatgcatgtttggttttgccgatgcttcactatcttttttaattggagagagtgaaaattgctaaaaattgctgtccaatagaaatttatgagcccatatgtaatataaacttttttactaaccacattaaaaagatagaaatggtgaaataaattttaataattatttttggttcatctaatttaatccaatatatctaagatactatcagtatgaattttgtataaaaattgttaatgaggccgggcacagtgtctcccacctgtaatcctagcactttgggaggctggacatggtggctcatacctgtaatcccagcacttttgagtggctgaggtgggtggatcacttgagcccaggagtttgagaccagcctgggcaacacggtgaaaccccatctctactaaaaatatgaaaaataggcaagcatactgatatgtgtctgtagtccctgctacttgggaggctgaggtgggaggatcactgaagcctgggaggggggcttgcggtaagccgagattgtgccactacactccagcctgggcgacacagaccgtgtcttt

SEQ ID NO: 8964 - protein, 57 aa, Homo sapiens; identical to SEQ ID NO: 8958

SEQ ID NO: 8965 - DNA, 1318 bp, Homo sapiens
cagcggggccggtaagcgggcgcgcgccgctcagaggggcagagttggtggcgtgagttgctgccccttccttcctgctgtgggccagaggcgccaccgcgcccggtcctcgaggaagacgggagcgggacgtggcgagaggcctcctcagcagtgggcaaaatagccccgacgcggaggtcgtgtccccgccacgtttccggcgaccgcaggcgcggattccttggcttccctcagcactttcccctccgcgcggacggccccgagacgctttttcactgggccttgtcgccagcacccggcgtggggggtacggggcgaaggcgtggaaaatatcccagaccgactcagaattacagagctttccagagcttatataccttatgtgtagttggtgactgcctctccagatgctgaggtgcctgtatcattggcacaggccagtgctgaaccgtaggtggagtaggctgtgccttccgaagcagtatctattcacaatgaagttgcagtctcccgaattccagtcacttttcacagaaggactgaagagtctgacaggtataaatgctttccatgagaactgaaggaagaaggaaataggagttgcctccattgtgcacgttgcaaaacctgtctggaaggagcataggaaatggctttagctaagtgccagtagcttcttgctgttgccacagtttcattagtgttgattctcaatgttgtctgctgatgttgctaaagcagccacacagtagcattacaaagcctgtgggaattttaatagcaccttcataaatatatttagtagtatatgtagaaatatgacctatacagcactggctatctattagattcacctggggagcttttaaagcacacatgctcgggttctacctgcagcctactgaattagaatctctgggtgggatgaccatctatatttttaataaaagctccacaagttaattctgatgcacagaagatagacgaaccattactttaacatgactcaccttgtattagcttattctcaaagctactttcccattcttgaaattggatgatggctttttaggtacgtgccagagataaatggcccagaatatgttgattcttttagattgttttaggcagactttaagtagagggcttaaatgcatgtttggttttgccgatgcttcactatcttttttaattggagagagtgaaaattgctaaaaattgctgtccaatagaaatttatgagcccatatgtaatataaacttttttactaaccacattaaaaagatagaaatggtgaaataaattttaataatt

SEQ ID NO: 8966 - protein, 57 aa, Homo sapiens; identical to SEQ ID NO: 8958

SEQ ID NO: 8967 - DNA, 1717 bp, Homo sapiens
cagcggggccggtaagcgggcgcgcgccgctcagaggggcagagttggtggcgtgagttgctgccccttccttcctgctgtgggccagaggcgccaccgcgcccggtcctcgaggaagacgggagcgggacgtggcgagaggcctcctcagcagtgggcaaaatagccccgacgcggaggtcgtgtccccgccacgtttccggcgaccgcaggcgcggattccttggcttccctcagcactttcccctccgcgcggacggccccgagacgctttttcactgggccttgtcgccagcacccggcgtggggggtacggggcgaaggcgtggaaaatatcccagaccgactcagaattacagagctttccagagcttatataccttatgtgtagttggtgactgcctctccagatgctgaggtgcctgtatcattggcacaggccagtgctgaaccgtaggtggagtaggctgtgccttccgaagcagtatctattcacaatgaagttgcagtctcccgaattccagtcacttttcacagaaggactgaagagtctgacaggtataaatgctttccatgagaactgaaggaagaaggaaataggagttgcctccattgtgcacgttgcaaaacctgtctggaaggagcataggaaatggctttagctaagtgccagtagcttcttgctgttgccacagtttcattagtgttgattctcaatgttgtctgctgatgttgctaaagcagccacacagtagcattacaaagcctgtgggaattttaatagcaccttcataaatatatttagtagtatatgtagaaatatgacctatacagcactggctatctattagattcacctggggagcttttaaagcacacatgctcgggttctacctgcagcctactgaattagaatctctgggtgggatgaccatctatatttttaataaaagctccacaagttaattctgatgcacagaagatagacgaaccattactttaacatgactcaccttgtattagcttattctcaaagctactttcccattcttgaaattggatgatggctttttaggtacgtgccagagataaatggcccagaatatgttgattcttttagattgttttaggcagactttaagtagagggcttaaatgcatgtttggttttgccgatgcttcactatcttttttaattggagagagtgaaaattgctaaaaattgctgtccaatagaaatttatgagcccatatgtaatataaacttttttactaaccacattaaaaagatagaaatggtgaaataaattttaataattatttttggttcatctaatttaatccaatatatctaagatactatcagtatgaattttgtataaaaattgttaatgaggccgggcacagtgtctcccacctgtaatcctagcactttgggaggctggacatggtggctcatacctgtaatcccagcacttttgagtggctgaggtgggtggatcacttgagcccaggagtttgagaccagcctgggcaacacggtgaaaccccatctctactaaaaatatgaaaaataggcaagcatactgatatgtgtctgtagtccctgctacttgggaggctgaggtgggaggatcactgaagcctgggaggggggcttgcggtaagccgagattgtgccactacactccagcctgggcgacacagaccgtgtcttt

SEQ ID NO: 8968 - protein, 57 aa, Homo sapiens; identical to SEQ ID NO: 8958

SEQ ID NO: 8969 - DNA, 1614 bp, Homo sapiens
ataaatgtacttccctttgctgtaaacaatgtcaagaaacagaaataacaaccaaaaatgaaatattcagtttatccttatgtgggccgatggcagcttatgtgaatcctcatggatatgtgcatgagacacttactgtgtataaggcttgcaacttgaatctgataggccggccttctacagaacacagctggtttcctgggtatgcctggactgttgcccagtgtaagatctgtgcaagccatattggatggaagtttacggccaccaaaaaagacatgtcacctcaaaaattttggggcttaacgcgatctgctctgttgcccacgatcccagacactgaagatgaaataagtccagacaaagtaatactttgcttgtaaacagatgtgatagagataaagttatctaacaaattggttatattctaagatctgctttggaaattattgcctctgatacatacctaagtaaacataacattaatacctaagtaaacataacattacttggagggttgcagtttctaagtgaaactgtatttgaaacttttaagtatactttaggaaacaagcatgaacggcagtctagaataccagaaacatctacttgggtagcttggtgccattatcctgtggaatctgatatgtctggtagcatgtcattgatgggacatgaagacatctttggaaatgatgagattatttcctgtgttaaaaaaaaaaaaaatcttaaattcctacaatgtgaaactgaaactaataatttgatcctgatgtatgggacagcgtatctgtaccagtgctctaaataacaaaagctagggtgacaagtacatgttccttttggaaagaagcaaggcaatgtatattaattattctaaaagggctttgttcctttccattttctttaacttctctgagatactgatttgtaaattttgaaaattagttaaaatatgcagttttttgagcccacgaatagttgtcatttcctttatgtgcctgttagtaaaaagtagtattgtgtatttgctcagtatctgaactataagcccatttatactgttccatacaaaagctatttttcaaaaattaatttgaaccaaaactactactatagggaaaagatgccaaaacatgtcccctcacccagactaaacttgatactgtattattttgttcaatgtaaattgaagaaaatctgtaagtaagtaaaccttaagtgtgaaactaaacatgttctttgttcaaataatgtaaaatatctactcataattttaaagttctaaaaaggctgctttgccacctacctctttgcttatattcaagggtttagtgggtccttccttccacatttgtatgataactttcgttttattggtagtcctttgctactttaaaactaatcaggttaaatgtttactcaaatgtagtaatagtatgaggccaaaatacatgccttgaaggtggagtgaaatcagttgagtgtcacactgcatatttatgtaaatagagtaaatgaaaattcaagaatacttccaatcaggatatgcccctgccttattttttctaaggtctacttttactactttaataattttgggtttgtgtg

SEQ ID NO: 8970 - protein, 97 aa, Homo sapiens [sequence omitted]

SEQ ID NO: 8971 - DNA, 2417 bp, Homo sapiens
ctcttccttcaaatccaataggtatgaaaagttagtttcctgcctggagcctgggatgtcttgctataaaaaatagctttttcatggatgcgatccaatcatatcttctaggttttaagactgattaaaacattttaattctgaaaagcataatttcctttgagcagttgaaaaaaaatgagtattttaaaattaattgcaataaaatcctcatattctgtgagcactccaattttagacaagttttccataaaaagttcaaattgcaggaagtggctgtcatccaaaaacacttcctgtgtaaggactcctttccctgttcttcaaggtgcctttaaaagaagtgagtctagttccaggacttgccttaattatagatactctctttatctgtttataaggtatagtttagttatttttctagtctcttggcaaataacttctaacatggatttgagttcatgtttaacataaaaggattttaccaaaaaaagtataagaaaagcaattaaatttagagcttctgaaaagtgtatctttgacagctggtatatttttgtattgtttatacttgtataaaatgtgtaaccttaaagagaagggtttatttcaaaaggatattatccgatttgtaagttctctgatgcttatctgactcctaagtttaaaacttgaaaaaccatgtcttgaagatttttcttacagagtagctgcttgtcttcctattgatgatgtattgagaattcagctccttaaaattggcagtgctatccagcgacttcgctgtgaattagacattatgaataaatgtacttccctttgctgtaaacaatgtcaagaaacagaaataacaaccaaaaatgaaatattcagtttatccttatgtgggccgatggcagcttatgtgaatcctcatggatatgtgcatgagacacttactgtgtataaggcttgcaacttgaatctgataggccggccttctacagaacacagctggtttcctgggtatgcctggactgttgcccagtgtaagatctgtgcaagccatattggatggaagtttacggccaccaaaaaagacatgtcacctcaaaaattttggggcttaacgcgatctgctctgttgcccacgatcccagacactgaagatgaaataagtccagacaaagtaatactttgcttgtaaacagatgtgatagagataaagttatctaacaaattggttatattctaagatctgctttggaaattattgcctctgatacatacctaagtaaacataacattaatacctaagtaaacataacattacttggagggttgcagtttctaagtgaaactgtatttgaaacttttaagtatactttaggaaacaagcatgaacggcagtctagaataccagaaacatctacttgggtagcttggtgccattatcctgtggaatctgatatgtctggtagcatgtcattgatgggacatgaagacatctttggaaatgatgagattatttcctgtgttaaaaaaaaaaaaaatcttaaattcctacaatgtgaaactgaaactaataatttgatcctgatgtatgggacagcgtatctgtaccagtgctctaaataacaaaagctagggtgacaagtacatgttccttttggaaagaagcaaggcaatgtatattaattattctaaaagggctttgttcctttccattttctttaacttctctgagatactgatttgtaaattttgaaaattagttaaaatatgcagttttttgagcccacgaatagttgtcatttcctttatgtgcctgttagtaaaaagtagtattgtgtatttgctcagtatctgaactataagcccatttatactgttccatacaaaagctatttttcaaaaattaatttgaaccaaaactactactatagggaaaagatgccaaaacatgtcccctcacccagactaaacttgatactgtattattttgttcaatgtaaattgaagaaaatctgtaagtaagtaaaccttaagtgtgaaactaaacatgttctttgttcaaataatgtaaaatatctactcataattttaaagttctaaaaaggctgctttgccacctacctctttgcttatattcaagggtttagtgggtccttccttccacatttgtatgataactttcgttttattggtagtcctttgctactttaaaactaatcaggttaaatgtttactcaaatgtagtaatagtatgaggccaaaatacatgccttgaaggtggagtgaaatcagttgagtgtcacactgcatatttatgtaaatagagtaaatgaaaattcaagaatacttccaatcaggatatgcccctgccttattttttctaaggtctacttttactactttaataattttgggtttgtgtg

SEQ ID NO: 8972 - protein, 128 aa, Homo sapiens
MNKCTSLCCKQCQETEITTKNEIFSLSLCGPMAAYVNPHGYVHETLTVYKACNLNLIGRPSTEHSWFPGYAWTVAQCKICASHIGWKFTATKKDMSPQKFWGLTRSALLPTIPDTEDEISPDKVILCL

SEQ ID NO: 8973 - DNA, 1949 bp, Homo sapiens
atggaggcatttaaactgggactgagatgggactgagtgattaaattgctaccagtgttagttttaagagttgaaaagcttaatagtaaattttaataagcccatgaacttgattatggctacctttattttaaacaaggagaccttaatggacagaatcaagaaacagctacgtgaatgggatgaaaatctaaaagatgattctcttccttcaaatccaatagatttttcttacagagtagctgcttgtcttcctattgatgatgtattgagaattcagctccttaaaattggcagtgctatccagcgacttcgctgtgaattagacattatgaataaatgtacttccctttgctgtaaacaatgtcaagaaacagaaataacaaccaaaaatgaaatattcagtttatccttatgtgggccgatggcagcttatgtgaatcctcatggatatgtgcatgagacacttactgtgtataaggcttgcaacttgaatctgataggccggccttctacagaacacagctggtttcctgggtatgcctggactgttgcccagtgtaagatctgtgcaagccatattggatggaagtttacggccaccaaaaaagacatgtcacctcaaaaattttggggcttaacgcgatctgctctgttgcccacgatcccagacactgaagatgaaataagtccagacaaagtaatactttgcttgtaaacagatgtgatagagataaagttatctaacaaattggttatattctaagatctgctttggaaattattgcctctgatacatacctaagtaaacataacattaatacctaagtaaacataacattacttggagggttgcagtttctaagtgaaactgtatttgaaacttttaagtatactttaggaaacaagcatgaacggcagtctagaataccagaaacatctacttgggtagcttggtgccattatcctgtggaatctgatatgtctggtagcatgtcattgatgggacatgaagacatctttggaaatgatgagattatttcctgtgttaaaaaaaaaaaaaatcttaaattcctacaatgtgaaactgaaactaataatttgatcctgatgtatgggacagcgtatctgtaccagtgctctaaataacaaaagctagggtgacaagtacatgttccttttggaaagaagcaaggcaatgtatattaattattctaaaagggctttgttcctttccattttctttaacttctctgagatactgatttgtaaattttgaaaattagttaaaatatgcagttttttgagcccacgaatagttgtcatttcctttatgtgcctgttagtaaaaagtagtattgtgtatttgctcagtatctgaactataagcccatttatactgttccatacaaaagctatttttcaaaaattaatttgaaccaaaactactactatagggaaaagatgccaaaacatgtcccctcacccagactaaacttgatactgtattattttgttcaatgtaaattgaagaaaatctgtaagtaagtaaaccttaagtgtgaaactaaacatgttctttgttcaaataatgtaaaatatctactcataattttaaagttctaaaaaggctgctttgccacctacctctttgcttatattcaagggtttagtgggtccttccttccacatttgtatgataactttcgttttattggtagtcctttgctactttaaaactaatcaggttaaatgtttactcaaatgtagtaatagtatgaggccaaaatacatgccttgaaggtggagtgaaatcagttgagtgtcacactgcatatttatgtaaatagagtaaatgaaaattcaagaatacttccaatcaggatatgcccctgccttattttttctaaggtctacttttactactttaataattttgggtttgtgtg

SEQ ID NO: 8974 - protein, 204 aa, Homo sapiens [sequence omitted]

SEQ ID NO: 8975 - DNA, 4196 bp, Homo sapiens
tcccagcactttgggaggccaaggcagggggattgcttgaagccaggcattcaagaccagcctgggcaacatggtgaaaccccatctctacaaatacaaaaattagccaggtttggtggcatgtggctgtagtcccagctgcttgagaggctgaggtggaaggattgattgagcctgggaggtcaaggctgccgtgagctgagattgtgtcactgtactccagcctggacaacagagcaagactgtctcaaaagggaaaaaaaaaggtatcacaagactctttagagttttattaagcatgtgaaattttgttgggttgggtgatagttacatttagaacattaaagcatccatattttactgttttggtttttctctaaacaagtatattaacttacgtctcttgatcattagtctattaattaatgcatccaggagggtttttgctccttaaagtttaacactaggcattgccacattttgcaaaactaagggacagtgctgaaatggtttaaagaatctggatttcagatcagagactgacttcagagtctgatttctgtcacttactctgtgggcctggagcaaattacttctccaaggacctatgaaatggatataatggtagctattgtacctggtgtgcatagcgggcattcaataaatgctagccatttcccttaatgaatcactgcccacaaatctggagtcctgggaaaactcaacaacatgcacgacactaaaggaaactgcagttgatctccgctctttagcagcttttcagcaattacaaagacacaatatatgagtttttgcatgttttgcatatgcttgtgaaaattatgtagtaaataggtgccaagtaaggtatgtagatagcaagtgctagtgcaatttataggtgccataatccctatggactgggtcagaaatggcctaatagaaggcagaagagaggccagttccaagcaggggcatagaacagaacaatctgcaagggagttgggagcatataccgctgggttaagacagtgagtgagaaaaggctggaaggcagacagtgctgggcaaaggagctggagcttgatcattgctgcatacgaaaatggaggcatttaaactgggactgagatgggactgagtgattaaattgctaccagtgttagttttaagagttgaaaagcttaatagtaaattttaataagcccatgaacttgattatggctacctttattttaaacaaggagaccttaatggacagaatcaagaaacagctacgtgaatgggatgaaaatctaaaagatgattctcttccttcaaatccaataggtatgaaaagttagtttcctgcctggagcctgggatgtcttgctataaaaaatagctttttcatggatgcgatccaatcatatcttctaggttttaagactgattaaaacattttaattctgaaaagcataatttcctttgagcagttgaaaaaaaatgagtattttaaaattaattgcaataaaatcctcatattctgtgagcactccaattttagacaagttttccataaaaagttcaaattgcaggaagtggctgtcatccaaaaacacttcctgtgtaaggactcctttccctgttcttcaaggtgcctttaaaagaagtgagtctagttccaggacttgccttaattatagatactctctttatctgtttataaggtatagtttagttatttttctagtctcttggcaaataacttctaacatggatttgagttcatgtttaacataaaaggattttaccaaaaaaagtataagaaaagcaattaaatttagagcttctgaaaagtgtatctttgacagctggtatatttttgtattgtttatacttgtataaaatgtgtaaccttaaagagaagggtttatttcaaaaggatattatccgatttgtaagttctctgatgcttatctgactcctaagtttaaaacttgaaaaaccatgtcttgaagatttttcttacagagtagctgcttgtcttcctattgatgatgtattgagaattcagctccttaaaattggcagtgctatccagcgacttcgctgtgaattagacattatgaataaagtgagtaaagtgaatatgtttttgatgcccatgttttattcaggctggagaactaggatgctctgttggggccaatggagctctgtatagagtccagtaatgtagtcatgcaattcagatttcaattgggatcttacaaacaaactcattgttttgtgtttgtcaaatatgaatacatttatcaacttagtgaaaaataacttgatttctgcatggaaatatccaaggttatatatcactattcctttactctagagaaggtcatttagttttatgtaaatatgtggcagatctcagtttcagtgactttcgtgctccatctttaaaagtgtttttgaatgcttggaaggaaaatgtgatattcagagagagcaatatctttataagtaagtttcttgatgatctatgtgattacatgataaagtgaatgccagtttttcctaccaataatttttctctcaaatcttttagtgtacttccctttgctgtaaacaatgtcaagaaacagaaataacaaccaaaaatgaaatattcagtttatccttatgtgggccgatggcagcttatgtgaatcctcatggatatgtgcatgagacacttactgtgtataaggcttgcaacttgaatctgataggccggccttctacagaacacagctggtttcctgggtatgcctggactgttgcccagtgtaagatctgtgcaagccatattggatggaagtttacggccaccaaaaaagacatgtcacctcaaaaattttggggcttaacgcgatctgctctgttgcccacgatcccagacactgaagatgaaataagtccagacaaagtaatactttgcttgtaaacagatgtgatagagataaagttatctaacaaattggttatattctaagatctgctttggaaattattgcctctgatacatacctaagtaaacataacattaatacctaagtaaacataacattacttggagggttgcagtttctaagtgaaactgtatttgaaacttttaagtatactttaggaaacaagcatgaacggcagtctagaataccagaaacatctacttgggtagcttggtgccattatcctgtggaatctgatatgtctggtagcatgtcattgatgggacatgaagacatctttggaaatgatgagattatttcctgtgttaaaaaaaaaaaaaatcttaaattcctacaatgtgaaactgaaactaataatttgatcctgatgtatgggacagcgtatctgtaccagtgctctaaataacaaaagctagggtgacaagtacatgttccttttggaaagaagcaaggcaatgtatattaattattctaaaagggctttgttcctttccattttctttaacttctctgagatactgatttgtaaattttgaaaattagttaaaatatgcagttttttgagcccacgaatagttgtcatttcctttatgtgcctgttagtaaaaagtagtattgtgtatttgctcagtatctgaactataagcccatttatactgttccatacaaaagctatttttcaaaaattaatttgaaccaaaactactactatagggaaaagatgccaaaacatgtcccctcacccagactaaacttgatactgtattattttgttcaatgtaaattgaagaaaatctgtaagtaagtaaaccttaagtgtgaaactaaacatgttctttgttcaaataatgtaaaatatctactcataattttaaagttctaaaaaggctgctttgccacctacctctttgcttatattcaagggtttagtgggtccttccttccacatttgtatgataactttcgttttattggtagtcctttgctactttaaaactaatcaggttaaatgtttactcaaatgtagtaatagtatgaggccaaaatacatgccttgaaggtggagtgaaatcagttgagtgtcacactgcatatttatgtaaatagagtaaatgaaaattcaagaatacttccaatcaggatatgcccctgccttattttttctaaggtctacttttactactttaataattttgggtttgtgtg

SEQ ID NO: 8976 - protein, 97 aa, Homo sapiens [sequence omitted]

SEQ ID NO: 8977 - DNA, 2580 bp, Homo sapiens
tcctttgcgggtaaacagacatggccggcgaaggagatcagcaggacgctgcgcacaacatgggcaaccacctgccgctcctgcctgcagagagtgaggaagaagatgaaatggaagttgaagaccaggatagtaaagaagccaaaaaaccaaacatcataaattttgacaccagtctgccgacatcacatacatacctaggtgctgatatggaagaatttcatggcaggactttgcacgatgacgacagctgtcaggtgattccagttcttccacaagtgatgatgatcctgattcccggacagacattacctcttcagctttttcaccctcaagaagtcagtatggtgcggaatttaattcagaaagatagaacctttgctgttcttgcatacagcaatgtacaggaaagggaagcacagtttggaacaacagcagagatatatgcctatcgagaagaacaggattttggaattgagatagtgaaagtgaaagcaattggaagacaaaggttcaaagtccttgagctaagaacacagtcagatggaatccagcaagctaaagtgcaaattcttcccgaatgtgtgttgccttcaaccatgtctgcagttcaattagaatccctcaataagtgccagatatttccttcaaaacctgtctcaagagaagaccaatgttcatataaatggtggcagaaataccagaagagaaagtttcattgtgcaaatctaacttcatggcctcgctggctgtattccttatatgatgctgagaccttaatggacagaatcaagaaacagctacgtgaatgggatgaaaatctaaaagatgattctcttccttcaaatccaatagatttttcttacagagtagctgcttgtcttcctattgatgatgtattgagaattcagctccttaaaattggcagtgctatccagcgacttcgctgtgaattagacattatgaataaatgtacttccctttgctgtaaacaatgtcaagaaacagaaataacaaccaaaaatgaaatattcagtttatccttatgtgggccgatggcagcttatgtgaatcctcatggatatgtgcatgagacacttactgtgtataaggcttgcaacttgaatctgataggccggccttctacagaacacagctggtttcctgggtatgcctggactgttgcccagtgtaagatctgtgcaagccatattggatggaagtttacggccaccaaaaaagacatgtcacctcaaaaattttggggcttaacgcgatctgctctgttgcccacgatcccagacactgaagatgaaataagtccagacaaagtaatactttgcttgtaaacagatgtgatagagataaagttatctaacaaattggttatattctaagatctgctttggaaattattgcctctgatacatacctaagtaaacataacattaatacctaagtaaacataacattacttggagggttgcagtttctaagtgaaactgtatttgaaacttttaagtatactttaggaaacaagcatgaacggcagtctagaataccagaaacatctacttgggtagcttggtgccattatcctgtggaatctgatatgtctggtagcatgtcattgatgggacatgaagacatctttggaaatgatgagattatttcctgtgttaaaaaaaaaaaaaatcttaaattcctacaatgtgaaactgaaactaataatttgatcctgatgtatgggacagcgtatctgtaccagtgctctaaataacaaaagctagggtgacaagtacatgttccttttggaaagaagcaaggcaatgtatattaattattctaaaagggctttgttcctttccattttctttaacttctctgagatactgatttgtaaattttgaaaattagttaaaatatgcagttttttgagcccacgaatagttgtcatttcctttatgtgcctgttagtaaaaagtagtattgtgtatttgctcagtatctgaactataagcccatttatactgttccatacaaaagctatttttcaaaaattaatttgaaccaaaactactactatagggaaaagatgccaaaacatgtcccctcacccagactaaacttgatactgtattattttgttcaatgtaaattgaagaaaatctgtaagtaagtaaaccttaagtgtgaaactaaacatgttctttgttcaaataatgtaaaatatctactcataattttaaagttctaaaaaggctgctttgccacctacctctttgcttatattcaagggtttagtgggtccttccttccacatttgtatgataactttcgttttattggtagtcctttgctactttaaaactaatcaggttaaatgtttactcaaatgtagtaatagtatgaggccaaaatacatgccttgaaggtggagtgaaatcagttgagtgtcacactgcatatttatgtaaatagagtaaatgaaaattcaagaatacttccaatcaggatatgcccctgccttattttttctaaggtctacttttactactttaataattttgggtttgtgtg

SEQ ID NO: 8978 - protein, 442 aa, Homo sapiens [sequence omitted]

SEQ ID NO: 8979 - DNA, 1255 bp, Homo sapiens
ataaatgtacttccctttgctgtaaacaatgtcaagaaacagaaataacaaccaaaaatgaaatattcagtttatccttatgtgggccgatggcagcttatgtgaatcctcatggatatgtgcatgagacacttactgtgtataaggcttgcaacttgaatctgataggccggccttctacagaacacagctggtttcctgggtatgcctggactgttgcccagtgtaagatctgtgcaagccatattggatggaagtttacggccaccaaaaaagacatgtcacctcaaaaattttggggcttaacgcgatctgctctgttgcccacgatcccagacactgaagatgaaataagtccagacaaagtaatactttgcttgtaaacagatgtgatagagataaagttatctaacaaattggttatattctaagatctgctttggaaattattgcctctgatacatacctaagtaaacataacattaatacctaagtaaacataacattacttggagggttgcagtttctaagtgaaactgtatttgaaacttttaagtatactttaggaaacaagcatgaacggcagtctagaataccagaaacatctacttgggtagcttggtgccattatcctgtggaatctgatatgtctggtagcatgtcattgatgggacatgaagacatctttggaaatgatgagattatttcctgtgttaaaaaaaaaaaaaatcttaaattcctacaatgtgaaactgaaactaataatttgatcctgatgtatgggacagcgtatctgtaccagtgctctaaataacaaaagctagggtgacaagtacatgttccttttggaaagaagcaaggcaatgtatattaattattctaaaagggctttgttcctttccattttctttaacttctctgagatactgatttgtaaattttgaaaattagttaaaatatgcagttttttgagcccacgaatagttgtcatttcctttatgtgcctgttagtaaaaagtagtattgtgtatttgctcagtatctgaactataagcccatttatactgttccatacaaaagctatttttcaaaaattaatttgaaccaaaactactactatagggaaaagatgccaaaacatgtcccctcacccagactaaacttgatactgtattattttgttcaatgtaaattgaagaaaatctgtaagtaagtaaaccttaagtgtgaaactaaacatgttctttgttcaaat

SEQ ID NO: 8980 - protein, 97 aa, Homo sapiens [sequence omitted]

SEQ ID NO: 8981 - DNA, 2058 bp, Homo sapiens
ctcttccttcaaatccaataggtatgaaaagttagtttcctgcctggagcctgggatgtcttgctataaaaaatagctttttcatggatgcgatccaatcatatcttctaggttttaagactgattaaaacattttaattctgaaaagcataatttcctttgagcagttgaaaaaaaatgagtattttaaaattaattgcaataaaatcctcatattctgtgagcactccaattttagacaagttttccataaaaagttcaaattgcaggaagtggctgtcatccaaaaacacttcctgtgtaaggactcctttccctgttcttcaaggtgcctttaaaagaagtgagtctagttccaggacttgccttaattatagatactctctttatctgtttataaggtatagtttagttatttttctagtctcttggcaaataacttctaacatggatttgagttcatgtttaacataaaaggattttaccaaaaaaagtataagaaaagcaattaaatttagagcttctgaaaagtgtatctttgacagctggtatatttttgtattgtttatacttgtataaaatgtgtaaccttaaagagaagggtttatttcaaaaggatattatccgatttgtaagttctctgatgcttatctgactcctaagtttaaaacttgaaaaaccatgtcttgaagatttttcttacagagtagctgcttgtcttcctattgatgatgtattgagaattcagctccttaaaattggcagtgctatccagcgacttcgctgtgaattagacattatgaataaatgtacttccctttgctgtaaacaatgtcaagaaacagaaataacaaccaaaaatgaaatattcagtttatccttatgtgggccgatggcagcttatgtgaatcctcatggatatgtgcatgagacacttactgtgtataaggcttgcaacttgaatctgataggccggccttctacagaacacagctggtttcctgggtatgcctggactgttgcccagtgtaagatctgtgcaagccatattggatggaagtttacggccaccaaaaaagacatgtcacctcaaaaattttggggcttaacgcgatctgctctgttgcccacgatcccagacactgaagatgaaataagtccagacaaagtaatactttgcttgtaaacagatgtgatagagataaagttatctaacaaattggttatattctaagatctgctttggaaattattgcctctgatacatacctaagtaaacataacattaatacctaagtaaacataacattacttggagggttgcagtttctaagtgaaactgtatttgaaacttttaagtatactttaggaaacaagcatgaacggcagtctagaataccagaaacatctacttgggtagcttggtgccattatcctgtggaatctgatatgtctggtagcatgtcattgatgggacatgaagacatctttggaaatgatgagattatttcctgtgttaaaaaaaaaaaaaatcttaaattcctacaatgtgaaactgaaactaataatttgatcctgatgtatgggacagcgtatctgtaccagtgctctaaataacaaaagctagggtgacaagtacatgttccttttggaaagaagcaaggcaatgtatattaattattctaaaagggctttgttcctttccattttctttaacttctctgagatactgatttgtaaattttgaaaattagttaaaatatgcagttttttgagcccacgaatagttgtcatttcctttatgtgcctgttagtaaaaagtagtattgtgtatttgctcagtatctgaactataagcccatttatactgttccatacaaaagctatttttcaaaaattaatttgaaccaaaactactactatagggaaaagatgccaaaacatgtcccctcacccagactaaacttgatactgtattattttgttcaatgtaaattgaagaaaatctgtaagtaagtaaaccttaagtgtgaaactaaacatgttctttgttcaaat

SEQ ID NO: 8982 - protein, 128 aa, Homo sapiens; identical to SEQ ID NO: 8972

SEQ ID NO: 8983 - DNA, 1590 bp, Homo sapiens
atggaggcatttaaactgggactgagatgggactgagtgattaaattgctaccagtgttagttttaagagttgaaaagcttaatagtaaattttaataagcccatgaacttgattatggctacctttattttaaacaaggagaccttaatggacagaatcaagaaacagctacgtgaatgggatgaaaatctaaaagatgattctcttccttcaaatccaatagatttttcttacagagtagctgcttgtcttcctattgatgatgtattgagaattcagctccttaaaattggcagtgctatccagcgacttcgctgtgaattagacattatgaataaatgtacttccctttgctgtaaacaatgtcaagaaacagaaataacaaccaaaaatgaaatattcagtttatccttatgtgggccgatggcagcttatgtgaatcctcatggatatgtgcatgagacacttactgtgtataaggcttgcaacttgaatctgataggccggccttctacagaacacagctggtttcctgggtatgcctggactgttgcccagtgtaagatctgtgcaagccatattggatggaagtttacggccaccaaaaaagacatgtcacctcaaaaattttggggcttaacgcgatctgctctgttgcccacgatcccagacactgaagatgaaataagtccagacaaagtaatactttgcttgtaaacagatgtgatagagataaagttatctaacaaattggttatattctaagatctgctttggaaattattgcctctgatacatacctaagtaaacataacattaatacctaagtaaacataacattacttggagggttgcagtttctaagtgaaactgtatttgaaacttttaagtatactttaggaaacaagcatgaacggcagtctagaataccagaaacatctacttgggtagcttggtgccattatcctgtggaatctgatatgtctggtagcatgtcattgatgggacatgaagacatctttggaaatgatgagattatttcctgtgttaaaaaaaaaaaaaatcttaaattcctacaatgtgaaactgaaactaataatttgatcctgatgtatgggacagcgtatctgtaccagtgctctaaataacaaaagctagggtgacaagtacatgttccttttggaaagaagcaaggcaatgtatattaattattctaaaagggctttgttcctttccattttctttaacttctctgagatactgatttgtaaattttgaaaattagttaaaatatgcagttttttgagcccacgaatagttgtcatttcctttatgtgcctgttagtaaaaagtagtattgtgtatttgctcagtatctgaactataagcccatttatactgttccatacaaaagctatttttcaaaaattaatttgaaccaaaactactactatagggaaaagatgccaaaacatgtcccctcacccagactaaacttgatactgtattattttgttcaatgtaaattgaagaaaatctgtaagtaagtaaaccttaagtgtgaaactaaacatgttctttgttcaaat

SEQ ID NO: 8984 - protein, 204 aa, Homo sapiens [sequence omitted]

SEQ ID NO: 8985 - DNA, 4546 bp, Homo sapiens
aggaacttcatcatgaagtctcaagtaaacgaacattttatctttcttgggattctatcacttcttaatgtttgcccttatagtgattcagctgattctcatttaaagtttttacacaaaaacagtttggattatatcttgaggttttcacttcagatactggacaagtaattagtataaaggcaactaacatggtcataatagaagtatggtgtttactctcaacatttatcttcccaaagttgtcttcagcattgaaattttaatgtttgacctttttaaataggaatgaagattctagttacaatatatatttgaaggatataggaagcatgatttcacacttcatagatagtcacgtcatgggattatctacaaaattttttatctttttaaaattagatgttttcctaggccaaaatcatttttcagatgttgctcattccagcattagaatctttattctgtggggttttttaagtgcctttttgttttgttttcagagaaagtttcattgtgcaaatctaacttcatggcctcgctggctgtattccttatatgatgctgtaagtaacttaccttaaatttactttatatatggtaggccatgtcataattaagggtcattaaaaaacaaaggtttagtttttccagtttctagtgccttataacttaagatatcgttaagagtggtggctcacacctgtaatcccagcactttgggaggccaaggcagggggattgcttgaagccaggcattcaagaccagcctgggcaacatggtgaaaccccatctctacaaatacaaaaattagccaggtttggtggcatgtggctgtagtcccagctgcttgagaggctgaggtggaaggattgattgagcctgggaggtcaaggctgccgtgagctgagattgtgtcactgtactccagcctggacaacagagcaagactgtctcaaaagggaaaaaaaaaggtatcacaagactctttagagttttattaagcatgtgaaattttgttgggttgggtgatagttacatttagaacattaaagcatccatattttactgttttggtttttctctaaacaagtatattaacttacgtctcttgatcattagtctattaattaatgcatccaggagggtttttgctccttaaagtttaacactaggcattgccacattttgcaaaactaagggacagtgctgaaatggtttaaagaatctggatttcagatcagagactgacttcagagtctgatttctgtcacttactctgtgggcctggagcaaattacttctccaaggacctatgaaatggatataatggtagctattgtacctggtgtgcatagcgggcattcaataaatgctagccatttcccttaatgaatcactgcccacaaatctggagtcctgggaaaactcaacaacatgcacgacactaaaggaaactgcagttgatctccgctctttagcagcttttcagcaattacaaagacacaatatatgagtttttgcatgttttgcatatgcttgtgaaaattatgtagtaaataggtgccaagtaaggtatgtagatagcaagtgctagtgcaatttataggtgccataatccctatggactgggtcagaaatggcctaatagaaggcagaagagaggccagttccaagcaggggcatagaacagaacaatctgcaagggagttgggagcatataccgctgggttaagacagtgagtgagaaaaggctggaaggcagacagtgctgggcaaaggagctggagcttgatcattgctgcatacgaaaatggaggcatttaaactgggactgagatgggactgagtgattaaattgctaccagtgttagttttaagagttgaaaagcttaatagtaaattttaataagcccatgaacttgattatggctacctttattttaaacaaggagaccttaatggacagaatcaagaaacagctacgtgaatgggatgaaaatctaaaagatgattctcttccttcaaatccaataggtatgaaaagttagtttcctgcctggagcctgggatgtcttgctataaaaaatagctttttcatggatgcgatccaatcatatcttctaggttttaagactgattaaaacattttaattctgaaaagcataatttcctttgagcagttgaaaaaaaatgagtattttaaaattaattgcaataaaatcctcatattctgtgagcactccaattttagacaagttttccataaaaagttcaaattgcaggaagtggctgtcatccaaaaacacttcctgtgtaaggactcctttccctgttcttcaaggtgcctttaaaagaagtgagtctagttccaggacttgccttaattatagatactctctttatctgtttataaggtatagtttagttatttttctagtctcttggcaaataacttctaacatggatttgagttcatgtttaacataaaaggattttaccaaaaaaagtataagaaaagcaattaaatttagagcttctgaaaagtgtatctttgacagctggtatatttttgtattgtttatacttgtataaaatgtgtaaccttaaagagaagggtttatttcaaaaggatattatccgatttgtaagttctctgatgcttatctgactcctaagtttaaaacttgaaaaaccatgtcttgaagatttttcttacagagtagctgcttgtcttcctattgatgatgtattgagaattcagctccttaaaattggcagtgctatccagcgacttcgctgtgaattagacattatgaataaagtgagtaaagtgaatatgtttttgatgcccatgttttattcaggctggagaactaggatgctctgttggggccaatggagctctgtatagagtccagtaatgtagtcatgcaattcagatttcaattgggatcttacaaacaaactcattgttttgtgtttgtcaaatatgaatacatttatcaacttagtgaaaaataacttgatttctgcatggaaatatccaaggttatatatcactattcctttactctagagaaggtcatttagttttatgtaaatatgtggcagatctcagtttcagtgactttcgtgctccatctttaaaagtgtttttgaatgcttggaaggaaaatgtgatattcagagagagcaatatctttataagtaagtttcttgatgatctatgtgattacatgataaagtgaatgccagtttttcctaccaataatttttctctcaaatcttttagtgtacttccctttgctgtaaacaatgtcaagaaacagaaataacaaccaaaaatgaaatattcagtttatccttatgtgggccgatggcagcttatgtgaatcctcatggatatgtgcatgagacacttactgtgtataaggcttgcaacttgaatctgataggccggccttctacagaacacagctggtttcctgggtatgcctggactgttgcccagtgtaagatctgtgcaagccatattggatggaagtttacggccaccaaaaaagacatgtcacctcaaaaattttggggcttaacgcgatctgctctgttgcccacgatcccagacactgaagatgaaataagtccagacaaagtaatactttgcttgtaaacagatgtgatagagataaagttatctaacaaattggttatattctaagatctgctttggaaattattgcctctgatacatacctaagtaaacataacattaatacctaagtaaacataacattacttggagggttgcagtttctaagtgaaactgtatttgaaacttttaagtatactttaggaaacaagcatgaacggcagtctagaataccagaaacatctacttgggtagcttggtgccattatcctgtggaatctgatatgtctggtagcatgtcattgatgggacatgaagacatctttggaaatgatgagattatttcctgtgttaaaaaaaaaaaaaatcttaaattcctacaatgtgaaactgaaactaataatttgatcctgatgtatgggacagcgtatctgtaccagtgctctaaataacaaaagctagggtgacaagtacatgttccttttggaaagaagcaaggcaatgtatattaattattctaaaagggctttgttcctttccattttctttaacttctctgagatactgatttgtaaattttgaaaattagttaaaatatgcagttttttgagcccacgaatagttgtcatttcctttatgtgcctgttagtaaaaagtagtattgtgtatttgctcagtatctgaactataagcccatttatactgttccatacaaaagctatttttcaaaaattaatttgaaccaaaactactactatagggaaaagatgccaaaacatgtcccctcacccagactaaacttgatactgtattattttgttcaatgtaaattgaagaaaatctgtaagtaagtaaaccttaagtgtgaaactaaacatgttctttgttcaaat

SEQ ID NO: 8986 - protein, 97 aa, Homo sapiens [sequence omitted]

SEQ ID NO: 8987 - DNA, 2221 bp, Homo sapiens
tcctttgcgggtaaacagacatggccggcgaaggagatcagcaggacgctgcgcacaacatgggcaaccacctgccgctcctgcctgcagagagtgaggaagaagatgaaatggaagttgaagaccaggatagtaaagaagccaaaaaaccaaacatcataaattttgacaccagtctgccgacatcacatacatacctaggtgctgatatggaagaatttcatggcaggactttgcacgatgacgacagctgtcaggtgattccagttcttccacaagtgatgatgatcctgattcccggacagacattacctcttcagctttttcaccctcaagaagtcagtatggtgcggaatttaattcagaaagatagaacctttgctgttcttgcatacagcaatgtacaggaaagggaagcacagtttggaacaacagcagagatatatgcctatcgagaagaacaggattttggaattgagatagtgaaagtgaaagcaattggaagacaaaggttcaaagtccttgagctaagaacacagtcagatggaatccagcaagctaaagtgcaaattcttcccgaatgtgtgttgccttcaaccatgtctgcagttcaattagaatccctcaataagtgccagatatttccttcaaaacctgtctcaagagaagaccaatgttcatataaatggtggcagaaataccagaagagaaagtttcattgtgcaaatctaacttcatggcctcgctggctgtattccttatatgatgctgagaccttaatggacagaatcaagaaacagctacgtgaatgggatgaaaatctaaaagatgattctcttccttcaaatccaatagatttttcttacagagtagctgcttgtcttcctattgatgatgtattgagaattcagctccttaaaattggcagtgctatccagcgacttcgctgtgaattagacattatgaataaatgtacttccctttgctgtaaacaatgtcaagaaacagaaataacaaccaaaaatgaaatattcagtttatccttatgtgggccgatggcagcttatgtgaatcctcatggatatgtgcatgagacacttactgtgtataaggcttgcaacttgaatctgataggccggccttctacagaacacagctggtttcctgggtatgcctggactgttgcccagtgtaagatctgtgcaagccatattggatggaagtttacggccaccaaaaaagacatgtcacctcaaaaattttggggcttaacgcgatctgctctgttgcccacgatcccagacactgaagatgaaataagtccagacaaagtaatactttgcttgtaaacagatgtgatagagataaagttatctaacaaattggttatattctaagatctgctttggaaattattgcctctgatacatacctaagtaaacataacattaatacctaagtaaacataacattacttggagggttgcagtttctaagtgaaactgtatttgaaacttttaagtatactttaggaaacaagcatgaacggcagtctagaataccagaaacatctacttgggtagcttggtgccattatcctgtggaatctgatatgtctggtagcatgtcattgatgggacatgaagacatctttggaaatgatgagattatttcctgtgttaaaaaaaaaaaaaatcttaaattcctacaatgtgaaactgaaactaataatttgatcctgatgtatgggacagcgtatctgtaccagtgctctaaataacaaaagctagggtgacaagtacatgttccttttggaaagaagcaaggcaatgtatattaattattctaaaagggctttgttcctttccattttctttaacttctctgagatactgatttgtaaattttgaaaattagttaaaatatgcagttttttgagcccacgaatagttgtcatttcctttatgtgcctgttagtaaaaagtagtattgtgtatttgctcagtatctgaactataagcccatttatactgttccatacaaaagctatttttcaaaaattaatttgaaccaaaactactactatagggaaaagatgccaaaacatgtcccctcacccagactaaacttgatactgtattattttgttcaatgtaaattgaagaaaatctgtaagtaagtaaaccttaagtgtgaaactaaacatgttctttgttcaaat

SEQ ID NO: 8988 - protein, 442 aa, Homo sapiens [sequence omitted]

SEQ ID NO: 8989 - DNA, 1681 bp, Homo sapiens
tcctttgcgggtaaacagacatggccggcgaaggagatcagcaggacgctgcgcacaacatgggcaaccacctgccgctcctgcctgcagagagtgaggaagaagatgaaatggaagttgaagaccaggatagtaaagaagccaaaaaaccaaacatcataaattttgacaccagtctgccgacatcacatacatacctaggtgctgatatggaagaatttcatggcaggactttgcacgatgacgacagctgtcaggtgattccagttcttccacaagtgatgatgatcctgattcccggacagacattacctcttcagctttttcaccctcaagaagtcagtatggtgcggaatttaattcagaaagatagaacctttgctgttcttgcatacagcaatgtacaggaaagggaagcacagtttggaacaacagcagagatatatgcctatcgagaagaacaggattttggaattgagatagtgaaagtgaaagcaattggaagacaaaggttcaaagtccttgagctaagaacacagtcagatggaatccagcaagctaaagtgcaaattcttcccgaatgtgtgttgccttcaaccatgtctgcagttcaattagaatccctcaataagtgccagatatttccttcaaaacctgtctcaagagaagaccaatgttcatataaatggtggcagaaataccagaagagaaagtttcattgtgcaaatctaacttcatggcctcgctggctgtattccttatatgatgctgagaccttaatggacagaatcaagaaacagctacgtgaatgggatgaaaatctaaaagatgattctcttccttcaaatccaatagatttttcttacagagtagctgcttgtcttcctattgatgatgtattgagaattcagctccttaaaattggcagtgctatccagcgacttcgctgtgaattagacattatgaataaatgtacttccctttgctgtaaacaatgtcaagaaacagaaataacaaccaaaaatgaaatattcagtttatccttatgtgggccgatggcagcttatgtgaatcctcatggatatgtgcatgagacacttactgtgtataaggcttgcaacttgaatctgataggccggccttctacagaacacagctggtttcctgggtatgcctggactgttgcccagtgtaagatctgtgcaagccatattggatggaagtttacggccaccaaaaaagacatgtcacctcaaaaattttggggcttaacgcgatctgctctgttgcccacgatcccagacactgaagatgaaataagtccagacaaagtaatactttgcttgtaaacagatgtgatagagataaagttatctaacaaattggttatattctaagatctgctttggaaattattgcctctgatacatacctaagtaaacataacattaatacctaagtaaacataacattacttggagggttgcagtttctaagtgaaactgtatttgaaacttttaagtatactttaggaaacaagcatgaacggcagtctagaataccagaaacatctacttgggtagcttggtgccattatcctgtggaatctgatatgtctggtagcatgtcattgatgggacatgaagacatctttggaaatgatgagattatttcctgtgtt

SEQ ID NO: 8990 - protein, 442 aa, Homo sapiens [sequence omitted]

SEQ ID NO: 8991 - DNA, 429 bp, Homo sapiens
ataaatgtacttccctttgctgtaaacaatgtcaagaaacagaaataacaaccaaaaatgaaatattcagtttatccttatgtgggccgatggcagcttatgtgaatcctcatggatatgtgcatgagacacttactgtgtataaggcttgcaacttgaatctgataggccggccttctacagaacacagctggtttcctgggtatgcctggactgttgcccagtgtaagatctgtgcaagccatattggatggaagtttacggccaccaaaaaagacatgtcacctcaaaaattttggggcttaacgcgatctgctctgttgcccacgatcccagacactgaagatgaaataagtccagacaaagtaatactttgcttgtaaacagatgtgatagagataaagttatctaacaaattggttatattct

SEQ ID NO: 8992 - protein, 97 aa, Homo sapiens [sequence omitted]

SEQ ID NO: 8993 - DNA, 764 bp, Homo sapiens
atggaggcatttaaactgggactgagatgggactgagtgattaaattgctaccagtgttagttttaagagttgaaaagcttaatagtaaattttaataagcccatgaacttgattatggctacctttattttaaacaaggagaccttaatggacagaatcaagaaacagctacgtgaatgggatgaaaatctaaaagatgattctcttccttcaaatccaatagatttttcttacagagtagctgcttgtcttcctattgatgatgtattgagaattcagctccttaaaattggcagtgctatccagcgacttcgctgtgaattagacattatgaataaatgtacttccctttgctgtaaacaatgtcaagaaacagaaataacaaccaaaaatgaaatattcagtttatccttatgtgggccgatggcagcttatgtgaatcctcatggatatgtgcatgagacacttactgtgtataaggcttgcaacttgaatctgataggccggccttctacagaacacagctggtttcctgggtatgcctggactgttgcccagtgtaagatctgtgcaagccatattggatggaagtttacggccaccaaaaaagacatgtcacctcaaaaattttggggcttaacgcgatctgctctgttgcccacgatcccagacactgaagatgaaataagtccagacaaagtaatactttgcttgtaaacagatgtgatagagataaagttatctaacaaattggttatattct

SEQ ID NO: 8994 - protein, 204 aa, Homo sapiens [sequence omitted]

SEQ ID NO: 8995 - DNA, 999 bp, Homo sapiens
tcctttgcgggtaaacagacatggccggcgaaggagatcagcaggacgctgcgcacaacatgggcaaccacctgccgctcctgcctgcagagagtgaggaagaagatgaaatggaagttgaagaccaggatagtaaagaagccaaaaaaccaaacatcataaattttgacaccagtctgccgacatcacatacatacctaggtgctgatatggaagaatttcatggcaggactttgcacgatgacgacagctgtcaggtgattccagttcttccacaagtgatgatgatcctgattcccggacagacattacctcttcagctttttcaccctcaagaagtcagtatggtgcggaatttaattcagaaagatagaacctttgctgttcttgcatacagcaatgtacaggaaagggaagcacagtttggaacaacagcagagatatatgcctatcgagaagaacaggattttggaattgagatagtgaaagtgaaagcaattggaagacaaaggttcaaagtccttgagctaagaacacagtcagatggaatccagcaagctaaagtgcaaattcttcccgaatgtgtgttgccttcaaccatgtctgcagttcaattagaatccctcaataagtgccagatatttccttcaaaacctgtctcaagagaagaccaatgttcatataaatggtggcagaaataccagaaggtgagaaactaattttttatgcatcttcaaaaaatgaagacaggttgttttttttcctgttttaagaaagaaacacaactttcatgattcattacccagccaccttgtatggcaatattccagctacatttgatcctctaaaaattgcacaggcagctactttatgtaaaagcagtttacaaaagcaataaaatgtcacacagctgtaaggtatccttgttattatgcttatcagctatattaatcgcttttgatttttaattccatgggaaatgcttattaaactatgatc

SEQ ID NO: 8996 - protein, 232 aa, Homo sapiens [sequence omitted]

SEQ ID NO: 8997 - DNA, 1018 bp, Homo sapiens
tcctttgcgggtaaacagacatggccggcgaaggagatcagcaggacgctgcgcacaacatgggcaaccacctgccgctcctgcctgcagagagtgaggaagaagatgaaatggaagttgaagaccaggatagtaaagaagccaaaaaaccaaacatcataaattttgacaccagtctgccgacatcacatacatacctaggtgctgatatggaagaatttcatggcaggactttgcacgatgacgacagctgtcaggtgattccagttcttccacaagtgatgatgatcctgattcccggacagacattacctcttcagctttttcaccctcaagaagtcagtatggtgcggaatttaattcagaaagatagaacctttgctgttcttgcatacagcaatgtacaggaaagggaagcacagtttggaacaacagcagagatatatgcctatcgagaagaacaggattttggaattgagatagtgaaagtgaaagcaattggaagacaaaggttcaaagtccttgagctaagaacacagtcagatgggtatagcccagtggtttccaaccttgctatgcatcagaatcacctgggaagcttttaaaactatagaagcttgagttccaacctcatctcccatctccagagagtgatgaggctgcagcatcttttaaaaatgattttcaggtgattctaatgtctctccaggtttgagaacaatcatgtaaatccaaagggaagtgttgtttgggatttggcttctttaggattgaaggcctctcggagcataagaggatagggagaccagaggcttgtgagctgttcgtgtgctcaccaggacagctgtggtttttgtagcattgctatgatgtttgaaagccacactggttacatctgcctactgctccagctgagctataaaagccatttatatttcgtgtccctctccagtgtgaattttatatcacccagaaatgctatttacataataaatgatcaataaatacttgtagtcta

SEQ ID NO: 8998 - protein, 194 aa, Homo sapiens
MAGEGDQQDAAHNMGNHLPLLPAESEEEDEMEVEDQDSKEAKKPNIINFDTSLPTSHTYLGADMEEFHGRTLHDDDSCQVIPVLPQVMMILIPGQTLPLQLFHPQEVSMVRNLIQKDRTFAVLAYSNVQEREAQFGTTAEIYAYREEQDFGIEIVKVKAIGRQRFKVLELRTQSDGYSPVVSNLAMHQNHLGSF

SEQ ID NO: 8999 - DNA, 326 bp, Homo sapiens
agacatggccggcgaaggagatcagcaggacgctgcgcacaacatgggcaaccacctgccgctcctgcctgcagagagtgaggaagaagatgaaatggaagttgaagaccaggatagtaaagaagcctaggtgctgatatggaagaatttcatggcaggactttgcacgatgacgacagctgtcaggtgattccagttcttccacaagtgatgatgatcctgattcccggacagacattacctcttcagctttttcaccctcaagaagtcagtatggtgcggaatttaattcagaaagatagaacctttgctgttcttgcatacag

SEQ ID NO: 9000 - protein, 41 aa, Homo sapiens
MAGEGDQQDAAHNMGNHLPLLPAESEEEDEMEVEDQDSKEA

SEQ ID NO: 9001 - DNA, 3159 bp, Homo sapiens
cgggtcacatggcccgcgggacaacatggctgcgcccgcactagggctggtgtgtggacgttgccctgagctgggtctcgtcctcttgctgctgctgctctcgctgctgtgtggagcggcagggagccaggaggccgggaccggtgcgggcgcggggtcccttgcgggttcttgcggctgcggcacgccccagcggcctggcgcccatggcagttcggcagccgctcaccgatactcgcgggaggctaacgctccgggccccgtacccggagagcggcaactcgcgcactcaaagatggtccccatccctgctggagtatttacaatgggcacagatgatcctcagataaagcaggatggggaagcacctgcgaggagagttactattgatgccttttacatggatgcctatgaagtcagtaatactgaatttgagaagtttgtgaactcaactggctatttgacagaggctgagaagtttggcgactcctttgtctttgaaggcatgttgagtgagcaagtgaagaccaatattcaacaggcagttgcagctgctccctggtggttacctgtgaaaggcgctaactggagacacccagaagggcctgactctactattctgcacaggccggatcatccagttctccatgtgtcctggaatgatgcggttgcctactgcacttgggcagggaagcggctgcccacggaagctgagtgggaatacagctgtcgaggaggcctgcataatagacttttcccctggggcaacaaactgcagcccaaaggccagcattatgccaacatttggcagggcgagtttccggtgaccaacactggtgaggatggcttccaaggaactgcgcctgttgatgccttccctcccaatggttatggcttatacaacatagtggggaacgcatgggaatggacttcagactggtggactgttcatcattctgttgaagaaacgcttaacccaaaaggtcccccttctgggaaagaccgagtgaagaaaggtggatcctacatgtgccataggtcccaagagtactatgatccctattttcaagatgtggcatctgagatgttgagaagacacacagccagcaggtggaaggccttctcatctctagaaccatgctgctcaatacgtaggcatcagcaatatgcagctattgaacgtttgacatgtggcaagtttgaattgagatgtgctagtttaagaaaaatagattgcctcaacaccaacattgcctgtagctactccatgaggcaagatggacccagactccactgtgtggactgacctcccagaaggatcctcctgtccctgaaggccactctgccttcagctacaggccccagtgctgattgtgatacttaacaagggctttcagatgtctgaaacaagagtatagcataaagttaagaatgcggcttctggagagacagacttggtttcaaattcagctctgtgaccttgggtgcacagcaaagtcttcttctccccccgatgaaagaatgggaaggactcaggaaggctcaacttgcaaactccccagtatcaagtggctgccttcaaaatccaacccttctcttcccagctcatttccagtatgtattttcaaaggccatgtcatttttgaagtgcctgagaagaaaacagaactgccagcagactatgggacaaacgactaaatgccctccagacgttccagagtcctctgcctctcaggcttcagttcttcctgaaggaatctggagctggaaagcaggaagcaatttgctgtggaattttttccatcacagactccaagttcctcagcctttggactcttgaacttacaccagtgttttggcaggagcgctcgggcctttggccacagactgaaggctgcattgtcagcttccctacttttgaggttttgggactcagactgatccaccactggcttccttgctcttcaacttgaagacggcctatcgtgagactttacctcgtgattatgtgagtcaattctcctaataaactccccttcgtatgtacatataccctattacttctgtccctttagagaaccctgactaatacagtagagattgcctggacttattaataataatgactctgtttagttaatgtaacagacagataaagacaaatgagtgacacccatgcaattaaaataattttggtggggagtgagaggagttggttctccactcacagtggaaagttttagcgtatactgctgcacatgacatgggagtattttgcacttccactggaaaaaagtaaggggaataaaaacccctggattctacttgctgacttgagagtgactaaagcgatttatctgaaggttccccagggtggattcatagtggactcaggccagattctctgctgatgctttgaacttatgtccagagcatcatctccaccacaaaagagcttgcctgctctgtgtcctggccaaagagatgcacgtgctctctcactgggttgtggctcttgagtaactcctggaattacccagctggaatttctattcctttggaccacaaatttcatatcttcacctgctgcctatatcatgctaaaagatggaaatgtctcaactaaaccatgtaggtggactagcctcattaacaagataagcaatgggccattttctcactggttattaactatgtacattatctatgaaataacatatctggtcatggttactactctattctgtagggtggaatagaaaaaggtagaggatatatatttcagttgcatttttaaaattgtttattttgttttttaattgacaaataatattaggttggtgcaaaagtaattgcagtttttgccattaaaggtagacaaggctgggcacggtggctcagcacgcttgtaatcccagcactttgggaggcagaggcgggcagatcacaaggtcaggagaccgagaccatcctggctaacacggtgaaaccccatctctactaaaaatacaaaaaattagccgggtgtggtggtgggcacctgtagtcccagctactcgggaggctgaggcaggagaatggcgtgaacctgggaggtggagcttgtagtgagctgcaccactgcactccagcctgggcaacagagcaagaccccatatc

SEQ ID NO: 9002 - protein, 426 aa, Homo sapiens
MAAPALGLVCGRCPELGLVLLLLLLSLLCGAAGSQEAGTGAGAGSLAGSCGCGTPQRPGAHGSSAAAHRYSREANAPGPVPGERQLAHSKMVPIPAGVFTMGTDDPQIKQDGEAPARRVTIDAFYMDAYEVSNTEFEKFVNSTGYLTEAEKFGDSFVFEGMLSEQVKTNIQQAVAAAPWWLPVKGANWRHPEGPDSTILHRPDHPVLHVSWNDAVAYCTWAGKRLPTEAEWEYSCRGGLHNRLFPWGNKLQPKGQHYANIWQGEFPVTNTGEDGFQGTAPVDAFPPNGYGLYNIVGNAWEWTSDWWTVHHSVEETLNPKGPPSGKDRVKKGGSYMCHRSQEYYDPYFQDVASEMLRRHTASRWKAFSSLEPCCSIRRHQQYAAIERLTCGKFELRCASLRKIDCLNTNIACSYSMRQDGPRLHCVD

SEQ ID NO: 9003 - DNA, 2128 bp, Homo sapiens
atccaccgcgcggcccaggactgtcagggtagtgggcgttgcgtgaggcgggtaaatgttcgcggaagcggcaaagacgacacggccttgtgggatggcggagtttaaggagaagcctgaggccccgactgagcagctggatgtcgcgtgcggccaggaaaacttgccggtgggcgcgtggcccccgggggccgcgccggcgcccttccagtacactcctgatcatgtagttggacctggagcagacattgatcccactcaaataacctttcccggatgcatttgtgtcaaaactccctgcctccctggcacttgctcctgtctccgccatggagagaactatgatgataactcatgccttagagatataggatctggaggaaagtatgcagagcctgtttttgaatgcaatgtcctgtgccgatgcagtgaccactgcagaaacagagtggtccagaaaggtctacagttccacttccaagtgttcaagacgcataaaaaaggctggggacttcgtaccttggaatttataccgaaaggaaggtttgtctgtgaatatgctggtgaggttttaggattctctgaagttcagagaagaattcacttacaaacaaaatccgactccaattacattatagccatcagggaacatgtttataatgggcaggtaatggaaacatttgttgaccctacttatataggaaatattggaagattccttaatcattcttgtgagccaaaccttttgatgattcctgtccgaattgactcaatggtacctaagttggcactttttgcagccaaagatattgtgccagaagaagaactctcttatgattattcaggaagatatcttaatctaacagtcagtgaagacaaagaaaggctagatcatgggaaactaaggaaaccttgttactgtggtgccaaatcatgtactgctttcctgccttttgacagttctctgtactgccccgtagaaaagtcgaacatcagttgtggaaatgagaaggaacccagcatgtgtggctcagccccttctgtgttcccctcctgcaagcgattgacccttgagactatgaaaatgatgttagacaaaaagcaaattcgagcaattttcttattcgagttcaaaatgggtcgtaaagcagcagaaacaactcgcaacatcaacaatgcatttggcccaggaactgctaacgaacgtacagtgcagtggtggttcaagaagttttgcaaaggagatgagagccttgaagatgaggagcgtagtggccggccatcagaagttgacaacgaccagttgagagcaatcatcgaagctgatccccttacaactacacgagaagttgctgaagaactcaatgtcaaccattctacggtcgttcgacatttgaagcaaattggaaaggtgaaaaagctcgataagtgggtgcctcatgagctgactgaaaatcaaaaaaatcgtcgttttgaagtgtcatcttctcttattctacgcaaccacaacgaaccatttctcgatcggattgtgacgtgtgatgaaaagtggattttatatgacaaccggcgacgatcagctcagtggttggatcaagaagaagctccaaagcacttcccaaagccaatcttgcacccaaaaaaggtcatggtcactatttggtggtctgctgctggtctgatccactacagctttctgaatcccggtgaaaccattacatctgagaagtatgctcaggaaatcgatgagatgaaccaaaaactgcaacgcctgcagctggcattggtcaacagaaagggcccaattcttctccacgacaatgcccgaccgcatgttgcacaacccacacttcaaaagttgaatgaattgggctatgaagttttgcctcatccaccgtattcacctgacctcttgccaaccaactaccacgtctttaagcatctcaacaactttttgcagggaaaacgcttccacaaccagcaggatgcagaaaatgctttccaagagttcgtcgaatcccaaagcacggatttttacgctacaggaataaaccaacttatttctcgttggcaaaaatgtgttgattgtaatggttcctattttgattaataaaaatgcgttgagcct

SEQ ID NO: 9004 - protein, 684 aa, Homo sapiens
MFAEAAKTTRPCGMAEFKEKPEAPTEQLDVACGQENLPVGAWPPGAAPAPFQYTPDHVVGPGADIDPTQITFPGCICVKTPCLPGTCSCLRHGENYDDNSCLRDIGSGGKYAEPVFECNVLCRCSDHCRNRVVQKGLQFHFQVFKTHKKGWGLRTLEFIPKGRFVCEYAGEVLGFSEVQRRIHLQTKSDSNYIIAIREHVYNGQVMETFVDPTYIGNIGRFLNHSCEPNLLMIPVRIDSMVPKLALFAAKDIVPEEELSYDYSGRYLNLTVSEDKERLDHGKLRKPCYCGAKSCTAFLPFDSSLYCPVEKSNISCGNEKEPSMCGSAPSVFPSCKRLTLETMKMMLDKKQIRAIFLFEFKMGRKAAETTRNINNAFGPGTANERTVQWWFKKFCKGDESLEDEERSGRPSEVDNDQLRAIIEADPLTTTREVAEELNVNHSTVVRHLKQIGKVKKLDKWVPHELTENQKNRRFEVSSSLILRNHNEPFLDRIVTCDEKWILYDNRRRSAQWLDQEEAPKHFPKPILHPKKVMVTIWWSAAGLIHYSFLNPGETITSEKYAQEIDEMNQKLQRLQLALVNRKGPILLHDNARPHVAQPTLQKLNELGYEVLPHPPYSPDLLPTNYHVFKHLNNFLQGKRFHNQQDAENAFQEFVESQSTDFYATGINQLISRWQKCVDCNGSYFD

SEQ ID NO: 9005 - DNA, 3057 bp, Homo sapiens
atccaccgcgcggcccaggactgtcagggtagtgggcgttgcgtgaggcgggtaaatgttcgcggaagcggcaaagacgacacggccttgtgggatggcggagtttaaggagaagcctgaggccccgactgagcagctggatgtcgcgtgcggccaggaaaacttgccggtgggcgcgtggcccccgggggccgcgccggcgcccttccagtacactcctgatcatgtagttggacctggagcagacattgatcccactcaaataacctttcccggatgcatttgtgtcaaaactccctgcctccctggcacttgctcctgtctccgccatggagagaactatgatgataactcatgccttagagatataggatctggaggaaagtatgcagagcctgtttttgaatgcaatgtcctgtgccgatgcagtgaccactgcagaaacagagtggtccagaaaggtctacagttccacttccaagtgttcaagacgcataaaaaaggctggggacttcgtaccttggaatttataccgaaaggaaggtttgtctgtgaatatgctggtgaggttttaggattctctgaagttcagagaagaattcacttacaaacaaaatccgactccaattacattatagccatcagggaacatgtttataatgggcaggtaatggaaacatttgttgaccctacttatataggaaatattggaagattccttaatcattcttgtgagccaaaccttttgatgattcctgtccgaattgactcaatggtacctaagttggcactttttgcagccaaagatattgtgccagaagaagaactctcttatgattattcaggaagatatcttaatctaacagtcagtgaagacaaagaaaggctagatcatgggaaactaaggaaaccttgttactgtggtgccaaatcatgtactgctttcctgccttttgacagttctctgtactgccccgtagaaaagtcgaacatcagttgtggaaatgagaaggaacccagcatgtgtggctcagccccttctgtgttcccctcctgcaagcgattgacccttgagactatgaaaatgatgttagacaaaaagcaaattcgagcaattttcttattcgagttcaaaatgggtcgtaaagcagcagaaacaactcgcaacatcaacaatgcatttggcccaggaactgctaacgaacgtacagtgcagtggtggttcaagaagttttgcaaaggagatgagagccttgaagatgaggagcgtagtggccggccatcagaagttgacaacgaccagttgagagcaatcatcgaagctgatccccttacaactacacgagaagttgctgaagaactcaatgtcaaccattctacggtcgttcgacatttgaagcaaattggaaaggtgaaaaagctcgataagtgggtgcctcatgagctgactgaaaatcaaaaaaatcgtcgttttgaagtgtcatcttctcttattctacgcaaccacaacgaaccatttctcgatcggattgtgacgtgtgatgaaaagtggattttatatgacaaccggcgacgatcagctcagtggttggatcaagaagaagctccaaagcacttcccaaagccaatcttgcacccaaaaaaggtcatggtcactatttggtggtctgctgctggtctgatccactacagctttctgaatcccggtgaaaccattacatctgagaagtatgctcaggaaatcgatgagatgaaccaaaaactgcaacgcctgcagctggcattggtcaacagaaagggcccaattcttctccacgacaatgcccgaccgcatgttgcacaacccacacttcaaaagttgaatgaattgggctatgaagttttgcctcatccaccgtattcacctgacctcttgccaaccaactaccacgtctttaagcatctcaacaactttttgcagggaaaacgcttccacaaccagcaggatgcagaaaatgctttccaagagttcgtcgaatcccaaagcacggatttttacgctacaggaataaaccaacttatttctcgttggcaaaaatgtgttgattgtaatggttcctattttgattaataaaaatgcgttgagcctagttataatgatttaaaattcacagtccaaaaccgcagttagttttgcaccaacccaatatcttcatagattgaaatataaattaaaattgcatttgaagtagattccacggactttattaagaatgtagaaatgtggcctggcatggtggcttacaactgtaatcccagcactttgggaggcccaggcgggcagatcacttgagtccaattgttcaggaccagcctgggcaacatagtgagaccctgactctaataaaataattttttaaaaaaagattaaaacatgtaccttgaaaagcattttggcccaagaataataacgatcacacttgaagaacaaagcttttctttaaaaaaattttcctttaattttcaaattactattcacaaaatagcagtggctgttagattttgttcttggccaaatggaaaattttgccctaattaaaatgtagtcactctccagtgtgttaccattgaacaaatcactgaacctttccaagtcaaagtttccttagttgggaagattgagttaacacatgcaaaggggttagagcaatgcctgagtatatagaaagtattcaataaatgtaaattattagtcttgagaactgtctgtaggatgtgacccaaagttctcccttctattcaggtgtaattaggatataatgtccttcaaatggcagacttaaagggggaaaaagtcactaagaggtgaccagaagggttagagctgagcaagagaggttcctgccctgagccctgcattttagagtgcctaaggttacatacatacacacacacacgagttaaagaagacatggataccataaccagacacatgagttaaagaagacatggataccataaccaaagacattactaggaaagaaaactaataccaatatcccttttgaatacagaggc

SEQ ID NO: 9006 - protein, 684 aa, Homo sapiens; identical to SEQ ID NO: 9004

SEQ ID NO: 9007 - DNA, 1662 bp, Homo sapiens
aaatgttcgcggaagcggcaaagacgacacggccttgtgggatggcggagtttaaggagaagcctgaggccccgactgagcagctggatgtcgcgtgcggccaggaaaacttgccggtgggcgcgtggcccccgggggccgcgccggcgcccttccagtacactcctgatcatgtagttggacctggagcagacattgatcccactcaaataacctttcccggatgcatttgtgtcaaaactccctgcctccctggcacttgctcctgtctccgccatggagagaactatgatgataactcatgccttagagatataggatctggaggaaagtatgcagagcctgtttttgaatgcaatgtcctgtgccgatgcagtgaccactgcagaaacagagtggtccagaaaggtctacagttccacttccaagtgttcaagacgcataaaaaaggctggggacttcgtaccttggaatttataccgaaaggaaggtttgtctgtgaatatgctggtgaggttttaggattctctgaagttcagagaagaattcacttacaaacaaaatccgactccaattacattatagccatcagggaacatgtttataatgggcaggtaatggaaacatttgttgaccctacttatataggaaatattggaagattccttaatcattcttgtgagccaaaccttttgatgattcctgtccgaattgactcaatggtacctaagttggcactttttgcagccaaagatattgtgccagaagaagaactctcttatgattattcaggaagatatcttaatctaacagtcagtgaagacaaagaaaggctagatcatgggaaactaaggaaaccttgttactgtggtgccaaatcatgtactgctttcctgccttttgacagttctctgtactgccccgtagaaaagtcgaacatcagttgtggaaatgagaaggaacccagcatgtgtggctcagccccttctgtgttcccctcctgcaagcgattgacccttgaggtgagtctgttcagtgataagcagcttgcccctccctatagtggaagacagtggttggctagctttacctctgcctagttacataagtttaactcaggaatgtggcagagactgcaagttgtccatcagtatcctttcccctttctgtaatagaattctccatttaacaaaagtacatgactacccagaatactcactttcctagttagatttgtcttagtgactgttctagttaataggatataagcaaaaatgacaagtccttaaatggagatatcctgcccttcacctcctctttcttcctgctggctggaatgtatacatgatgactggaactggagcagtcatcctagaccccaggatgaccctgggaaaggaagccattgcatagaaaaatcaacaaggttaaaaggagtctaggtgtctggtactgtagaacatcctgtcagtcgtgatctgacacctttgtactttcaggtgagaaatagtctctcccttgcttaagtcactgttattgtaagttttctagcactaacatcgaacctaataatgatccaagaaacccttgtggctgcatacctaaaccctgcttgccaaccaattttaacagtaataaagctgactttttgatttctgtctg

SEQ ID NO: 9008 - protein, 365 aa, Homo sapiens
MFAEAAKTTRPCGMAEFKEKPEAPTEQLDVACGQENLPVGAWPPGAAPAPFQYTPDHVVGPGADIDPTQITFPGCICVKTPCLPGTCSCLRHGENYDDNSCLRDIGSGGKYAEPVFECNVLCRCSDHCRNRVVQKGLQFHFQVFKTHKKGWGLRTLEFIPKGRFVCEYAGEVLGFSEVQRRIHLQTKSDSNYIIAIREHVYNGQVMETFVDPTYIGNIGRFLNHSCEPNLLMIPVRIDSMVPKLALFAAKDIVPEEELSYDYSGRYLNLTVSEDKERLDHGKLRKPCYCGAKSCTAFLPFDSSLYCPVEKSNISCGNEKEPSMCGSAPSVFPSCKRLTLEVSLFSDKQLAPPYSGRQWLASFTSA

SEQ ID NO: 9009 - DNA, 802 bp, Homo sapiens
aaatgttcgcggaagcggcaaagacgacacggccttgtgggatggcggagtttaaggagaagcctgaggccccgactgagcagctggatgtcgcgtgcggccaggaaaacttgccggtgggcgcgtggcccccgggggccgcgccggcgcccttccagactatgaaaatgatgttagacaaaaagcaaattcgagcaattttcttattcgagttcaaaatgggtcgtaaagcagcagaaacaactcgcaacatcaacaatgcatttggcccaggaactgctaacgaacgtacagtgcagtggtggttcaagaagttttgcaaaggagatgagagccttgaagatgaggagcgtagtggccggccatcagaagttgacaacgaccagttgagagcaatcatcgaagctgatccccttacaactacacgagaagttgctgaagaactcaatgtcaaccattctacggtcgttcgacatttgaagcaaattggaaaggtgaaaaagctcgataagtgggtgcctcatgagctgactgaaaatcaaaaaaatcgtcgttttgaagtgtcatcttctcttattctacgcaaccacaacgaaccatttctcgatcggattgtgacgtgtgatgaaaagtggattttatatgacaaccggcgacgatcagctcagtggttggatcaagaagaagctccaaagcacttcccaaagccaatcttgcacccaaaaaaggtcatggtcactatttggtggtctgctgctggtctgatccactacagctttctgaatcccggtgaaaccattac

SEQ ID NO: 9010 - protein, 265 aa, Homo sapiens
MFAEAAKTTRPCGMAEFKEKPEAPTEQLDVACGQENLPVGAWPPGAAPAPFQTMKMMLDKKQIRAIFLFEFKMGRKAAETTRNINNAFGPGTANERTVQWWFKKFCKGDESLEDEERSGRPSEVDNDQLRAIIEADPLTTTREVAEELNVNHSTVVRHLKQIGKVKKLDKWVPHELTENQKNRRFEVSSSLILRNHNEPFLDRIVTCDEKWILYDNRRRSAQWLDQEEAPKHFPKPILHPKKVMVTIWWSAAGLIHYSFLNPGET

SEQ ID NO: 9011 - DNA, 1326 bp, Homo sapiens
aaatgttcgcggaagcggcaaagacgacacggccttgtgggatggcggagtttaaggagaagcctgaggccccgactgagcagctggatgtcgcgtgcggccaggaaaacttgccggtgggcgcgtggcccccgggggccgcgccggcgcccttccagttctctgtactgccccgtagaaaagtcgaacatcagttgtggaaatgagaaggaacccagcatgtgtggctcagccccttctgtgttcccctcctgcaagcgattgacccttgagactatgaaaatgatgttagacaaaaagcaaattcgagcaattttcttattcgagttcaaaatgggtcgtaaagcagcagaaacaactcgcaacatcaacaatgcatttggcccaggaactgctaacgaacgtacagtgcagtggtggttcaagaagttttgcaaaggagatgagagccttgaagatgaggagcgtagtggccggccatcagaagttgacaacgaccagttgagagcaatcatcgaagctgatccccttacaactacacgagaagttgctgaagaactcaatgtcaaccattctacggtcgttcgacatttgaagcaaattggaaaggtgaaaaagctcgataagtgggtgcctcatgagctgactgaaaatcaaaaaaatcgtcgttttgaagtgtcatcttctcttattctacgcaaccacaacgaaccatttctcgatcggattgtgacgtgtgatgaaaagtggattttatatgacaaccggcgacgatcagctcagtggttggatcaagaagaagctccaaagcacttcccaaagccaatcttgcacccaaaaaaggtcatggtcactatttggtggtctgctgctggtctgatccactacagctttctgaatcccggtgaaaccattacatctgagaagtatgctcaggaaatcgatgagatgaaccaaaaactgcaacgcctgcagctggcattggtcaacagaaagggcccaattcttctccacgacaatgcccgaccgcatgttgcacaacccacacttcaaaagttgaatgaattgggctatgaagttttgcctcatccaccgtattcacctgacctcttgccaaccaactaccacgtctttaagcatctcaacaactttttgcagggaaaacgcttccacaaccagcaggatgcagaaaatgctttccaagagttcgtcgaatcccaaagcacggatttttacgctacaggaataaaccaacttatttctcgttggcaaaaatgtgttgattgtaatggttcctattttgattaataaaaatgcgttgagcct

SEQ ID NO: 9012 - protein, 406 aa, Homo sapiens
MSRAARKTCRWARGPRGPRRRPSSSLYCPVEKSNISCGNEKEPSMCGSAPSVFPSCKRLTLETMKMMLDKKQIRAIFLFEFKMGRKAAETTRNINNAFGPGTANERTVQWWFKKFCKGDESLEDEERSGRPSEVDNDQLRAIIEADPLTTTREVAEELNVNHSTVVRHLKQIGKVKKLDKWVPHELTENQKNRRFEVSSSLILRNHNEPFLDRIVTCDEKWILYDNRRRSAQWLDQEEAPKHFPKPILHPKKVMVTIWWSAAGLIHYSFLNPGETITSEKYAQEIDEMNQKLQRLQLALVNRKGPILLHDNARPHVAQPTLQKLNELGYEVLPHPPYSPDLLPTNYHVFKHLNNFLQGKRFHNQQDAENAFQEFVESQSTDFYATGINQLISRWQKCVDCNGSYFD

SEQ ID NO: 9013 - DNA, 785 bp, Homo sapiens
aaatgttcgcggaagcggcaaagacgacacggccttgtgggatggcggagtttaaggagaagcctgaggccccgactgagcagctggatgtcgcgtgcggccaggaaaacttgccggtgggcgcgtggcccccgggggccgcgccggcgcccttccagttctctgtactgccccgtagaaaagtcgaacatcagttgtggaaatgagaaggaacccagcatgtgtggctcagccccttctgtgttcccctcctgcaagcgattgacccttgagactatgaaaatgatgttagacaaaaaaaggtcatggtcactatttggtggtctgctgctggtctgatccactacagctttctgaatcccggtgaaaccattacatctgagaagtatgctcaggaaatcgatgagatgaaccaaaaactgcaacgcctgcagctggcattggtcaacagaaagggcccaattcttctccacgacaatgcccgaccgcatgttgcacaacccacacttcaaaagttgaatgaattgggctatgaagttttgcctcatccaccgtattcacctgacctcttgccaaccaactaccacgtctttaagcatctcaacaactttttgcagggaaaacgcttccacaaccagcaggatgcagaaaatgctttccaagagttcgtcgaatcccaaagcacggatttttacgctacaggaataaaccaacttatttctcgttggcaaaaatgtgttgattgtaatggttcctattttgattaataaaaatgcgttgagcct

SEQ ID NO: 9014 - protein, 83 aa, Homo sapiens
MSRAARKTCRWARGPRGPRRRPSSSLYCPVEKSNISCGNEKEPSMCGSAPSVFPSCKRLTLETMKMMLDKKRSWSLFGGLLLV

SEQ ID NO: 9015 - DNA, 701 bp, Homo sapiens
ctcccagtcgcgaccttttgtcttctcttacagcgcacccgttggtgcgcgggaataggtgtgcatgccccggcctgggcctttttctgttgacccacggcatcaccttagcaagggtgttgtccttttcagtccattccctgaagcgcagaaccggaggccttgtgagaacctggctttttgtccagtcctgtcctcagaactcaaggaggcatcacggggggagtcatttacctccctggtctcaggtgtctctcacagttctctgtactgccccgtagaaaagtcgaacatcagttgtggaaatgagaaggaacccagcatgtgtggctcagccccttctgtgttcccctcctgcaagcgattgacccttgagactatgaaaatgatgttagacaaaaagcaaattcgagcaattttcttattcgagttcaaaatgggtcgtaaagcagcagaaacaactcgcaacatcaacaatgcatttggcccaggaactgctaacgaacgtacagtgcagtggtggttcaagaagttttgcaaaggagatgagagccttgaagatgaggagcgtagtggccggccatcagaagttgacaacgaccagttgagagcaatcatcgaagctgatccccttacaactacacgagaagttgctgaagaactcaatgtcaaccattctacggtcgttcgacatttgaagc

SEQ ID NO: 9016 - protein, 211 aa, Homo sapiens
MPRPGPFSVDPRHHLSKGVVLFSPFPEAQNRRPCENLAFCPVLSSELKEASRGESFTSLVSGVSHSSLYCPVEKSNISCGNEKEPSMCGSAPSVFPSCKRLTLETMKMMLDKKQIRAIFLFEFKMGRKAAETTRNINNAFGPGTANERTVQWWFKKFCKGDESLEDEERSGRPSEVDNDQLRAIIEADPLTTTREVAEELNVNHSTVVRHL

SEQ ID NO: 9017 - DNA, 447 bp, Homo sapiens
ttttgtcttctcttacagcgcacccgttggtgcgcgggaataggtgtgcatgccccggcctgggcctttttctgttgacccacggcatcaccttagcaagggtgttgtccttttcagtccattccctgaagcgcagaaccggaggccttgtgagaacctggctttttgtccagtcctgtcctcagaactcaaggaggcatcacggggggagtcatttacctccctggtctcaggtgtctctcacagactatgaaaatgatgttagacaaaaagcaaattcgagcaattttcttattcgagttcaaaatgggtcgtaaagcagcagaaacaactcgcaacatcaacaatgcatttggcccaggaactgctaacgaacgtacagtgcagtggtggttcaagaagttttgcaaaggagatgagagccttgaagatgaggagcgtagtggc

SEQ ID NO: 9018 - protein, 67 aa, Homo sapiens
MPRPGPFSVDPRHHLSKGVVLFSPFPEAQNRRPCENLAFCPVLSSELKEASRGESFTSLVSGVSHRL

SEQ ID NO: 9019 - DNA, 1962 bp, Homo sapiens
gtcttctcttacagcgcacccgttggtgcgcgggaataggtgtgcatgccccggcctgggcctttttctgttgacccacggcatcaccttagcaagggtgttgtccttttcagtccattccctgaagcgcagaaccggaggccttgtgagaacctggctttttgtccagtcctgtcctcagaactcaaggaggcatcacggggggagtcatttacctccctggtctcaggtgtctctcacaggtaggataagccgtggggcctattaatggatcgcagccggtgtcgtgcataaaaacagcccctcgagtcagccttagctgtggtctccctcacgctgtgggctcttgggcgagtgtaaattagctgtggctcagccttagagtcttccagcgtacagtggaacagtacctctcttccggagtgctttgaaaatggcaaggaaaatacactttccggtttgcttacactcctgatcatgtagttggacctggagcagacattgatcccactcaaataacctttcccggatgcatttgtgtcaaaactccctgcctccctggcacttgctcctgtctccgccatggagagaactatgatgataactcatgccttagagatataggatctggaggaaagtatgcagagcctgtttttgaatgcaatgtcctgtgccgatgcagtgaccactgcagaaacagagtggtccagaaaggtctacagttccacttccaagtgttcaagacgcataaaaaaggctggggacttcgtaccttggaatttataccgaaaggaaggtttgtctgtgaatatgctggtgaggttttaggattctctgaagttcagagaagaattcacttacaaacaaaatccgactccaattacattatagccatcagggaacatgtttataatgggcaggtaatggaaacatttgttgaccctacttatataggaaatattggaagattccttaatcattcttgtgagccaaaccttttgatgattcctgtccgaattgactcaatggtacctaagttggcactttttgcagccaaagatattgtgccagaagaagaactctcttatgattattcaggaagatatcttaatctaacagtcagtgaagacaaagaaaggctagatcatgggaaactaaggaaaccttgttactgtggtgccaaatcatgtactgctttcctgccttttgacagttctctgtactgccccgtagaaaagtcgaacatcagttgtggaaatgagaaggaacccagcatgtgtggctcagccccttctgtgttcccctcctgcaagcgattgacccttgaggtgagtctgttcagtgataagcagcttgcccctccctatagtggaagacagtggttggctagctttacctctgcctagttacataagtttaactcaggaatgtggcagagactgcaagttgtccatcagtatcctttcccctttctgtaatagaattctccatttaacaaaagtacatgactacccagaatactcactttcctagttagatttgtcttagtgactgttctagttaataggatataagcaaaaatgacaagtccttaaatggagatatcctgcccttcacctcctctttcttcctgctggctggaatgtatacatgatgactggaactggagcagtcatcctagaccccaggatgaccctgggaaaggaagccattgcatagaaaaatcaacaaggttaaaaggagtctaggtgtctggtactgtagaacatcctgtcagtcgtgatctgacacctttgtactttcaggtgagaaatagtctctcccttgcttaagtcactgttattgtaagttttctagcactaacatcgaacctaataatgatccaagaaacccttgtggctgcatacctaaaccctgcttgccaaccaattttaacagtaataaagctgactttttgatttc

SEQ ID NO: 9020 - protein, 160 aa, Homo sapiens
METFVDPTYIGNIGRFLNHSCEPNLLMIPVRIDSMVPKLALFAAKDIVPEEELSYDYSGRYLNLTVSEDKERLDHGKLRKPCYCGAKSCTAFLPFDSSLYCPVEKSNISCGNEKEPSMCGSAPSVFPSCKRLTLEVSLFSDKQLAPPYSGRQWLASFTSA

SEQ ID NO: 9021 - DNA, 1740 bp, Homo sapiens
gtcttctcttacagcgcacccgttggtgcgcgggaataggtgtgcatgccccggcctgggcctttttctgttgacccacggcatcaccttagcaagggtgttgtccttttcagtccattccctgaagcgcagaaccggaggccttgtgagaacctggctttttgtccagtcctgtcctcagaactcaaggaggcatcacggggggagtcatttacctccctggtctcaggtgtctctcacagtacactcctgatcatgtagttggacctggagcagacattgatcccactcaaataacctttcccggatgcatttgtgtcaaaactccctgcctccctggcacttgctcctgtctccgccatggagagaactatgatgataactcatgccttagagatataggatctggaggaaagtatgcagagcctgtttttgaatgcaatgtcctgtgccgatgcagtgaccactgcagaaacagagtggtccagaaaggtctacagttccacttccaagtgttcaagacgcataaaaaaggctggggacttcgtaccttggaatttataccgaaaggaaggtttgtctgtgaatatgctggtgaggttttaggattctctgaagttcagagaagaattcacttacaaacaaaatccgactccaattacattatagccatcagggaacatgtttataatgggcaggtaatggaaacatttgttgaccctacttatataggaaatattggaagattccttaatcattcttgtgagccaaaccttttgatgattcctgtccgaattgactcaatggtacctaagttggcactttttgcagccaaagatattgtgccagaagaagaactctcttatgattattcaggaagatatcttaatctaacagtcagtgaagacaaagaaaggctagatcatgggaaactaaggaaaccttgttactgtggtgccaaatcatgtactgctttcctgccttttgacagttctctgtactgccccgtagaaaagtcgaacatcagttgtggaaatgagaaggaacccagcatgtgtggctcagccccttctgtgttcccctcctgcaagcgattgacccttgaggtgagtctgttcagtgataagcagcttgcccctccctatagtggaagacagtggttggctagctttacctctgcctagttacataagtttaactcaggaatgtggcagagactgcaagttgtccatcagtatcctttcccctttctgtaatagaattctccatttaacaaaagtacatgactacccagaatactcactttcctagttagatttgtcttagtgactgttctagttaataggatataagcaaaaatgacaagtccttaaatggagatatcctgcccttcacctcctctttcttcctgctggctggaatgtatacatgatgactggaactggagcagtcatcctagaccccaggatgaccctgggaaaggaagccattgcatagaaaaatcaacaaggttaaaaggagtctaggtgtctggtactgtagaacatcctgtcagtcgtgatctgacacctttgtactttcaggtgagaaatagtctctcccttgcttaagtcactgttattgtaagttttctagcactaacatcgaacctaataatgatccaagaaacccttgtggctgcatacctaaaccctgcttgccaaccaattttaacagtaataaagctgactttttgatttc

SEQ ID NO: 9022 - protein, 71 aa, Homo sapiens
MPRPGPFSVDPRHHLSKGVVLFSPFPEAQNRRPCENLAFCPVLSSELKEASRGESFTSLVSGVSHSTLLIM

SEQ ID NO: 9023 - DNA, 2063 bp, Homo sapiens
aacatggctgcgcccgcactagggctggtgtgtggacgttgccctgagctgggtctcgtcctcttgctgctgctgctctcgctgctgtgtggagcggcagggagccaggaggccgggaccggtgcgggcgcggggtcccttgcgggttcttgcggctgcggcacgccccagcggcctggcgcccagcggcaactcgcgcactcaaagatggtccccatccctgctggagtatttacaatgggcacagatgatcctcagataaagcaggatggggaagcacctgcgaggagagttactattgatgccttttacatggatgcctatgaagtcagtaatactgaatttgagaagtttgtgaactcaactggctatttgacagaggctgagaagtttggcgactcctttgtctttgaaggcatgttgagtgagcaagtgaagaccaatattcaacaggcagttgcagctgctccctggtggttacctgtgaaaggcgctaactggagacacccagaagggcctgactctactattctgcacaggccggatcatccagttctccatgtgtcctggaatgatgcggttgcctactgcacttgggcagggaagcggctgcccacggaagctgagtgggaatacagctgtcgaggaggcctgcataatagacttttcccctggggcaacaaactgcagcccaaaggccagcattatgccaacatttggcagggcgagtttccggtgaccaacactggtgaggatggcttccaaggaactgcgcctgttgatgccttccctcccaatggttatggcttatacaacatagtggggaacgcatgggaatggacttcagactggtggactgttcatcattctgttgaagaaacgcttaacccaaaaggtcccccttctgggaaagaccgagtgaagaaaggtggatcctacatgtgccataggtcttattgttacaggtatcgctgtgctgctcggagccagaacacacctgatagctctgcttcgaatctgggattccgctgtgcagccgaccgcctgcccactatggactgacaaccaaggaaagtcttccccagtccaaggagcagtcgtgtctgacctacattgggcttttctcagaactttgaacgatcccatgcaaagaattcccaccctgaggtgggttacatacctgcccaatggccaaaggaaccgccttgtgagaccaaattgctgacctgggtcagtgcatgtgctttatggtgtggtgcatctttggagatcatcaccatattttacttttgagagtctttaaagaggaaggggagtggagggaaccctgagctaggcttcaggaggcccgcgtcctacgcaggctctgccacaggggttagaccccaggtccgacgcttgaccttcctgggcctcaagtgccctcccctatcaaatgaagggatggacagcatgacctctgggtgtctctccaactcaccagttctaaaaagggtatcagattctattgtgacttcatagtgagaatttattatagattattttttagctattttttccatgtgtgaaccttgagtgatactaatcatgtaaagtaagagttctcttatgtattattttcggaagaggggtgtggtgactcctttatattcgtactgcactttgtttttccaaggaaatcagtgtcttttacgttgttatgatgaatcccacatggggccggtgatggtatgctgaagttcagccgttgaacacataggaatgtctgtggggtgactctactgtgctttatcttttaacattaagtgcctttggttcagaggggcagtcataagctctgtttccccctctccccaaagccttcagcgaacgtgaaatgtgcgctaaacggggaaacctgtttaattctagatatagggaaaaaggaacgaggaccttgaatgagctatattcagggtatccggtattttgtaatagggaataggaaaccttgttggctgtggaatatccgatgctttgaatcatgcactgtgttgaataaacgtatctgctaaatcaggctt

SEQ ID NO: 9024 - protein, 352 aa, Homo sapiens
MAAPALGLVCGRCPELGLVLLLLLLSLLCGAAGSQEAGTGAGAGSLAGSCGCGTPQRPGAQRQLAHSKMVPIPAGVFTMGTDDPQIKQDGEAPARRVTIDAFYMDAYEVSNTEFEKFVNSTGYLTEAEKFGDSFVFEGMLSEQVKTNIQQAVAAAPWWLPVKGANWRHPEGPDSTILHRPDHPVLHVSWNDAVAYCTWAGKRLPTEAEWEYSCRGGLHNRLFPWGNKLQPKGQHYANIWQGEFPVTNTGEDGFQGTAPVDAFPPNGYGLYNIVGNAWEWTSDWWTVHHSVEETLNPKGPPSGKDRVKKGGSYMCHRSYCYRYRCAARSQNTPDSSASNLGFRCAADRLPTMD

SEQ ID NO: 9025 - DNA, 2151 bp, Homo sapiens
cgggtcacatggcccgcgggacaacatggctgcgcccgcactagggctggtgtgtggacgttgccctgagctgggtctcgtcctcttgctgctgctgctctcgctgctgtgtggagcggcagggagccaggaggccgggaccggtgcgggcgcggggtcccttgcgggttcttgcggctgcggcacgccccagcggcctggcgcccatggcagttcggcagccgctcaccgatactcgcgggaggctaacgctccgggccccgtacccggagagcggcaactcgcgcactcaaagatggtccccatccctgctggagtatttacaatgggcacagatgatcctcagataaagcaggatggggaagcacctgcgaggagagttactattgatgccttttacatggatgcctatgaagtcagtaatactgaatttgagaagtttgtgaactcaactggctatttgacagaggctgagaagtttggcgactcctttgtctttgaaggcatgttgagtgagcaagtgaagaccaatattcaacaggcagttgcagctgctccctggtggttacctgtgaaaggcgctaactggagacacccagaagggcctgactctactattctgcacaggccggatcatccagttctccatgtgtcctggaatgatgcggttgcctactgcacttgggcagggaagcggctgcccacggaagctgagtgggaatacagctgtcgaggaggcctgcataatagacttttcccctggggcaacaaactgcagcccaaaggccagcattatgccaacatttggcagggcgagtttccggtgaccaacactggtgaggatggcttccaaggaactgcgcctgttgatgccttccctcccaatggttatggcttatacaacatagtggggaacgcatgggaatggacttcagactggtggactgttcatcattctgttgaagaaacgcttaacccaaaaggtcccccttctgggaaagaccgagtgaagaaaggtggatcctacatgtgccataggtcttattgttacaggtatcgctgtgctgctcggagccagaacacacctgatagctctgcttcgaatctgggattccgctgtgcagccgaccgcctgcccactatggactgacaaccaaggaaagtcttccccagtccaaggagcagtcgtgtctgacctacattgggcttttctcagaactttgaacgatcccatgcaaagaattcccaccctgaggtgggttacatacctgcccaatggccaaaggaaccgccttgtgagaccaaattgctgacctgggtcagtgcatgtgctttatggtgtggtgcatctttggagatcatcaccatattttacttttgagagtctttaaagaggaaggggagtggagggaaccctgagctaggcttcaggaggcccgcgtcctacgcaggctctgccacaggggttagaccccaggtccgacgcttgaccttcctgggcctcaagtgccctcccctatcaaatgaagggatggacagcatgacctctgggtgtctctccaactcaccagttctaaaaagggtatcagattctattgtgacttcatagtgagaatttattatagattattttttagctattttttccatgtgtgaaccttgagtgatactaatcatgtaaagtaagagttctcttatgtattattttcggaagaggggtgtggtgactcctttatattcgtactgcactttgtttttccaaggaaatcagtgtcttttacgttgttatgatgaatcccacatggggccggtgatggtatgctgaagttcagccgttgaacacataggaatgtctgtggggtgactctactgtgctttatcttttaacattaagtgcctttggttcagaggggcagtcataagctctgtttccccctctccccaaagccttcagcgaacgtgaaatgtgcgctaaacggggaaacctgtttaattctagatatagggaaaaaggaacgaggaccttgaatgagctatattcagggtatccggtattttgtaatagggaataggaaaccttgttggctgtggaatatccgatgctttgaatcatgcactgtgttgaataaacgtatctgctaaatcaggctt

SEQ ID NO: 9026 - protein, 374 aa, Homo sapiens; identical to SEQ ID NO: 742

SEQ ID NO: 9027 - DNA, 1820 bp, Homo sapiens
atgcccgcactgacatttggtctcatggcttctattcttcaaggccaaagtaagagaagccaaccaaaagctcaatatttccaaggcaaagagctgcagatttggttggtgattagcctacctttccacttcactgaaaataaggctgcaggggaaaagtacaaaggtcagcttcagcctgaacaggatgctggagagcagaatattagtcctccttgtaaatatctcttaaaacgacactggatacaacgcagggtggcgcaaccagttagaaaagagtctgtggaccagtttttccttgctgtacagctaattctgaaaaggggaactgggcctaatccttggctctatgagcacccacacagccatgggaggggcgtcctgcgaggctttcaggctgctgagcctgttccttggctggggtcggtagggcttggagccagccgttcaaagtcacccctgggaagcgcccgcaacccttggggacgcctctcctccggctgccccccttccctggaatccaggtgtcactggggccggggaggggctaggagctcggatttctgctttgggaagtttttacaagcccaccctccccctgccttggttccccgagccaagaatttcagaaatccggggcacaaaaacgccagtgtttgcggtcaaggattaaaggcgcgaggtgtctttatttaatctgctccgccctgctcgggtttgcacgagaaaccaagcctgggagcgacggtccacgcaagcggagacacagcattatcccctggtcactggacgctggggtctagtgcctaatacgttaagctgcttctccccatcatcaagaaactgccgcatctgccatataaaggagatgtttctcattcgcccccactcatctcttcccccatgaaaacctcttccattttcaaaggatcttcggctctacttttcaagcaaattcaacaaatcagtgtatgcctgtgtaactggtaaatagtgaagggtaattatttcatgtgcttctaactcagaaacaatggaatattaacagcggttttctgaagatccagttggacaattttcattttcatcatataatggacatttatctcctacctgcattatccactgtcttccctcggagaccacaaatttcactgaaggcagcatctatgtcttattcatgcttgtgctctctacctcccctgacccagaaggacttattcttctttctgcacattttagtagatgtgttaaaaaaaaaaaaaaaaagtttgttaagaagatgttttaatggaaggtgtgtcaggcatatggcaggatacatgaccatatttttggagcatgcaacacctcgtagcccatctctatcatagcctattttctccgcctgtatgtatggataatcctattcaacatttttaaggtctagaagctgctaggtcactagaaagtaattttgctatgatgtgaagaggttctctatgatgatgtatgactgataaattatgatgattaatgtcagaatataagggtcactgcctaactcattctctgttatcagtagagggaaaggagctgctttctcttcactatttttttctagaagaattttctatccctgtgttttccagtatagtgactactagccatttaggcacgtaagatgtggctagttctgagatgtgaaatagatgttaacacattgaatttcaaagacttagtacaaaaaaaagcaaaatatcttaatttgtatagtgattacatgttgaagtggtaatattttggatatttgtgttaaataaaatagattattagaattt

SEQ ID NO: 9028 - protein, 231 aa, Homo sapiens
MPALTFGLMASILQGQSKRSQPKAQYFQGKELQIWLVISLPFHFTENKAAGEKYKGQLQPEQDAGEQNISPPCKYLLKRHWIQRRVAQPVRKESVDQFFLAVQLILKRGTGPNPWLYEHPHSHGRGVLRGFQAAEPVPWLGSVGLGASRSKSPLGSARNPWGRLSSGCPPSLESRCHWGRGGARSSDFCFGKFLQAHPPPALVPRAKNFRNPGHKNASVCGQGLKARGVFI

SEQ ID NO: 9029 - DNA, 8192 bp, Homo sapiens
gtggatgtgctgctgaagcgtttcctcaagctcgctggggtgggaggagaggaggaggaggaggtggtggtggaggaggaggcagggggtggagagagagaaagcgcacgccgagaggaggtgtgggtgttccgcttccatcctaacggaacgagctccctcttcgcggacatgggattacccagcggctgctaacccctctcctcgccctgctcccccaaaccggcgtggctccccgggcaccaaggagctgactacagaggagcaggatttgcacccctcgctgggcttgctttggcaacagagtgcctgacccaggtcaggattttcaagaaagacatgtctgacaaaatgtctagcttcctacatattggagacatttgttctctgtacgcggagggatcgacaaatggatttattagcaccttgggcctggttgatgatcgttgtgttgtacagccagaaaccggggaccttaacaatccacctaagaaattcagagactgcctctttaagctatgtcccatgaaccgctactctgcccaaaagcagttctggaaagccgctaagcctggggccaacagcaccacagacgcagtgctactcaacaaactgcaccacgctgcagacttggaaaagaagcagaatgagacagaaaacaggaaattgctggggaccgtaatccagtatggcaatgtgatccagctcctgcatttgaaaagtaataaatacctaacagtgaataagaggcttcctgctctgttggagaagaatgccatgagagtcacattggacgaggctggaaatgaagggtcctggttttatattcagccattctacaagctgcgatccattggagacagcgtggtcataggtgacaaggtggttctgaaccccgtcaatgctggtcagcccctacatgctagcagccatcaactggtagataacccaggctgcaatgaggtcaattccgtcaactgcaatacaagctggaaaatagtccttttcatgaaatggagtgataacaaagacgacatattaaaggggggtgacgtggtgaggctgtttcatgctgagcaggagaagtttctcacctgtgacgaacacaggaagaagcagcacgtcttcctgagaaccacgggccggcagtcggccacatctgccaccagttcaaaagccctgtgggaggtggaggtggtccagcatgacccatgtcggggcggagcagggtattggaacagccttttccgtttcaagcatctggccacggggcattacttggcagcagaggtagaccctgactttgaggaagaatgcctggagtttcagccctcagtggaccctgatcaggacgcctctcgaagtaggttgcggaatgcccaagaaaagatggtatactccctggtctctgtgcctgaaggcaatgacatctcctccattttcgagctagatcccaccactctgcgtggaggtgacagccttgtcccaaggaactcttatgttcggctcagacacctatgtactaatacctgggttcacagcacaaatattcctattgacaaggaagaagaaaagcccgtgatgctgaaaattggcacctctcctgtgaaggaggataaggaagcatttgccatagttccggtttctcctgctgaagttcgggacctggactttgccaatgatgccagcaaggtgctgggctccattgctgggaagctagagaagggcaccatcacccagaatgaaaggaggtctgtaaccaagctgctagaagatttggtttacttcgtcactggtggaactaattctggtcaagatgttctcgaagttgtcttctccaagcccaacagagaacggcagaaactgatgagagaacagaatattctcaagcagatcttcaagttgttacaagccccattcacagactgcggtgatggcccaatgcttcggctggaagagctcggggaccagcggcacgctcctttcagacacatctgccggctctgctacagggtgctgagacactcgcagcaagactacaggaagaaccaggagtatatagccaagcagtttggcttcatgcagaagcagattggctatgatgtgttggctgaagacactatcactgccctgctccacaataatcggaaactcctggaaaaacacattaccgcggcagagattgacacatttgtcagcctggtgcgaaagaacagggagcccagattcttagattacctctccgacctctgtgtctccatgaacaaatcaattccagtgacccaggaactgatatgtaaagctgtgctgaaccccaccaacgctgacatcctgattgagaccaagttggttctttctcgttttgaatttgaaggtgtctcttccactggagagaatgctctggaggcaggagaagacgaggaagaggtgtggctgttttggagggacagcaacaaagagattcgcagcaagagtgtgagggaattggctcaggatgctaaagaagggcagaaggaggaccgagacgttctcagctactacagatatcagctgaacctctttgcgaggatgtgtctggaccgccaatacctggccatcaacgaaatctcaggccagctggatgtcgatctcattctccgctgcatgtctgacgagaacctgccctatgacctcagggcgtccttctgccgcctcatgcttcacatgcatgtggaccgagatccccaggaacaagtcacccccgtgaaatatgcccgcctctggtcggagattccctcggagatcgccattgacgactatgatagtagtggagcttccaaagatgaaattaaggagagatttgctcagaccatggagtttgtggaggagtatttaagagatgtggtttgtcagaggttccctttctctgataaagagaagaataagcttacgtttgaggttgtaaatttagctaggaatctcatatactttggtttctacaacttctctgaccttctacgattaactaagatccttctggccatattggactgtgtacatgtgacaacaatcttccccattagcaagatggcgaaaggagaagagaataaaggcagtaacgtgatgagatctattcatggcgtgggagagctgatgacccaggtggtgctccggggaggaggctttttgcccatgactcccatggctgctgcccctgaaggcaatgtgaagcaggcagagcctgagaaggaggacatcatggtcatggacaccaagctgaagatcattgagatactccagtttattttgaatgtgaggttggattataggatctcctgcctcctgtgtatatttaagcgagagtttgatgaaagcaattcccagacttcagaaacatcctccggaaacagcagccaagaagggccaagtaatgtaccaggtgctcttgactttgaacacattgaagaacaagcagaaggcatctttggaggaaggaaagagaacaccccactggacttggatgaccacggcggcagaacctttctccgtgtcctgctccacttgacgatgcatgactacccacccctggtgtcaggggccctgcagctcctcttccggcacttcagccagaggcaggaggtgctccaggccttcaaacaggttcaactgctggttaccagccaagatgtggacaactacaaacagatcaaacaagacttggatcaactgaggtccatcgtggaaaagtcagagctttgggtgtacaaagggcagggccccgatgagactatggatggtgcatctggagaaaatgaacataagaaaacggaggagggaaataacaagccacaaaagcatgaaagcaccagcagctacaactacagagtggtcaaagagattttgattcggcttagcaaactctgtgttcaagagagtgcctcagtgagaaagagcaggaagcagcaacagcgtctgctccggaacatgggcgcgcacgccgtggtgctggagctgctgcagattccctatgagaaggccgaagataccaagatgcaagagataatgaggttggctcatgaatttttgcagaatttctgcgcaggcaaccagcagaatcaagctttgctacataaacacataaacctgtttctcaacccagggatcctggaggcagtaaccatgcagcacatcttcatgaacaatttccagctttgcagtgagatcaacgagagagttgttcagcacttcgttcactgcatagagactcacggtcggaatgtccagtatataaagttcttacagacaattgtcaaggcagaagggaaatttattaaaaaatgccaagacatggttatggccgagctggtcaattcgggagaggatgtcctcgtgttctacaacgacagagcctctttccagactctgatccagatgatgcggtcagaacgggatcggatggatgagaacagccctctcatgtaccacatccacttggtcgagctcctggctgtgtgcacggagggtaagaatgtctacacagagatcaagtgcaactccctgctcccgctggatgacatcgttcgcgtggtgacccacgaggactgcatccctgaggttaaaattgcatacattaacttcctgaatcactgctatgtggatacagaggtggaaatgaaggagatttataccagcaatcacatgtggaaattgtttgagaatttccttgtagacatctgcagggcctgtaacaacactagtgacaggaaacatgcagactcgattttggagaagtatgtcaccgaaatcgtcatgagtattgttactactttcttcagctctcccttctcagaccagagtacgactttgcagactcgccagcctgtctttgtgcaactgctgcaaggcgtgttcagggtttaccactgcaactggttaatgccaagccaaaaagcctccgtggagagctgtattcgggtgctgtctgatgtagccaagagccgggccattgccattcccgtggacctggacagccaagtcaacaacctctttctcaagtcccacagcattgtgcagaaaacagccatgaactggcggctctcagcccgcaatgccgcacgcagggactctgttctggcagcttccagagactaccggaatatcattgagagattgcaggacatcgtctccgcgctggaggaccgtctcaggcccctggtgcaggcagagttatctgtgctcgtggatgttctccacagacccgagctgcttttcccagagaacacagacgccagaaggaaatgtgaaagtggcggtttcatttgcaagttaataaagcatacaaaacagctgctagaagaaaatgaagagaagctctgcattaaggtcctacagaccctgagggaaatgatgaccaaagatagaggctatggagaaaagggtgaggcgctcaggcaagttctggtcaaccgttactatggaaacgtcagaccttcgggacgaagagagagccttaccagctttggcaatggcccactgtcagcaggaggacccggcaagcccgggggaggagggggaggttccggatccagctctatgagcaggggtgagatgagtctggccgaggttcagtgtcaccttgacaaggagggggcttccaatctagttatcgacctcatcatgaacgcatccagtgaccgagtgttccatgaaagcattctcctggccattgcccttctggaaggaggcaacaccaccatccagcactcctttttctgtcgcttgacagaagataagaagtcagagaaattctttaaggtgttttatgaccggatgaaggtggcccagcaagaaatcaaagcaacagtgacagtgaacaccagtgacttgggaaataaaaagaaagacgatgaggtagacagggatgccccatcacggaaaaaagctaaagagcccacaacacagataacagaagaggtccgggatcagctcctggaggcctccgctgccaccaggaaagccttcaccactttcaggagggaggctgatcccgacgaccactaccagcctggagagggcacccaggccactgccgacaaggccaaggacgacctggagatgagcgcggtcatcaccatcatgcagcccatcctccgcttccttcagctcctgtgtgaaaaccacaaccgagacctgcagaacttcctccgttgccaaaataacaagaccaactacaatttggtatgtgagaccctgcagtttctggactgtatttgtggaagcacaactggaggccttggtcttctgggcttgtatataaatgaaaagaatgtagcgcttatcaaccaaaccctggaaagtctgaccgaatactgtcaaggaccttgccatgagaaccagaactgcatagccacccatgaatccaatggcattgacatcatcacagccctgatcctcaatgatatcaatcctttgggaaagaagaggatggaccttgtgttagaactgaagaacaatgcctcgaagttgctcctggccatcatggaaagcaggcacgacagtgaaaacgcagagaggatactttataacatgaggcccaaggaactggtggaagtgatcaagaaagcctacatgcaaggtgaagtggaatttgaggatggagaaaacggtgaggatggggcggcgtcccccaggaacgtggggcacaacatctacatattagcccatcagttggctcggcataacaaagaacttcagagcatgctgaaacctggtggccaagtggacggagatgaagccctggagttttatgccaagcacacggcgcagatagagattgtcagattagaccgaacaatggaacagatagtctttcccgtgcccagcatatgtgaattcctaaccaaggagtcaaaactacgaatttactatactacagagagagacgaacaaggcagcaaaatcaatgatttctttctgcggtctgaagacctcttcaatgaaatgaattggcagaagaaactgagagcccagcccgtgttgtactggtgtgcccgcaacatgtctttctggagcagcatttcgtttaacctggccgtcctgatgaacctgctggtggcgtttttctacccgtttaagggagtccgaggaggaaccctggagccccactggtcgggactcctgtggacagccatgctcatctctctggccatcgtcattgccctccccaagccccatggcatccgggccttaattgcctccacaattctacgactgatattttcagtcgggttacaacccacgttgtttcttctgggcgctttcaatgtatgcaataaaatcatctttctaatgagctttgtgggcaactgtgggacattcacaagaggctaccgagccatggttctggatgttgagttcctctatcatttgttgtatctggtgatctgtgccatggggctctttgtccatgaattcttctacagtctgctgctttttgatttagtgtacagagaagagactttgcttaatgtcattaaaagtgtcactcgcaatggacggtccatcatcctgacagcagttctggctctgatcctcgtttacctgttctcaatagtgggctatcttttcttcaaggatgactttatcttggaagtagataggctgcccaatgaaacagctgttccagaaaccggcgagagtttggcaagcgagttcctgttctccgatgtgtgtagggtggagagtggggagaactgctcctctcctgcacccagagaagagctggtccctgcagaagagacggaacaggataaagagcacacatgtgagacgctgctgatgtgcattgtcactgtgctgagtcacgggctgcggagcgggggtggagtaggagatgtactcaggaagccgtccaaagaggaacccctgtttgctgctagagttatttatgacctcttgttcttcttcatggtcatcatcattgttcttaacctgatttttggggttatcattgacacttttgctgacctgaggagtgagaagcagaagaaggaagagatcttgaagaccacgtgctttatctgtggcttggaaagagacaagtttgacaacaagactgtcacctttgaagagcacatcaaggaagaacacaacatgtggcactatctgtgcttcatcgtcctggtgaaagtaaaggactccaccgaatatactgg

SEQ ID NO: 9030 - protein, 2710 aa, Homo sapiens
MSDKMSSFLHIGDICSLYAEGSTNGFISTLGLVDDRCVVQPETGDLNNPPKKFRDCLFKLCPMNRYSAQKQFWKAAKPGANSTTDAVLLNKLHHAADLEKKQNETENRKLLGTVIQYGNVIQLLHLKSNKYLTVNKRLPALLEKNAMRVTLDEAGNEGSWFYIQPFYKLRSIGDSVVIGDKVVLNPVNAGQPLHASSHQLVDNPGCNEVNSVNCNTSWKIVLFMKWSDNKDDILKGGDVVRLFHAEQEKFLTCDEHRKKQHVFLRTTGRQSATSATSSKALWEVEVVQHDPCRGGAGYWNSLFRFKHLATGHYLAAEVDPDFEEECLEFQPSVDPDQDASRSRLRNAQEKMVYSLVSVPEGNDISSIFELDPTTLRGGDSLVPRNSYVRLRHLCTNTWVHSTNIPIDKEEEKPVMLKIGTSPVKEDKEAFAIVPVSPAEVRDLDFANDASKVLGSIAGKLEKGTITQNERRSVTKLLEDLVYFVTGGTNSGQDVLEVVFSKPNRERQKLMREQNILKQIFKLLQAPFTDCGDGPMLRLEELGDQRHAPFRHICRLCYRVLRHSQQDYRKNQEYIAKQFGFMQKQIGYDVLAEDTITALLHNNRKLLEKHITAAEIDTFVSLVRKNREPRFLDYLSDLCVSMNKSIPVTQELICKAVLNPTNADILIETKLVLSRFEFEGVSSTGENALEAGEDEEEVWLFWRDSNKEIRSKSVRELAQDAKEGQKEDRDVLSYYRYQLNLFARMCLDRQYLAINEISGQLDVDLILRCMSDENLPYDLRASFCRLMLHMHVDRDPQEQVTPVKYARLWSEIPSEIAIDDYDSSGASKDEIKERFAQTMEFVEEYLRDVVCQRFPFSDKEKNKLTFEVVNLARNLIYFGFYNFSDLLRLTKILLAILDCVHVTTIFPISKMAKGEENKGSNVMRSIHGVGELMTQVVLRGGGFLPMTPMAAAPEGNVKQAEPEKEDIMVMDTKLKIIEILQFILNVRLDYRISCLLCIFKREFDESNSQTSETSSGNSSQEGPSNVPGALDFEHIEEQAEGIFGGRKENTPLDLDDHGGRTFLRVLLHLTMHDYPPLVSGALQLLFRHFSQRQEVLQAFKQVQLLVTSQDVDNYKQIKQDLDQLRSIVEKSELWVYKGQGPDETMDGASGENEHKKTEEGNNKPQKHESTSSYNYRVVKEILIRLSKLCVQESASVRKSRKQQQRLLRNMGAHAVVLELLQIPYEKAEDTKMQEIMRLAHEFLQNFCAGNQQNQALLHKHINLFLNPGILEAVTMQHIFMNNFQLCSEINERVVQHFVHCIETHGRNVQYIKFLQTIVKAEGKFIKKCQDMVMAELVNSGEDVLVFYNDRASFQTLIQMMRSERDRMDENSPLMYHIHLVELLAVCTEGKNVYTEIKCNSLLPLDDIVRVVTHEDCIPEVKIAYINFLNHCYVDTEVEMKEIYTSNHMWKLFENFLVDICRACNNTSDRKHADSILEKYVTEIVMSIVTTFFSSPFSDQSTTLQTRQPVFVQLLQGVFRVYHCNWLMPSQKASVESCIRVLSDVAKSRAIAIPVDLDSQVNNLFLKSHSIVQKTAMNWRLSARNAARRDSVLAASRDYRNIIERLQDIVSALEDRLRPLVQAELSVLVDVLHRPELLFPENTDARRKCESGGFICKLIKHTKQLLEENEEKLCIKVLQTLREMMTKDRGYGEKGEALRQVLVNRYYGNVRPSGRRESLTSFGNGPLSAGGPGKPGGGGGGSGSSSMSRGEMSLAEVQCHLDKEGASNLVIDLIMNASSDRVFHESILLAIALLEGGNTTIQHSFFCRLTEDKKSEKFFKVFYDRMKVAQQEIKATVTVNTSDLGNKKKDDEVDRDAPSRKKAKEPTTQITEEVRDQLLEASAATRKAFTTFRREADPDDHYQPGEGTQATADKAKDDLEMSAVITIMQPILRFLQLLCENHNRDLQNFLRCQNNKTNYNLVCETLQFLDCICGSTTGGLGLLGLYINEKNVALINQTLESLTEYCQGPCHENQNCIATHESNGIDIITALILNDINPLGKKRMDLVLELKNNASKLLLAIMESRHDSENAERILYNMRPKELVEVIKKAYMQGEVEFEDGENGEDGAASPRNVGHNIYILAHQLARHNKELQSMLKPGGQVDGDEALEFYAKHTAQIEIVRLDRTMEQIVFPVPSICEFLTKESKLRIYYTTERDEQGSKINDFFLRSEDLFNEMNWQKKLRAQPVLYWCARNMSFWSSISFNLAVLMNLLVAFFYPFKGVRGGTLEPHWSGLLWTAMLISLAIVIALPKPHGIRALIASTILRLIFSVGLQPTLFLLGAFNVCNKIIFLMSFVGNCGTFTRGYRAMVLDVEFLYHLLYLVICAMGLFVHEFFYSLLLFDLVYREETLLNVIKSVTRNGRSIILTAVLALILVYLFSIVGYLFFKDDFILEVDRLPNETAVPETGESLASEFLFSDVCRVESGENCSSPAPREELVPAEETEQDKEHTCETLLMCIVTVLSHGLRSGGGVGDVLRKPSKEEPLFAARVIYDLLFFFMVIIIVLNLIFGVIIDTFADLRSEKQKKEEILKTTCFICGLERDKFDNKTVTFEEHIKEEHNMWHYLCFIVLVKVKDSTEYTGPESYVAEMIKERNLDWFPRMRAMSLVSSDSEGEQNELRNLQEKLESTMKLVTNLSGQLSELKDQMTEQRKQKQRIGLLGHPPHMNVNPQQPA

SEQ ID NO: 9031 - DNA, 8192 bp, Homo sapiens
gtggatgtgctgctgaagcgtttcctcaagctcgctggggtgggaggagaggaggaggaggaggtggtggtggaggaggaggcagggggtggagagagagaaagcgcacgccgagaggaggtgtgggtgttccgcttccatcctaacggaacgagctccctcttcgcggacatgggattacccagcggctgctaacccctctcctcgccctgctcccccaaaccggcgtggctccccgggcaccaaggagctgactacagaggagcaggatttgcacccctcgctgggcttgctttggcaacagagtgcctgacccaggtcaggattttcaagaaagacatgtctgacaaaatgtctagcttcctacatattggagacatttgttctctgtacgcggagggatcgacaaatggatttattagcaccttgggcctggttgatgatcgttgtgttgtacagccagaaaccggggaccttaacaatccacctaagaaattcagagactgcctctttaagctatgtcccatgaaccgctactctgcccaaaagcagttctggaaagccgctaagcctggggccaacagcaccacagacgcagtgctactcaacaaactgcaccacgctgcagacttggaaaagaagcagaatgagacagaaaacaggaaattgctggggaccgtaatccagtatggcaatgtgatccagctcctgcatttgaaaagtaataaatacctaacagtgaataagaggcttcctgctctgttggagaagaatgccatgagagtcacattggacgaggctggaaatgaagggtcctggttttatattcagccattctacaagctgcgatccattggagacagcgtggtcataggtgacaaggtggttctgaaccccgtcaatgctggtcagcccctacatgctagcagccatcaactggtagataacccaggctgcaatgaggtcaattccgtcaactgcaatacaagctggaaaatagtccttttcatgaaatggagtgataacaaagacgacatattaaaggggggtgacgtggtgaggctgtttcatgctgagcaggagaagtttctcacctgtgacgaacacaggaagaagcagcacgtcttcctgagaaccacgggccggcagtcggccacatctgccaccagttcaaaagccctgtgggaggtggaggtggtccagcatgacccatgtcggggcggagcagggtattggaacagccttttccgtttcaagcatctggccacggggcattacttggcagcagaggtggaccctgatcaggacgcctctcgaagtaggttgcggaatgcccaagaaaagatggtatactccctggtctctgtgcctgaaggcaatgacatctcctccattttcgagctagatcccaccactctgcgtggaggtgacagccttgtcccaaggaactcttatgttcggctcagacacctatgtactaatacctgggttcacagcacaaatattcctattgacaaggaagaagaaaagcccgtgatgctgaaaattggcacctctcctgtgaaggaggataaggaagcatttgccatagttccggtttctcctgctgaagttcgggacctggactttgccaatgatgccagcaaggtgctgggctccattgctgggaagctagagaagggcaccatcacccagaatgaaaggaggtctgtaaccaagctgctagaagatttggtttacttcgtcactggtggaactaattctggtcaagatgttctcgaagttgtcttctccaagcccaacagagaacggcagaaactgatgagagaacagaatattctcaagcagatcttcaagttgttacaagccccattcacagactgcggtgatggcccaatgcttcggctggaagagctcggggaccagcggcacgctcctttcagacacatctgccggctctgctacagggtgctgagacactcgcagcaagactacaggaagaaccaggagtatatagccaagcagtttggcttcatgcagaagcagattggctatgatgtgttggctgaagacactatcactgccctgctccacaataatcggaaactcctggaaaaacacattaccgcggcagagattgacacatttgtcagcctggtgcgaaagaacagggagcccagattcttagattacctctccgacctctgtgtctccatgaacaaatcaattccagtgacccaggaactgatatgtaaagctgtgctgaaccccaccaacgctgacatcctgattgagaccaagttggttctttctcgttttgaatttgaaggtgtctcttccactggagagaatgctctggaggcaggagaagacgaggaagaggtgtggctgttttggagggacagcaacaaagagattcgcagcaagagtgtgagggaattggctcaggatgctaaagaagggcagaaggaggaccgagacgttctcagctactacagatatcagctgaacctctttgcgaggatgtgtctggaccgccaatacctggccatcaacgaaatctcaggccagctggatgtcgatctcattctccgctgcatgtctgacgagaacctgccctatgacctcagggcgtccttctgccgcctcatgcttcacatgcatgtggaccgagatccccaggaacaagtcacccccgtgaaatatgcccgcctctggtcggagattccctcggagatcgccattgacgactatgatagtagtggagcttccaaagatgaaattaaggagagatttgctcagaccatggagtttgtggaggagtatttaagagatgtggtttgtcagaggttccctttctctgataaagagaagaataagcttacgtttgaggttgtaaatttagctaggaatctcatatactttggtttctacaacttctctgaccttctacgattaactaagatccttctggccatattggactgtgtacatgtgacaacaatcttccccattagcaagatggcgaaaggagaagagaataaaggcagtaacgtgatgagatctattcatggcgtgggagagctgatgacccaggtggtgctccggggaggaggctttttgcccatgactcccatggctgctgcccctgaaggcaatgtgaagcaggcagagcctgagaaggaggacatcatggtcatggacaccaagctgaagatcattgagatactccagtttattttgaatgtgaggttggattataggatctcctgcctcctgtgtatatttaagcgagagtttgatgaaagcaattcccagacttcagaaacatcctccggaaacagcagccaagaagggccaagtaatgtaccaggtgctcttgactttgaacacattgaagaacaagcagaaggcatctttggaggaaggaaagagaacaccccactggacttggatgaccacggcggcagaacctttctccgtgtcctgctccacttgacgatgcatgactacccacccctggtgtcaggggccctgcagctcctcttccggcacttcagccagaggcaggaggtgctccaggccttcaaacaggttcaactgctggttaccagccaagatgtggacaactacaaacagatcaaacaagacttggatcaactgaggtccatcgtggaaaagtcagagctttgggtgtacaaagggcagggccccgatgagactatggatggtgcatctggagaaaatgaacataagaaaacggaggagggaaataacaagccacaaaagcatgaaagcaccagcagctacaactacagagtggtcaaagagattttgattcggcttagcaaactctgtgttcaagagagtgcctcagtgagaaagagcaggaagcagcaacagcgtctgctccggaacatgggcgcgcacgccgtggtgctggagctgctgcagattccctatgagaaggccgaagataccaagatgcaagagataatgaggttggctcatgaatttttgcagaatttctgcgcaggcaaccagcagaatcaagctttgctacataaacacataaacctgtttctcaacccagggatcctggaggcagtaaccatgcagcacatcttcatgaacaatttccagctttgcagtgagatcaacgagagagttgttcagcacttcgttcactgcatagagactcacggtcggaatgtccagtatataaagttcttacagacaattgtcaaggcagaagggaaatttattaaaaaatgccaagacatggttatggccgagctggtcaattcgggagaggatgtcctcgtgttctacaacgacagagcctctttccagactctgatccagatgatgcggtcagaacgggatcggatggatgagaacagccctctcatgtaccacatccacttggtcgagctcctggctgtgtgcacggagggtaagaatgtctacacagagatcaagtgcaactccctgctcccgctggatgacatcgttcgcgtggtgacccacgaggactgcatccctgaggttaaaattgcatacattaacttcctgaatcactgctatgtggatacagaggtggaaatgaaggagatttataccagcaatcacatgtggaaattgtttgagaatttccttgtagacatctgcagggcctgtaacaacactagtgacaggaaacatgcagactcgattttggagaagtatgtcaccgaaatcgtcatgagtattgttactactttcttcagctctcccttctcagaccagagtacgactttgcagactcgccagcctgtctttgtgcaactgctgcaaggcgtgttcagggtttaccactgcaactggttaatgccaagccaaaaagcctccgtggagagctgtattcgggtgctgtctgatgtagccaagagccgggccattgccattcccgtggacctggacagccaagtcaacaacctctttctcaagtcccacagcattgtgcagaaaacagccatgaactggcggctctcagcccgcaatgccgcacgcagggactctgttctggcagcttccagagactaccggaatatcattgagagattgcaggacatcgtctccgcgctggaggaccgtctcaggcccctggtgcaggcagagttatctgtgctcgtggatgttctccacagacccgagctgcttttcccagagaacacagacgccagaaggaaatgtgaaagtggcggtttcatttgcaagttaataaagcatacaaaacagctgctagaagaaaatgaagagaagctctgcattaaggtcctacagaccctgagggaaatgatgaccaaagatagaggctatggagaaaagggtgaggcgctcaggcaagttctggtcaaccgttactatggaaacgtcagaccttcgggacgaagagagagccttaccagctttggcaatggcccactgtcagcaggaggacccggcaagcccgggggaggagggggaggttccggatccagctctatgagcaggggtgagatgagtctggccgaggttcagtgtcaccttgacaaggagggggcttccaatctagttatcgacctcatcatgaacgcatccagtgaccgagtgttccatgaaagcattctcctggccattgcccttctggaaggaggcaacaccaccatccagcactcctttttctgtcgcttgacagaagataagaagtcagagaaattctttaaggtgttttatgaccggatgaaggtggcccagcaagaaatcaaagcaacagtgacagtgaacaccagtgacttgggaaataaaaagaaagacgatgaggtagacagggatgccccatcacggaaaaaagctaaagagcccacaacacagataacagaagaggtccgggatcagctcctggaggcctccgctgccaccaggaaagccttcaccactttcaggagggaggctgatcccgacgaccactaccagcctggagagggcacccaggccactgccgacaaggccaaggacgacctggagatgagcgcggtcatcaccatcatgcagcccatcctccgcttccttcagctcctgtgtgaaaaccacaaccgagacctgcagaacttcctccgttgccaaaataacaagaccaactacaatttggtatgtgagaccctgcagtttctggactgtatttgtggaagcacaactggaggccttggtcttctgggcttgtatataaatgaaaagaatgtagcgcttatcaaccaaaccctggaaagtctgaccgaatactgtcaaggaccttgccatgagaaccagaactgcatagccacccatgaatccaatggcattgacatcatcacagccctgatcctcaatgatatcaatcctttgggaaagaagaggatggaccttgtgttagaactgaagaacaatgcctcgaagttgctcctggccatcatggaaagcaggcacgacagtgaaaacgcagagaggatactttataacatgaggcccaaggaactggtggaagtgatcaagaaagcctacatgcaaggtgaagtggaatttgaggatggagaaaacggtgaggatggggcggcgtcccccaggaacgtggggcacaacatctacatattagcccatcagttggctcggcataacaaagaacttcagagcatgctgaaacctggtggccaagtggacggagatgaagccctggagttttatgccaagcacacggcgcagatagagattgtcagattagaccgaacaatggaacagatagtctttcccgtgcccagcatatgtgaattcctaaccaaggagtcaaaactacgaatttactatactacagagagagacgaacaaggcagcaaaatcaatgatttctttctgcggtctgaagacctcttcaatgaaatgaattggcagaagaaactgagagcccagcccgtgttgtactggtgtgcccgcaacatgtctttctggagcagcatttcgtttaacctggccgtcctgatgaacctgctggtggcgtttttctacccgtttaagggagtccgaggaggaaccctggagccccactggtcgggactcctgtggacagccatgctcatctctctggccatcgtcattgccctccccaagccccatggcatccgggccttaattgcctccacaattctacgactgatattttcagtcgggttacaacccacgttgtttcttctgggcgctttcaatgtatgcaataaaatcatctttctaatgagctttgtgggcaactgtgggacattcacaagaggctaccgagccatggttctggatgttgagttcctctatcatttgttgtatctggtgatctgtgccatggggctctttgtccatgaattcttctacagtctgctgctttttgatttagtgtacagagaagagactttgcttaatgtcattaaaagtgtcactcgcaatggacggtccatcatcctgacagcagttctggctctgatcctcgtttacctgttctcaatagtgggctatcttttcttcaaggatgactttatcttggaagtagataggctgcccaatgaaacagctgttccagaaaccggcgagagtttggcaagcgagttcctgttctccgatgtgtgtagggtggagagtggggagaactgctcctctcctgcacccagagaagagctggtccctgcagaagagacggaacaggataaagagcacacatgtgagacgctgctgatgtgcattgtcactgtgctgagtcacgggctgcggagcgggggtggagtaggagatgtactcaggaagccgtccaaagaggaacccctgtttgctgctagagttatttatgacctcttgttcttcttcatggtcatcatcattgttcttaacctgatttttggggttatcattgacacttttgctgacctgaggagtgagaagcagaagaaggaagagatcttgaagaccacgtgctttatctgtggcttggaaagagacaagtttgacaacaagactgtcacctttgaagagcacatcaaggaagaacacaacatgtggcactatctgtgcttcatcgtcctggtgaaagtaaaggactccaccgaatatactgggcctgagagttacgtggcagaaatgatcaaggaaagaaaccttga

SEQ ID NO: 9032 - protein, 2695 aa, Homo sapiens
MSDKMSSFLHIGDICSLYAEGSTNGFISTLGLVDDRCVVQPETGDLNNPPKKFRDCLFKLCPMNRYSAQKQFWKAAKPGANSTTDAVLLNKLHHAADLEKKQNETENRKLLGTVIQYGNVIQLLHLKSNKYLTVNKRLPALLEKNAMRVTLDEAGNEGSWFYIQPFYKLRSIGDSVVIGDKVVLNPVNAGQPLHASSHQLVDNPGCNEVNSVNCNTSWKIVLFMKWSDNKDDILKGGDVVRLFHAEQEKFLTCDEHRKKQHVFLRTTGRQSATSATSSKALWEVEVVQHDPCRGGAGYWNSLFRFKHLATGHYLAAEVDPDQDASRSRLRNAQEKMVYSLVSVPEGNDISSIFELDPTTLRGGDSLVPRNSYVRLRHLCTNTWVHSTNIPIDKEEEKPVMLKIGTSPVKEDKEAFAIVPVSPAEVRDLDFANDASKVLGSIAGKLEKGTITQNERRSVTKLLEDLVYFVTGGTNSGQDVLEVVFSKPNRERQKLMREQNILKQIFKLLQAPFTDCGDGPMLRLEELGDQRHAPFRHICRLCYRVLRHSQQDYRKNQEYIAKQFGFMQKQIGYDVLAEDTITALLHNNRKLLEKHITAAEIDTFVSLVRKNREPRFLDYLSDLCVSMNKSIPVTQELICKAVLNPTNADILIETKLVLSRFEFEGVSSTGENALEAGEDEEEVWLFWRDSNKEIRSKSVRELAQDAKEGQKEDRDVLSYYRYQLNLFARMCLDRQYLAINEISGQLDVDLILRCMSDENLPYDLRASFCRLMLHMHVDRDPQEQVTPVKYARLWSEIPSEIAIDDYDSSGASKDEIKERFAQTMEFVEEYLRDVVCQRFPFSDKEKNKLTFEVVNLARNLIYFGFYNFSDLLRLTKILLAILDCVHVTTIFPISKMAKGEENKGSNVMRSIHGVGELMTQVVLRGGGFLPMTPMAAAPEGNVKQAEPEKEDIMVMDTKLKIIEILQFILNVRLDYRISCLLCIFKREFDESNSQTSETSSGNSSQEGPSNVPGALDFEHIEEQAEGIFGGRKENTPLDLDDHGGRTFLRVLLHLTMHDYPPLVSGALQLLFRHFSQRQEVLQAFKQVQLLVTSQDVDNYKQIKQDLDQLRSIVEKSELWVYKGQGPDETMDGASGENEHKKTEEGNNKPQKHESTSSYNYRVVKEILIRLSKLCVQESASVRKSRKQQQRLLRNMGAHAVVLELLQIPYEKAEDTKMQEIMRLAHEFLQNFCAGNQQNQALLHKHINLFLNPGILEAVTMQHIFMNNFQLCSEINERVVQHFVHCIETHGRNVQYIKFLQTIVKAEGKFIKKCQDMVMAELVNSGEDVLVFYNDRASFQTLIQMMRSERDRMDENSPLMYHIHLVELLAVCTEGKNVYTEIKCNSLLPLDDIVRVVTHEDCIPEVKIAYINFLNHCYVDTEVEMKEIYTSNHMWKLFENFLVDICRACNNTSDRKHADSILEKYVTEIVMSIVTTFFSSPFSDQSTTLQTRQPVFVQLLQGVFRVYHCNWLMPSQKASVESCIRVLSDVAKSRAIAIPVDLDSQVNNLFLKSHSIVQKTAMNWRLSARNAARRDSVLAASRDYRNIIERLQDIVSALEDRLRPLVQAELSVLVDVLHRPELLFPENTDARRKCESGGFICKLIKHTKQLLEENEEKLCIKVLQTLREMMTKDRGYGEKGEALRQVLVNRYYGNVRPSGRRESLTSFGNGPLSAGGPGKPGGGGGGSGSSSMSRGEMSLAEVQCHLDKEGASNLVIDLIMNASSDRVFHESILLAIALLEGGNTTIQHSFFCRLTEDKKSEKFFKVFYDRMKVAQQEIKATVTVNTSDLGNKKKDDEVDRDAPSRKKAKEPTTQITEEVRDQLLEASAATRKAFTTFRREADPDDHYQPGEGTQATADKAKDDLEMSAVITIMQPILRFLQLLCENHNRDLQNFLRCQNNKTNYNLVCETLQFLDCICGSTTGGLGLLGLYINEKNVALINQTLESLTEYCQGPCHENQNCIATHESNGIDIITALILNDINPLGKKRMDLVLELKNNASKLLLAIMESRHDSENAERILYNMRPKELVEVIKKAYMQGEVEFEDGENGEDGAASPRNVGHNIYILAHQLARHNKELQSMLKPGGQVDGDEALEFYAKHTAQIEIVRLDRTMEQIVFPVPSICEFLTKESKLRIYYTTERDEQGSKINDFFLRSEDLFNEMNWQKKLRAQPVLYWCARNMSFWSSISFNLAVLMNLLVAFFYPFKGVRGGTLEPHWSGLLWTAMLISLAIVIALPKPHGIRALIASTILRLIFSVGLQPTLFLLGAFNVCNKIIFLMSFVGNCGTFTRGYRAMVLDVEFLYHLLYLVICAMGLFVHEFFYSLLLFDLVYREETLLNVIKSVTRNGRSIILTAVLALILVYLFSIVGYLFFKDDFILEVDRLPNETAVPETGESLASEFLFSDVCRVESGENCSSPAPREELVPAEETEQDKEHTCETLLMCIVTVLSHGLRSGGGVGDVLRKPSKEEPLFAARVIYDLLFFFMVIIIVLNLIFGVIIDTFADLRSEKQKKEEILKTTCFICGLERDKFDNKTVTFEEHIKEEHNMWHYLCFIVLVKVKDSTEYTGPESYVAEMIKERNLDWFPRMRAMSLVSSDSEGEQNELRNLQEKLESTMKLVTNLSGQLSELKDQMTEQRKQKQRIGLLGHPPHMNVNPQQPA

SEQ ID NO: 9033 - DNA, 8192 bp, Homo sapiens; identical to SEQ ID NO: 9029

SEQ ID NO: 9034 - protein, 2710 aa, Homo sapiens; identical to SEQ ID NO: 9030

SEQ ID NO: 9035 - DNA, 8192 bp, Homo sapiens; identical to SEQ ID NO: 9031

SEQ ID NO: 9036 - protein, 2695 aa, Homo sapiens; identical to SEQ ID NO: 9032

SEQ ID NO: 9037 - DNA, 931 bp, Homo sapiens
ttgagctggacgaagacaccaccagatttcgtagtgtcactcatctcatgctttcaacaccagccctggcctgccacctgacagccaccttctggccctgagggtgaggcgctcaggcaagttctggtcaaccgttactatggaaacgtcagaccttcgggacgaagagagagccttaccagctttggcaatggcccactgtcagcaggaggacccggcaagcccgggggaggagggggaggttccggatccagctctatgagcaggggtgagatgagtctggccgaggttcagtgtcaccttgacaaggagggggcttccaatctagttatcgacctcatcatgaacgcatccagtgaccgagtgttccatgaaagcattctcctggccattgcccttctggaaggaggcaacaccaccatccaggtaggaaggcagcttggctactggtatggcatccctgctgagcaggaggagagtctgttctgggagccagatgtctgggtggtaccaagccttgtttgagagacagctcattctgagggcacaaaattctgttttgaaaaatgagttctgctagtatcctgctgtgatcatttggtcataaatcagacttggttccagaacatgagttacatttgaaaactgataaaacactgagaatacgcaaaggaaactggcctaagatctggcacatagtgggcactccataaatgtttgttgaataagtaaatgattgcatgaagtttatttacagtttttatccaagattgtaggggatctcatcacaagatgaccaaagagtttgaactgtgtgtgctatttagaagatttaacttttatgtatctatagataccacagctgttgcttctgataaatttacctaccttttaactgaaagtttaataaagccaaatcaatttgaaatac

SEQ ID NO: 9038 - protein, 40 aa, Homo sapiens
METSDLRDEERALPALAMAHCQQEDPASPGEEGEVPDPAL

SEQ ID NO: 9039 - DNA, 864 bp, Homo sapiens
agacagagacgtcattgcttcacccagggcaagaggacaaaggaggatgcatggaaatacaaacagcccttctcctccaggccataccgactgtccaactagcaacagacttcacctggttttggagcaatctgaatttggaatatgccagagaaaacttctatcaggcaagatggaagatgttgttgggacaggacaagagtccacatcccctgcccagtgcctggttctgggtcatgtcaccgaagcgcatcagcccatctgtcagccaaaccccactagccttgtgccttctcttctaaatccccgcggaggaaaacaacttctgccttctacagtacgaacagcgagggtctgctgggaaccaatacaacttcgcgtcccagtgcagcaatgttgccaggtaacaaatgtagaaacatactccaaaaactgtatgtgacaatatacaacctccgctctgcagctgataaccgagggagtgttaaaacaccgcgttctcttaacacttgggtttttggtgtgaaagtaaaattaaacgggatacttcctcttgtaaatataagacaggcatacaactcacacacgtatccactaatcggaaatagtagaggggtttgcaatagctatctgcagtgcatcccagccttcactcttaccctcaagatgaattccagaaaacctacagaaacgataactgaggaagagcctttcttctgtcggggacaagctctcctctaacaattgtgaggaagctacccacaagaaagacaccagcagaaattaaggaaaagctcatgcattgttattaaaaaaaaatgtgcttccattccactccattttaaaggtctacctttaaaactc

SEQ ID NO: 9040 - protein, 131 aa, Homo sapiens
MHGNTNSPSPPGHTDCPTSNRLHLVLEQSEFGICQRKLLSGKMEDVVGTGQESTSPAQCLVLGHVTEAHQPICQPNPTSLVPSLLNPRGGKQLLPSTVRTARVCWEPIQLRVPVQQCCQVTNVETYSKNCM

SEQ ID NO: 9041 - DNA, 1729 bp, Homo sapiens
agtgtgtacatgaggcgccttcactgtccctgcatcaggaatctagctgttggcaccttataatgagaaaacagtctcaaccatgaagttaactctgctggaagatttccaaagggaaagtccctcccgttactcagaggggaaaaaaaaattacctacttggtctggaatccggggatattttatgcagatgtctctaacagaagttaataaagggaagtcagcttgcctctgattattcaaacaggctactgctattaaggattgcacaacttctgggcaaggcagaggtgggtttggctttttaaaaattttttcagcctgtcctcatggaactacatattcttttctaagaacttttcatcctaacctccctactcacatcttctaagtgtctctgctctggtgggaatgtgatggacaacacagagccatctcagaagcctctgtggccaccaccaggccggccagggtgcagggggccactccctgggcagccatagggttctcagcaaggtgcattcgtcgtccctgctgagaatctgatggggcagcatttttttttttaattaaatgcaagctgagtcatttcaacctgcaaccttcaggtaacaggagttacccaagctccaggaattatgattgtggggtaaacccattctcttgttttcttgcggttctattttataacgcactagaggagacagagacgtcattgcttcacccagggcaagaggacaaaggaggatgcatggaaatacaaacagcccttctcctccaggccataccgactgtccaactagcaacagacttcacctggttttggagcaatctgaatttggaatatgccagagaaaacttctatcaggcaagatggaagactcctaggataggtctctctcatggagggattggcacgatggtaagagtccagtggatggaaaaggcctcctccttaaagatggtgatggaaacgagcactgcacagggaaacacaaatcaggtcccctgaaatccagcccaacctggccagaccctccagtgcccatcagggcttatgaacagggtgcttcagtgtctttgttaggggtggttaaaaaggagcacgtgcttataggggatgctgctgagctccatgattttgacttcctgtctaacctgttgatgctacaaaactcttttaaaaacagttaccatgggaacttttccctagcaagcattcttcaagaaacgttacaggtgctggtgaattcaatgcccttggtgtcaataagcttttgctgagtcttagaatgtgtggcttgaactgagaggactttcaaacagataatgcgaagtttccaatgcaaatgtcttcggggttaagtgtcagtgaagtgcagtggaaggtagggggataaaatgatctcagtgtatatggaggccccacttaagcattcaaaaaattctatatacagtgttttcaatgtattatgtatcagcaaaacaaaataccccatagggctataatcagctcagggggtcacctcagcaagagatgctctggctatcactcctactacgggatttcctctctcatcagaaccagtaggtggtcaaaaccacaataatgcataaatgaaggcagggaattgggtatccaatgtgagcaactgaaaaggtgccatgtattagctatttgccattatggttctgcaagtgctcagatgactcataaaatgaccagaac

SEQ ID NO: 9042 - protein, 86 aa, Homo sapiens [sequence omitted]

SEQ ID NO: 9043 - DNA, 334 bp, Homo sapiens
gtgttgggttatattcattcttttatcaaataatcatggagtgccttctatttgctgggcctcttctaggtgctctgggggcagctggaaaccactcaggcgaggcatctgccttcacagagcttgcactctgcataaggcagacagtaaggaggtgaacggtcagtgcaacagtgcaattcagaggccttgattgcttggttccagagtgggagtcgtgaaggcctcaatgacatggaggatgacaaggctaagcataggggaggtggtgacttgtgtcctggcatttggcagtggctggagggaaaacgaaccagggagcacaggcaggatg

SEQ ID NO: 9044 - protein, 40 aa, Homo sapiens
MECLLFAGPLLGALGAAGNHSGEASAFTELALCIRQTVRR

SEQ ID NO: 9045 - DNA, 365 bp, Homo sapiens
tgcaatgtgtaaacggctcaactggccattcctctctttgaagatggggtcaggccacaagccaaggaacggaggcagcctcttgaacctgaaaaaggcaagaaaatggattctcccctagtgccttcagaaggaacgtggacaagcagaactgttcaaaagaagaggctgttctaagaaagactaccgagtaatcaatcacctcctcagagaaagtctgctcagggaccagctctgtgaacacggcaagtaacaacagagagaaaacgtgaggagaaaagagagaccgggattttgaaatcctgtttcctgaatgccatctcaccaggcacacgaaagaataaaattaaggaatcaagagccaa

SEQ ID NO: 9046 - protein, 38 aa, Homo sapiens
MCKRLNWPFLSLKMGSGHKPRNGGSLLNLKKARKWILP

SEQ ID NO: 9047 - DNA, 401 bp, Homo sapiens
agacaaactaactgaagccacagccggaagcaggctgaccacaagtgctaaggttctggttagttcttttctaggttcaaaagaagaggctgttctaagaaagactaccgagtaatcaatcacctcctcagagaaagtctgctcaggaaactctcctcccaccagcccctgcacttggttccttgcgttgcctctggctggaagctgttgtccccaacttcagaaagtgtctgcagatttcacaggctctctcttgggtcaagggaccagctctgtgaacacggcaagtaacaacagagagaaaacgtgaggagaaaagagagaccgggattttgaaatcctgtttcctgaatgccatctcaccaggcacacgaaagaataaaattaaggaatcaagagcc

SEQ ID NO: 9048 - protein, 75 aa, Homo sapiens
FFSRFKRRGCSKKDYRVINHLLRESLLRKLSSHQPLHLVPCVASGWKLLSPTSESVCRFHRLSLGSRDQLCEHGK

SEQ ID NO: 9049 - DNA, 340 bp, Homo sapiens
gcaatggacccagctcacgggagcttgcagtctaacacaggaaacagccacctgcatctgtaaaggtactgatgagacctctttagtatgacactggcaactgacggcactgcggatatgtttggaataaggttcaaaagaagaggctgttctaagaaagactaccgagtaatcaatcacctcctcagagaaagtctgctcagggaccagctctgtgaacacggcaagtaacaacagagagaaaacgtgaggagaaaagagagaccgggattttgaaatcctgtttcctgaatgccatctcaccaggcacacgaaagaataaaattaaggaatcaagagc

SEQ ID NO: 9050 - protein, 47 aa, Homo sapiens
MTLATDGTADMFGIRFKRRGCSKKDYRVINHLLRESLLRDQLCEHGK

SEQ ID NO: 9051 - DNA, 376 bp, Homo sapiens
ctctttagtatgacactggcaactgacggcactgcggatatgtttggaataaggttcaaaagaagaggctgttctaagaaagactaccgagtaatcaatcacctcctcagagaaagtctgctcaggaaactctcctcccaccagcccctgcacttggttccttgcgttgcctctggctggaagctgttgtccccaacttcagaaagtgtctgcagatttcacaggctctctcttgggtcaagggaccagctctgtgaacacggcaagtaacaacagagagaaaacgtgaggagaaaagagagaccgggattttgaaatcctgtttcctgaatgccatctcaccaggcacacgaaagaataaaattaaggaatcaag

SEQ ID NO: 9052 - protein, 86 aa, Homo sapiens
MTLATDGTADMFGIRFKRRGCSKKDYRVINHLLRESLLRKLSSHQPLHLVPCVASGWKLLSPTSESVCRFHRLSLGSRDQLCEHGK

SEQ ID NO: 9053 - DNA, 513 bp, Homo sapiens
agacaaactaactgaagccacagccggaagcaggctgaccacaagtgctaaggttctggttagttcttttctaggttcaaaagaagaggctgttctaagaaagactaccgagtaatcaatcacctcctcagagaaagtctgctcaggaaactctcctcccaccagcccctgcacttggttccttgcgttgcctctggctggaagctgttgtccccaacttcagaaagtgtctgcagatttcacaggctctctcttgggtcaaggattgatcaaataaatatatcacggataatgggagctggattcctcactgcctgagaaaagaacacaaatagagaaagggagaaagaataaaccctgtaatgctgaaacggaattaaagggaccagctctgtgaacacggcaagtaacaacagagagaaaacgtgaggagaaaagagagaccgggattttgaaatcctgtttcctgaatgccatctcaccaggcacacgaaagaataaaattaaggaatc

SEQ ID NO: 9054 - protein, 56 aa, Homo sapiens
ERLPSNQSPPQRKSAQETLLPPAPALGSLRCLWLEAVVPNFRKCLQISQALSWVKD

SEQ ID NO: 9055 - DNA, 455 bp, Homo sapiens
tctcactcctcaggtcagcaaaagtgtcaatgataaccccaaaaatcaggttaagaacaatgatgatgaccatgaagaagaacaagaggtcataaataactctagcagcaaacaggggttcctggaaaagagaggtgtctggatcagtctgggtcccttgcgaccctttggtctgcggagcctggggcacagctcaagtgagacctcatctacttgggtagaaattaaattgggcattcaacttttaaactgaaaactgcatctcttttcatgtcccctgtctcaattgcgacttctccaagtgtggtgtgacacagccaggagggatattcactggaccagctctgtgaacacggcaagtaacaacagagagaaaacgtgaggagaaaagagagaccgggattttgaaatcctgtttcctgaatgccatctcaccaggcacacgaaagaataaa

SEQ ID NO: 9056 - protein, 42 aa, Homo sapiens
KLHLFSCPLSQLRLLQVWCDTARRDIHWTSSVNTASNNREKT

SEQ ID NO: 9057 - DNA, 224 bp, Homo sapiens
ttcaacagtgtcagcggaggctcacgaggcatggtgactgaagccccgcaggaggtgggatttgcaaaggacattattggaatgaagggtgaaatttgaataagggaccagctctgtgaacacggcaagtaacaacagagagaaaacgtgaggagaaaagagagaccgggattttgaaatcctgtttcctgaatgccatctcaccaggcacacgaaagaataaa

SEQ ID NO: 9058 - protein, 34 aa, Homo sapiens
TRQVTTERKREEKRETGILKSCFLNAISPGTRKN

SEQ ID NO: 9059 - DNA, 2132 bp, Homo sapiens
ctctgttcagtagacttagggactgtttccatcagggttaggcctgatccacctgaacgcacagtgaatatccctcctggctgtgtcacaccacacttggagaagtcgcaattgagacaggggacatgaaaagagatgcagttttcagtttaaaagttgaatgcccaatttaatttctacccaagtagatgaggtctcacttgagctgtgccccaggctccgcagaccaaagggtcgcaagggacccagactgatccagacacctctcttttccaggaacccctgtttgctgctagagttatttatgacctcttgttcttcttcatggtcatcatcattgttcttaacctgatttttggggttatcattgacacttttgctgacctgaggagtgagaagcagaagaaggaagagatcttgaagaccacgtgctttatctgtggcttggaaagagacaagtttgacaacaagactgtcacctttgaagagcacatcaaggaagaacacaacatgtggcactatctgtgcttcatcgtcctggtgaaagtaaaggactccaccgaatatactgggcctgagagttacgtggcagaaatgatcaaggaaagaaaccttgactggttccccaggatgagagccatgtcattggtcagcagtgattctgaaggagaacagaatgagctgagaaacctgcaggagaagctggagtccaccatgaaacttgtcacgaacctttctggccagctgtcggaattaaaggatcagatgacagaacaaaggaagcagaaacaaagaattggtcttctaggacatcctcctcacatgaatgtcaacccacaacaaccagcataagcaaatgaaagaaaggaattgtatttaccttttataattattattagtgtgggtatggctaatgagttctgattcacccacgaaggttacatttatgctgaatacatttgtaaatactcagttttatactgtatgtatatgattgctactctaaaggtttggatatatgtattgtaattagaattgttggcatgatgacatttcatttgtgccaaaaatattaaaaatgccttttttggaaggactaacagaaagcacctgatttgcacttgaaccagattatagatttaaaagtatatgacatgtattttgtatttaaaactagaatagccagtatttatgttttttataaaactgtgcaatacgaattatgcaatcacaatacatttgtagctcccgagtgtcctaaagggagtgcacttctttgaagctggtgtgttaatactatgtaataaatggttaactttcaaatgatgctgctgccaaaattatattaatagtgagtttcaggcccctgggcattttgtaccatgtaattatcctctggtgatgctgtttctcgttagtggcagtagtgcctccgtctcctagtgataatgctccaagtctatgaactgttaaatcagcattcattttaagaaaagcaactttagtttcaaagatacttttaagcttctaaattgatcatttaaactatttctttaaataagagagccaaattagaggctcatactttagcttgtgaagaagataatgaattttttaaagggaactttctatgcaatgttcaggataaatgcatactgctggccaatcagtgtcatctcctgggtaaattttgatgtcgcattataaagacatgcataattgatggtttctagattatctagtccaaacaatagagtttattttttcttcatctgaaccaacatgctacagtagctaagaagtattaaaactatatacatccatataaagatgaaatatgaactatctcattagaagtcatagttgaccacagacatgttattcttctgaaagagccacattttggttttatttcttgtcacatgatttcttttcttgatggatgaaaaatatgaaaggaaacttttatatctgttgcctagttttgtacatggatctcattttacaagagaatctctctgcaaaaaaaaaaaaaacagtttaaaaatgcattgaaagcagagttctgaaatgagtaaagtttgtaaatgcatatataaaaatatttaataaatgatgcagaatatacagtg

SEQ ID NO: 9060 - protein, 175 aa, Homo sapiens
MVIIIVLNLIFGVIIDTFADLRSEKQKKEEILKTTCFICGLERDKFDNKTVTFEEHIKEEHNMWHYLCFIVLVKVKDSTEYTGPESYVAEMIKERNLDWFPRMRAMSLVSSDSEGEQNELRNLQEKLESTMKLVTNLSGQLSELKDQMTEQRKQKQRIGLLGHPPHMNVNPQQPA

SEQ ID NO: 9061 - DNA, 3435 bp, Homo sapiens
ctctgttcagtagacttagggactgtttccatcagggttaggcctgatccacctgaacgcacagtgaatatccctcctggctgtgtcacaccacacttggagaagtcgcaattgagacaggggacatgaaaagagatgcagttttcagtttaaaagttgaatgcccaatttaatttctacccaagtagatgaggtctcacttgagctgtgccccaggctccgcagaccaaagggtcgcaagggacccagactgatccagacacctctcttttccaggaacccctgtttgctgctagagttatttatgacctcttgttcttcttcatggtcatcatcattgttcttaacctgatttttggggttatcattgacacttttgctgacctgaggagtgagaagcagaagaaggaagagatcttgaagaccacgtgctttatctgtggcttggaaagagacaagtttgacaacaagactgtcacctttgaagagcacatcaaggaagaacacaacatgtggcactatctgtgcttcatcgtcctggtgaaagtaaaggactccaccgaatatactgggcctgagagttacgtggcagaaatgatcaaggaaagaaaccttgactggttccccaggatgagagccatgtcattggtcagcagtgattctgaaggagaacagaatgagctgagaaacctgcaggagaagctggagtccaccatgaaacttgtcacgaacctttctggccagctgtcggaattaaaggatcagatgacagaacaaaggaagcagaaacaaagaattggtcttctaggacatcctcctcacatgaatgtcaacccacaacaaccagcataagcaaatgaaagaaaggaattgtatttaccttttataattattattagtgtgggtatggctaatgagttctgattcacccacgaaggttacatttatgctgaatacatttgtaaatactcagttttatactgtatgtatatgattgctactctaaaggtttggatatatgtattgtaattagaattgttggcatgatgacatttcatttgtgccaaaaatattaaaaatgccttttttggaaggactaacagaaagcacctgatttgcacttgaaccagattatagatttaaaagtatatgacatgtattttgtatttaaaactagaatagccagtatttatgttttttataaaactgtgcaatacgaattatgcaatcacaatacatttgtagctcccgagtgtcctaaagggagtgcacttctttgaagctggtgtgttaatactatgtaataaatggttaactttcaaatgatgctgctgccaaaattatattaatagtgagtttcaggcccctgggcattttgtaccatgtaattatcctctggtgatgctgtttctcgttagtggcagtagtgcctccgtctcctagtgataatgctccaagtctatgaactgttaaatcagcattcattttaagaaaagcaactttagtttcaaagatacttttaagcttctaaattgatcatttaaactatttctttaaataagagagccaaattagaggctcatactttagcttgtgaagaagataatgaattttttaaagggaactttctatgcaatgttcaggataaatgcatactgctggccaatcagtgtcatctcctgggtaaattttgatgtcgcattataaagacatgcataattgatggtttctagattatctagtccaaacaatagagtttattttttcttcatctgaaccaacatgctacagtagctaagaagtattaaaactatatacatccatataaagatgaaatatgaactatctcattagaagtcatagttgaccacagacatgttattcttctgaaagagccacattttggttttatttcttgtcacatgatttcttttcttgatggatgaaaaatatgaaaggaaacttttatatctgttgcctagttttgtacatggatctcattttacaagagaatctctctgcaaaaaaaaaaaaaacagtttaaaaatgcattgaaagcagagttctgaaatgagtaaagtttgtaaatgcatatataaaaatatttaataaatgatgcagaatatacagtgactggttggtggctttcatttggcatttgtgacttaactgctattccatttatgtactttctttaggatcagtttgaagtacagtcggtttgattaccaggttaattcagaaaatgtttacctgattatttaaaaaaacacttgctgttgttatgacagctctgaggagaattattagaacaaacattggggagtatttagtacaacattcattcattcttctggattagtgactgccagccaggctgtcgggagcgccctactaaatctcctgtctcttctgcttttactgggggatctttaatttgctgtgtgccatgtggaagtatcgggaacagctgaaatttgttttagttcatgcccagtggtcagggtccttcagcaaagtgtaaaatgtttttacagagccaccttgcctgtccaaacgtagtaaaacctgttccctcctcaaatcagtgcttgccctggctgctttttttgacactaattttctctatgctttggtaaataataccacccaatgttgggaactaggtcaagattaaattccagttaaatggctagttttgtaactaatgcttctactttataaatttgataacttaaaaacaaattaattttttccagtcagtgcagcctgtctccacaaaatttttccatcgtaaggcaagcctaagacagatacctacttttatctgtaagcaaaatggcaatctatgctaacccccacaatgcacacattagctagcaaggacttgcttttcccctgggctttctctttgatctctcacactgcccaacgagatgtggcagtgtgtgtggtttgtctcccaagtcccatccagttcattggaaagttctgcattgacatgccaagttgcagcttttacaggtttgtcatgttccatttgaatcctgtcacttaagatataaatcttcattcagtgtgccagcttcagcagaaaataaacgaaattggaatgccactcctccctccatgcagtagatcctacccttgccgtttgggtgtgaacactaaagctagtagaattgaaacatacaatttgaagtgaaaactccgggggcctttgatgtgtaattgtaattctgcctgcttccttcacattgtgcctttccaacacctctattttaagatcaaggtccaagtcaccttcaaagttacctacccggatgaagaattagtgttatcagggtgaaagtatggtagtactcgctaacatgagagaaagccaatgttacttaattaagccattttatttaatattaacagtttgctacagca

SEQ ID NO: 9062 - protein, 175 aa, Homo sapiens; identical to SEQ ID NO: 9060

SEQ ID NO: 9063 - DNA, 599 bp, Homo sapiens
ccttgcagacgaaagctgctgacgggaaaaccacgcgggaggggaacgtctaggccctggccctttcccctcaaaggccgcgggaacatagggctggggaatcctggcagaggctctgggcattattacagatggtcgttgagggtcgcaagcaccaggcctggaggccctcctcggcctgctaccagctgtgacctttggaaagtgacttggctcgcgcctcagttttccgttttctggaggacttgcggcctgagagtggccaaaaagaagagagttactgtcgcagtcactgcctgcctagtgggtatttaggtgcccagtcatgcctttgctctcggagccagtgcctggtgcaagcactgcggtgggttcgtgccccagcttgggggccacagggctgactcggccgcactgcctatgcgagcttggccccagtttcctcgtcagggcacagaacttccttcaaagtgcaatacttccattgtgttcagtgcaataccttgcgtcacaccatgggacccatgcaatgctggaagtgctcccaagaagcagagaaaagtcatgacattagaagaaaaagttgaattgcttgatat

SEQ ID NO: 9064 - protein, 80 aa, Homo sapiens
MPLLSEPVPGASTAVGSCPSLGATGLTRPHCLCELGPSFLVRAQNFLQSAILPLCSVQYLASHHGTHAMLEVLPRSREKS

SEQ ID NO: 9065 - DNA, 2350 bp, Homo sapiens
ctgcaggaagagagaccaggaagggtcgtgactgcttgcgcacggctgcaggcgttctgccgggcaagaacctcccggtgcgcccggagctgctccaagttgagagtggcgcataacatggggctgcagttgaggcttgaagggccaaggagtgccaacttaccctgatttctttgcaagtttcattaagctcttcagcatctgagaaaggattagaatgtttattcacactctccaaattccagtttatcagttcattgattcatcaacgttgattaagcacttactatgtgctgagaatacaaagggttgcagaaaaggaagaagaatcagcagagagcatttgtggccagcaaagcttaaaatatttcctaaccgatcctttgcaaaaaaagttcacccactcctgtagtcagcagctcccctactgtgcgcagtcagtgtgccatctcagactagcaaagatttgtgcttggatcatctacacttccctgaatgttgaagaagatatgctatccatgcaatccttgtcgactgcttgattaaaaagtggataaacctgtcttcaggcccttggagtatggtgtctgtgtgaagaagggaatgaggcagaagtagcagtcagtggtggctgaagtaggagaaagtgcttgctaatgaaatcttgatttttctgtggcttttctgtgcaattgggtggctaagtaggaaagccattggagcttcactgtatcaattctgcctttcttgttttttggaactccaattcaccaaggctccctgccaccctatccatctataacttttcatcactttttcctcaaagtaagaagtgtgtcccagaaaatgtgcctttgtgactcagcaacatttcaaatccatctgagccttcccagcgttccaaaagaaatactgatttgaattcagctgcttaaaaaaccagtctctaagcagacagcttgaaacttccttacagcaatagtttaggctttggaggggaaattggtttgtttttaattgttttaatttttcattcaattcatttgccgcctgattatatatgatcttttgagcccaatactctgctaaattaaccttgactttctttctctctttctctctctctccttctctctttcttcctttctttctttctttttgacagagccttgctctgtcgcccaggctggaatgcagtggcacaatctcagctcactgtaaactccgcctccaaagttcaagcaattctcctgcctcagcctcctgtgtagctgggattacacacgccagccaccatgcctggctaatttttgtatttttagtaaagatggagtttcaccctcttggccaagctggtctcgaactcctgacctcaaccttggcctctcaaagtgctgggattacaagcatgagccaccatgcctggccttaccttgattttttttttttgagacagagtctcactctgttgctcaggctggagtgtagtggctcgatcttggctcactgcaacctccatctcccgggttcaagagattctcctgcctcagcctcccaagtagctgggactacaggtgtgggccaccacgcctagctaattttttatatgtttactagagacagggtttcaccatgttgggcaggctggtcttgaactcctgacctcaggtgattcacctgcctcggcctcccaaaatgctgggattacaggtgtgagccaccacacccggcccctacctttgatttttaagtcaagagggaacaagtcgaaatttctattcaggtaaactgtatacctttggacactgaatcacttttagaaccccagtaaaaatcatgtatgaatgacccacaatttcactccaacaggaaggtgtgtatatgtgcacaaaaacattagattgttcacaccggtgctattcataatagtcaaaaactggaaacaactcaaacatccatcaactgtagaatggataaataaatcatgatatattcataccatggaacataacagtgacaataaatgaaccactgctacacacaacagatatgaatttcacaaacagaatgctgagcaacagaagccaaacacagaaggatacacatttataaatccatttgtatgaagttcataaacagacaaaattagtcagtggagattattctcatagaagtctgaagggtagttgtctttagggagggggatatagtgactgaggtgggtataaggggtttctggggtttggtgatggtacaccagcatattcactctgaaaactcattgagctgtgcaataatgatttttcaaacttttatatgtgtatgataatgcttcaataaagctttgctt

SEQ ID NO: 9066 - protein, 64 aa, Homo sapiens
MFIHTLQIPVYQFIDSSTLIKHLLCAENTKGCRKGRRISREHLWPAKLKIFPNRSFAKKVHPLL

SEQ ID NO: 9067 - DNA, 544 bp, Homo sapiens
catctgtcatccatctagtgaggtcaggagagtggctgcttaacttctgggggttgcagaaaaggaagaagaatcagcagagagcatttgtggccagcaaagcttaaaatatttcctaaccgatcctttgcaaaaaaagttcacccactcctgtagtcagcagctcccctactgtgcgcagtcagtgtgccatctcagactagcaaagttgtccagagaggaaagacaggccaaaatagttcagtatgctgtcttactgggaggacaacagcttaagccacaaagccctgagtttgaccctagaactctgtggctactggtgactcatcttgaaaattatcagattgaatcttctctaccggtttgataacaactgatgagtggaaaaagaacgccaatcaaatgtgcatgcttaataagcagcctccttattcccctctgcagatttgtgcttggatcatctacacttccctgaatgttgaagaagatatgctatccatgcaatccttgtcgactgcttgattaaaaagtggataaacctgtc

SEQ ID NO: 9068 - protein, 39 aa, Homo sapiens
MCMLNKQPPYSPLQICAWIIYTSLNVEEDMLSMQSLSTA

SEQ ID NO: 9069 - DNA, 2987 bp, Homo sapiens
gtgggtgccgacggcggcgccgggacgggcgtggggggtagggcgagtcatatgatccgctcggcttcctgggtctggctgctgccgcccgccggtgtccgcccgtgtcgcgccggggcaccaaggagccgttggagggtccgggcggaggcccgctcgtgtggaagtcgtcgacgccgccgctcgtccgtcctcccgtccgttctcgctcccggccgccatcatgctggcgctcatctcccgcctgctggactggttccgttcgctcttctggaaggaagagatggagctgacgctcgtggggctgcagtactcgggcaagaccaccttcgtcaatgtcatcgcgtcaggtcaattcagtgaagatatgatacccacagtgggcttcaacatgaggaaggtaactaaaggtaacgtcacaataaagatctgggacataggaggacaaccccgatttcgaagcatgtgggagcggtattgcagaggagtcaatgctattgtttacatgatagatgctgcagatcgtgaaaagatagaagcttcccgaaatgagctacataatcttctagataaaccacagttacaaggaattccagtgctagtgcttggaaacaagagagatcttcctaatgccttggatgagaaacagctaattgaaaaaatgaatctgtctgctattcaggatagagaaatttgctgctattcaatttcttgcaaagaaaaggataatatagatatcacacttcagtggcttattcagcattcaaaatctagaagaagctgaagcatctcctgaagtcttccagtccttcttggctataatcctagaattattgtccgttcctctgaagtaattcccagaatacggtccttcctaaaccccagaaattgcctttttcagagtttatttctcatgtgcactgctgaagatgaatatccctaatccttcataaagaatcagctagagttgtcatgataaagtcagcacacacaaaaaggcttcttacacatacctgtcttaaaccatgtgtagagctttaaaaacagaaaaaaaaccccatatacttatgaccatcttaaatcaagaaaattgcatatttccattctggtctttctgggccagatttttatattggttttcagtaaatgtctatctataatatttcattatagagtccagtagcttaatactgacactgacttgatacagcatgaagtttctagtgccacacacagtatttagaaaacctttaggcgtgaatgactcatgtgggatatatgtaaacataatgtttattttatctcacaaatgcatgtgaaatgtataattacatcttaggaatccaaaatggtctgcagagagtgagcggaggcaccagatcaatgttggttctttgcactggtgagattctgcctgatgaatattaaagatatcctgctttctgagaactctatcaccagatggcagttgggatatgggaggaactaaagcatcctgttttgtatctgtccagatcattatttctgtctcttgttttttcttcctggttcaggatacttttttaaggggttgagaattgaagattttccaaaagcgttcatgaatttagagcattccacccaatataataaaacctgttaagaatgtcagtctttgttcaaacatctgtttgttctatctccagtcattaaatcagtgctgctgcatgacactcttaactcctgactttttatatccagtcataaagttgactttcagcacaaaagatacttataaacaaataaaaaatttttatttttctctcttactgatgtaagctttggcactcttttgactggtgccattagacatcttgattattgtgacaactctagacctgcctgctttatctaatgtaatcatgctcaatgtctacaggttgtttaataatcagtcacacagagaactgaggaactgatgctgtttgtttgcttctatgatacagagatgtctaaaaacttcaaatggacatgttttgtagtttagcgacttccgtatacataaagggacatattaatactggttcatttgtaaattattattcatatagaccactgtagtagataaaactctatggtacacctgcttatgtgttgcctcacactgtgtgtgattttgtttcttttgttaagcagcacttatgtagactgcatttccaaatgtgttgagcactcagagtgtagtcaacagtaagttcttttaatgaatatcagttttaatttatagactgccatggccttaaaaatattctgtacaatatactgcactgtgttgcacagacactacttgcttttctccattcatatttttatgagtagaatctgggcttttaaatttctcttcttattctttgaagcatgttgcatactaccctggtgggatggatggttctgtaaatgaagggatatttaaacttgctactgttgttcaacaccattaatggtcagtgtgaaccattacaaagaatgtggcaacttgcttgtgcctaaaaggaggaattggaactagaatgtgtgactctgtggggactgcataggtttgttaattgacctatagctaaaccttaatgtgtttgtgtgtctatacattgctttccgcatttcaagacatccagacgctattaccaacattttcctgtgcattaacctctgcatgtgaaaacttttaacagttactgaactatgtaaatatgtgaatttttttatttaggtggatgcattttttgtctgtttactgctcttctcagctttattcaataaacttgcattttaagggttgtattggcaattttaacttaaaatgtgcatcatgatggaaggtgcagacttttttggaagtttccgagaggagggtctatagaccatttgtcagaaatcagatcagccctcaaagaatggggtctgtgggctagttaaaatagaaataaacttttaaaatatccacagaa

SEQ ID NO: 9070 - protein, 186 aa, Homo sapiens; identical to SEQ ID NO: 746

SEQ ID NO: 9071 - DNA, 1647 bp, Homo sapiens
gggtgccgacggcggcgccgggacgggcgtggggggtagggcgagtcatatgatccgctcggcttcctgggtctggctgctgccgcccgccggtgtccgcccgtgtcgcgccggggcaccaaggagccgttggagggtccgggcggaggcccgctcgtgtggaagtcgtcgacgccgccgctcgtccgtcctcccgtccgttctcgctcccggccgccatcatgctggcgctcatctcccgcctgctggactggttccgttcgctcttctggaaggaagagatggagctgacgctcgtggggctgcagtactcgggcaagaccaccttcgtcaatgtcatcgcgtcaggtcaattcagtgaagatatgatacccacagtgggcttcaacatgaggaaggtaactaaaggtaacgtcacaataaagatctgggacataggaggacaaccccgatttcgaagcatgtgggagcggtattgcagaggagtcaatgctattgtttacatgatagatgctgcagatcgtgaaaagatagaagcttcccgaaatgagctacataatcttctagataaaccacagttacaaggaattccagtgctagtgcttggaaacaagagagatcttcctaatgccttggatgagaaacagctaattgaaaaaatgaatctgtctgctattcaggatagagaaatttgctgctattcaatttcttgcaaagaaaaggataatatagatatcacacttcagtggcttattcagcattcaaaatctagaagaagctgaagcatctcctgaagtcttccagtccttcttggctataatcctagaattattgtccgttcctctgaagtaattcccagaatacggtccttcctaaaccccagaaattgcctttttcagagtttatttctcatgtgcactgctgaagatgaatatccctaatccttcataaagaatcagctagagttgtcatgataaagtcagcacacacaaaaaggcttcttacacatacctgtcttaaaccatgtgtagagctttaaaaacagaaaaaaaaccccatatacttatgaccatcttaaatcaagaaaattgcatatttccattctggtctttctgggccagatttttatattggttttcagtaaatgtctatctataatatttcattatagagtccagtagcttaatactgacactgacttgatacagcatgaagtttctagtgccacacacagtatttagaaaacctttaggcgtgaatgactcatgtgggatatatgtaaacataatgtttattttatctcacaaatgcatgtgaaatgtataattacatcttaggaatccaaaatggtctgcagagagtgagcggaggcaccagatcaatgttggttctttgcactggtgagattctgcctgatgaatattaaagatatcctgctttctgagaactctatcaccagatggcagttgggatatgggaggaactaaagcatcctgttttgtatctgtccagatcattatttctgtctcttgttttttcttcctggttcaggatacttttttaaggggttgagaattgaagattttccaaaagcgttcatgaatttagagcattccacccaatataataaaacctgttaagaatgtc

SEQ ID NO: 9072 - protein, 186 aa, Homo sapiens; identical to SEQ ID NO: 746

SEQ ID NO: 9073 - DNA, 2817 bp, Homo sapiens
gggtgccgacggcggcgccgggacgggcgtggggggtagggcgagtcatatgatccgctcggcttcctgggtctggctgctgccgcccgccggtgtccgcccgtgtcgcgccggggcaccaaggagccgttggagggtccgggcggaggcccgctcgtgtggaagtcgtcgacgccgccgctcgtccgtcctcccgtccgttctcgctcccggccgccatcatgctggcgctcatctcccgcctgctggactggttccgttcgctcttctggaaggaagagatggagctgacgctcgtggggctgcagtactcgggcaagaccaccttcgtcaatgtcatcgcgtcaggtcaattcagtgaagatatgatacccacagtgggcttcaacatgaggaaggtaactaaaggtaacgtcacaataaagatctgggacataggaggacaaccccgatttcgaagcatgtgggagcggtattgcagaggagtcaatgctattgtttacatgatagatgctgcagatcgtgaaaagatagaagcttcccgaaatgagctacataatcttctagataaaccacagttacaaggaattccagtgctagtgcttggaaacaagagagatcttcctaatgccttggatgagaaacagctaattgaaaaaatgaatctgtctgctattcaggatagagaaatttgctgctattcaatttcttgcaaagaaaaggataatatagatatcacacttcagtggcttattcagcattcaaaatctagaagaagctgaagcatctcctgaagtcttccagtccttcttggctataatcctagaattattgtccgttcctctgaagtaattcccagaatacggtccttcctaaaccccagaaattgcctttttcagagtttatttctcatgtgcactgctgaagatgaatatccctaatccttcataaagaatcagctagagttgtcatgataaagtcagcacacacaaaaaggcttcttacacatacctgtcttaaaccatgtgtagagctttaaaaacagaaaaaaaaccccatatacttatgaccatcttaaatcaagaaaattgcatatttccattctggtctttctgggccagatttttatattggttttcagtaaatgtctatctataatatttcattatagagtccagtagcttaatactgacactgacttgatacagcatgaagtttctagtgccacacacagtatttagaaaacctttaggcgtgaatgactcatgtgggatatatgtaaacataatgtttattttatctcacaaatgcatgtgaaatgtataattacatcttaggaatccaaaatggtctgcagagagtgagcggaggcaccagatcaatgttggttctttgcactggtgagattctgcctgatgaatattaaagatatcctgctttctgagaactctatcaccagatggcagttgggatatgggaggaactaaagcatcctgttttgtatctgtccagatcattatttctgtctcttgttttttcttcctggttcaggatacttttttaaggggttgagaattgaagattttccaaaagcgttcatgaatttagagcattccacccaatataataaaacctgttaagaatgtcagtctttgttcaaacatctgtttgttctatctccagtcattaaatcagtgctgctgcatgacactcttaactcctgactttttatatccagtcataaagttgactttcagcacaaaagatacttataaacaaataaaaaatttttatttttctctcttactgatgtaagctttggcactcttttgactggtgccattagacatcttgattattgtgacaactctagacctgcctgctttatctaatgtaatcatgctcaatgtctacaggttgtttaataatcagtcacacagagaactgaggaactgatgctgtttgtttgcttctatgatacagagatgtctaaaaacttcaaatggacatgttttgtagtttagcgacttccgtatacataaagggacatattaatactggttcatttgtaaattattattcatatagaccactgtagtagataaaactctatggtacacctgcttatgtgttgcctcacactgtgtgtgattttgtttcttttgttaagcagcacttatgtagactgcatttccaaatgtgttgagcactcagagtgtagtcaacagtaagttcttttaatgaatatcagttttaatttatagactgccatggccttaaaaatattctgtacaatatactgcactgtgttgcacagacactacttgcttttctccattcatatttttatgagtagaatctgggcttttaaatttctcttcttattctttgaagcatgttgcatactaccctggtgggatggatggttctgtaaatgaagggatatttaaacttgctactgttgttcaacaccattaatggtcagtgtgaaccattacaaagaatgtggcaacttgcttgtgcctaaaaggaggaattggaactagaatgtgtgactctgtggggactgcataggtttgttaattgacctatagctaaaccttaatgtgtttgtgtgtctatacattgctttccgcatttcaagacatccagacgctattaccaacattttcctgtgcattaacctctgcatgtgaaaacttttaacagttactgaactatgtaaatatgtgaatttttttatttaggtggatgcattttttgtctgtttactgctcttctcagctttattcaataaacttgcattttaagggttgt

SEQ ID NO: 9074 - protein, 186 aa, Homo sapiens; identical to SEQ ID NO: 746

SEQ ID NO: 9075 - DNA, 698 bp, Homo sapiens
atatgatccgctcggcttcctgggtctggctgctgccgcccgccggtgtccgcccgtgtcgcgccggggcaccaaggagccgttggagggtccgggcggaggcccgctcgtgtggaagtcgtcgacgccgccgctcgtccgtcctcccgtccgttctcgctcccggccgccatcatgctggcgctcatctcccgcctgctggactggttccgttcgctcttctggaaggaagagatggagctgacgctcgtggggctgcagtactcgggcaagaccaccttcgtcaatgtcatcgcgtcaggtcaattcagtgaagatatgatacccacagtgggcttcaacatgaggaaggtaactaaaggtaacgtcacaataaaggtaagttatttcttgccgtacgcaatttaaattgttagcacagacccctagaaatttttctgttaaatttctgtgtttttactgaaaatttgcagtttttcagtaatgaatgtgcatgtttcaaaagaataggtttttttgttgttgtttttttgttttttttttggaaacagagttttgctctttcacccaggctggagtgcagtgtcgcgatctccactcactgcaacctctacctcccggttcaagtgattctcctgcctcagcctccaaaatagctaagatgacaggcttgtgccaccacacccagctaatttttt

SEQ ID NO: 9076 - protein, 103 aa, Homo sapiens
MIRSASWVWLLPPAGVRPCRAGAPRSRWRVRAEARSCGSRRRRRSSVLPSVLAPGRHHAGAHLPPAGLVPFALLEGRDGADARGAAVLGQDHLRQCHRVRSIQ

SEQ ID NO: 9077 - DNA, 1448 bp, Homo sapiens
ggcttcctgggtctggctgctgccgcccgccggtgtccgcccgtgtcgcgccggggcaccaaggagccgttggagggtccgggcggaggcccgctcgtgtggaagtcgtcgacgccgccgctcgtccgtcctcccgtccgttctcgctcccggccgccatcatgctggcgctcatctcccgcctgctggactggttccgttcgctcttctggaaggaagagatggagctgacgctcgtggggctgcagtactcgggcaagaccaccttcgtcaatgtcatcgcgtcaggtcaattcagtgaagatatgatacccacagtgggcttcaacatgaggaaggtaactaaaggtaacgtcacaataaagatctgggacataggaggacaaccccgatttcgaagcatgtgggagcggtattgcagaggagtcaatgctattgtttacatgatagatgctgcagatcgtgaaaagatagaagcttcccgaaatgagctacataatcttctagataaaccacagttacaaggaattccaatatcacacttcagtggcttattcagcattcaaaatctagaagaagctgaagcatctcctgaagtcttccagtccttcttggctataatcctagaattattgtccgttcctctgaagtaattcccagaatacggtccttcctaaaccccagaaattgcctttttcagagtttatttctcatgtgcactgctgaagatgaatatccctaatccttcataaagaatcagctagagttgtcatgataaagtcagcacacacaaaaaggcttcttacacatacctgtcttaaaccatgtgtagagctttaaaaacagaaaaaaaaccccatatacttatgaccatcttaaatcaagaaaattgcatatttccattctggtctttctgggccagatttttatattggttttcagtaaatgtctatctataatatttcattatagagtccagtagcttaatactgacactgacttgatacagcatgaagtttctagtgccacacacagtatttagaaaacctttaggcgtgaatgactcatgtgggatatatgtaaacataatgtttattttatctcacaaatgcatgtgaaatgtataattacatcttaggaatccaaaatggtctgcagagagtgagcggaggcaccagatcaatgttggttctttgcactggtgagattctgcctgatgaatattaaagatatcctgctttctgagaactctatcaccagatggcagttgggatatgggaggaactaaagcatcctgttttgtatctgtccagatcattatttctgtctcttgttttttcttcctggttcaggatacttttttaaggggttgagaattgaagattttccaaaagcgttcatgaatttagagcattccacccaatataataaaacctgttaagaatgtc

SEQ ID NO: 9078 - protein, 163 aa, Homo sapiens
MLALISRLLDWFRSLFWKEEMELTLVGLQYSGKTTFVNVIASGQFSEDMIPTVGFNMRKVTKGNVTIKIWDIGGQPRFRSMWERYCRGVNAIVYMIDAADREKIEASRNELHNLLDKPQLQGIPISHFSGLFSIQNLEEAEASPEVFQSFLAIILELLSVPLK

SEQ ID NO: 9079 - DNA, 2618 bp, Homo sapiens
ggcttcctgggtctggctgctgccgcccgccggtgtccgcccgtgtcgcgccggggcaccaaggagccgttggagggtccgggcggaggcccgctcgtgtggaagtcgtcgacgccgccgctcgtccgtcctcccgtccgttctcgctcccggccgccatcatgctggcgctcatctcccgcctgctggactggttccgttcgctcttctggaaggaagagatggagctgacgctcgtggggctgcagtactcgggcaagaccaccttcgtcaatgtcatcgcgtcaggtcaattcagtgaagatatgatacccacagtgggcttcaacatgaggaaggtaactaaaggtaacgtcacaataaagatctgggacataggaggacaaccccgatttcgaagcatgtgggagcggtattgcagaggagtcaatgctattgtttacatgatagatgctgcagatcgtgaaaagatagaagcttcccgaaatgagctacataatcttctagataaaccacagttacaaggaattccaatatcacacttcagtggcttattcagcattcaaaatctagaagaagctgaagcatctcctgaagtcttccagtccttcttggctataatcctagaattattgtccgttcctctgaagtaattcccagaatacggtccttcctaaaccccagaaattgcctttttcagagtttatttctcatgtgcactgctgaagatgaatatccctaatccttcataaagaatcagctagagttgtcatgataaagtcagcacacacaaaaaggcttcttacacatacctgtcttaaaccatgtgtagagctttaaaaacagaaaaaaaaccccatatacttatgaccatcttaaatcaagaaaattgcatatttccattctggtctttctgggccagatttttatattggttttcagtaaatgtctatctataatatttcattatagagtccagtagcttaatactgacactgacttgatacagcatgaagtttctagtgccacacacagtatttagaaaacctttaggcgtgaatgactcatgtgggatatatgtaaacataatgtttattttatctcacaaatgcatgtgaaatgtataattacatcttaggaatccaaaatggtctgcagagagtgagcggaggcaccagatcaatgttggttctttgcactggtgagattctgcctgatgaatattaaagatatcctgctttctgagaactctatcaccagatggcagttgggatatgggaggaactaaagcatcctgttttgtatctgtccagatcattatttctgtctcttgttttttcttcctggttcaggatacttttttaaggggttgagaattgaagattttccaaaagcgttcatgaatttagagcattccacccaatataataaaacctgttaagaatgtcagtctttgttcaaacatctgtttgttctatctccagtcattaaatcagtgctgctgcatgacactcttaactcctgactttttatatccagtcataaagttgactttcagcacaaaagatacttataaacaaataaaaaatttttatttttctctcttactgatgtaagctttggcactcttttgactggtgccattagacatcttgattattgtgacaactctagacctgcctgctttatctaatgtaatcatgctcaatgtctacaggttgtttaataatcagtcacacagagaactgaggaactgatgctgtttgtttgcttctatgatacagagatgtctaaaaacttcaaatggacatgttttgtagtttagcgacttccgtatacataaagggacatattaatactggttcatttgtaaattattattcatatagaccactgtagtagataaaactctatggtacacctgcttatgtgttgcctcacactgtgtgtgattttgtttcttttgttaagcagcacttatgtagactgcatttccaaatgtgttgagcactcagagtgtagtcaacagtaagttcttttaatgaatatcagttttaatttatagactgccatggccttaaaaatattctgtacaatatactgcactgtgttgcacagacactacttgcttttctccattcatatttttatgagtagaatctgggcttttaaatttctcttcttattctttgaagcatgttgcatactaccctggtgggatggatggttctgtaaatgaagggatatttaaacttgctactgttgttcaacaccattaatggtcagtgtgaaccattacaaagaatgtggcaacttgcttgtgcctaaaaggaggaattggaactagaatgtgtgactctgtggggactgcataggtttgttaattgacctatagctaaaccttaatgtgtttgtgtgtctatacattgctttccgcatttcaagacatccagacgctattaccaacattttcctgtgcattaacctctgcatgtgaaaacttttaacagttactgaactatgtaaatatgtgaatttttttatttaggtggatgcattttttgtctgtttactgctcttctcagctttattcaataaacttgcattttaagggttgt

SEQ ID NO: 9080 - protein, 163 aa, Homo sapiens; identical to SEQ ID NO: 9078

SEQ ID NO: 9081 - DNA, 2786 bp, Homo sapiens
ggcttcctgggtctggctgctgccgcccgccggtgtccgcccgtgtcgcgccggggcaccaaggagccgttggagggtccgggcggaggcccgctcgtgtggaagtcgtcgacgccgccgctcgtccgtcctcccgtccgttctcgctcccggccgccatcatgctggcgctcatctcccgcctgctggactggttccgttcgctcttctggaaggaagagatggagctgacgctcgtggggctgcagtactcgggcaagaccaccttcgtcaatgtcatcgcgtcaggtcaattcagtgaagatatgatacccacagtgggcttcaacatgaggaaggtaactaaaggtaacgtcacaataaagatctgggacataggaggacaaccccgatttcgaagcatgtgggagcggtattgcagaggagtcaatgctattgtttacatgatagatgctgcagatcgtgaaaagatagaagcttcccgaaatgagctacataatcttctagataaaccacagttacaaggaattccaatatcacacttcagtggcttattcagcattcaaaatctagaagaagctgaagcatctcctgaagtcttccagtccttcttggctataatcctagaattattgtccgttcctctgaagtaattcccagaatacggtccttcctaaaccccagaaattgcctttttcagagtttatttctcatgtgcactgctgaagatgaatatccctaatccttcataaagaatcagctagagttgtcatgataaagtcagcacacacaaaaaggcttcttacacatacctgtcttaaaccatgtgtagagctttaaaaacagaaaaaaaaccccatatacttatgaccatcttaaatcaagaaaattgcatatttccattctggtctttctgggccagatttttatattggttttcagtaaatgtctatctataatatttcattatagagtccagtagcttaatactgacactgacttgatacagcatgaagtttctagtgccacacacagtatttagaaaacctttaggcgtgaatgactcatgtgggatatatgtaaacataatgtttattttatctcacaaatgcatgtgaaatgtataattacatcttaggaatccaaaatggtctgcagagagtgagcggaggcaccagatcaatgttggttctttgcactggtgagattctgcctgatgaatattaaagatatcctgctttctgagaactctatcaccagatggcagttgggatatgggaggaactaaagcatcctgttttgtatctgtccagatcattatttctgtctcttgttttttcttcctggttcaggatacttttttaaggggttgagaattgaagattttccaaaagcgttcatgaatttagagcattccacccaatataataaaacctgttaagaatgtcagtctttgttcaaacatctgtttgttctatctccagtcattaaatcagtgctgctgcatgacactcttaactcctgactttttatatccagtcataaagttgactttcagcacaaaagatacttataaacaaataaaaaatttttatttttctctcttactgatgtaagctttggcactcttttgactggtgccattagacatcttgattattgtgacaactctagacctgcctgctttatctaatgtaatcatgctcaatgtctacaggttgtttaataatcagtcacacagagaactgaggaactgatgctgtttgtttgcttctatgatacagagatgtctaaaaacttcaaatggacatgttttgtagtttagcgacttccgtatacataaagggacatattaatactggttcatttgtaaattattattcatatagaccactgtagtagataaaactctatggtacacctgcttatgtgttgcctcacactgtgtgtgattttgtttcttttgttaagcagcacttatgtagactgcatttccaaatgtgttgagcactcagagtgtagtcaacagtaagttcttttaatgaatatcagttttaatttatagactgccatggccttaaaaatattctgtacaatatactgcactgtgttgcacagacactacttgcttttctccattcatatttttatgagtagaatctgggcttttaaatttctcttcttattctttgaagcatgttgcatactaccctggtgggatggatggttctgtaaatgaagggatatttaaacttgctactgttgttcaacaccattaatggtcagtgtgaaccattacaaagaatgtggcaacttgcttgtgcctaaaaggaggaattggaactagaatgtgtgactctgtggggactgcataggtttgttaattgacctatagctaaaccttaatgtgtttgtgtgtctatacattgctttccgcatttcaagacatccagacgctattaccaacattttcctgtgcattaacctctgcatgtgaaaacttttaacagttactgaactatgtaaatatgtgaatttttttatttaggtggatgcattttttgtctgtttactgctcttctcagctttattcaataaacttgcattttaagggttgtattggcaattttaacttaaaatgtgcatcatgatggaaggtgcagacttttttggaagtttccgagaggagggtctatagaccatttgtcagaaatcagatcagccctcaaagaatggggtctgtgggctagttaaaatagaaataaacttttaaaatatccacagaa

SEQ ID NO: 9082 - protein, 163 aa, Homo sapiens; identical to SEQ ID NO: 9078

SEQ ID NO: 9083 - DNA, 1374 bp, Homo sapiens
tgccgcccgccggtgtccgcccgtgtcgcgccggggcaccaaggagccgttggagggtccgggcggaggcccgctcgtgtggaagtcgtcgacgccgccgctcgtccgtcctcccgtccgttctcgctcccggccgccatcatgctggcgctcatctcccgcctgctggactggttccgttcgctcttctggaaggaagagatggagctgacgctcgtggggctgcagtactcgggcaagaccaccttcgtcaatgtcatcgcgtcaggtcaattcagtgaagatatgatacccacagtgggcttcaacatgaggaaggtaactaaaggtaacgtcacaataaagatcttcctaatgccttggatgagaaacagctaattgaaaaaatgaatctgtctgctattcaggatagagaaatttgctgctattcaatttcttgcaaagaaaaggataatatagatatcacacttcagtggcttattcagcattcaaaatctagaagaagctgaagcatctcctgaagtcttccagtccttcttggctataatcctagaattattgtccgttcctctgaagtaattcccagaatacggtccttcctaaaccccagaaattgcctttttcagagtttatttctcatgtgcactgctgaagatgaatatccctaatccttcataaagaatcagctagagttgtcatgataaagtcagcacacacaaaaaggcttcttacacatacctgtcttaaaccatgtgtagagctttaaaaacagaaaaaaaaccccatatacttatgaccatcttaaatcaagaaaattgcatatttccattctggtctttctgggccagatttttatattggttttcagtaaatgtctatctataatatttcattatagagtccagtagcttaatactgacactgacttgatacagcatgaagtttctagtgccacacacagtatttagaaaacctttaggcgtgaatgactcatgtgggatatatgtaaacataatgtttattttatctcacaaatgcatgtgaaatgtataattacatcttaggaatccaaaatggtctgcagagagtgagcggaggcaccagatcaatgttggttctttgcactggtgagattctgcctgatgaatattaaagatatcctgctttctgagaactctatcaccagatggcagttgggatatgggaggaactaaagcatcctgttttgtatctgtccagatcattatttctgtctcttgttttttcttcctggttcaggatacttttttaaggggttgagaattgaagattttccaaaagcgttcatgaatttagagcattccacccaatataataaaacctgttaagaatgtc

SEQ ID NO: 9084 - protein, 78 aa, Homo sapiens
MLALISRLLDWFRSLFWKEEMELTLVGLQYSGKTTFVNVIASGQFSEDMIPTVGFNMRKVTKGNVTIKIFLMPWMRNS

SEQ ID NO: 9085 - DNA, 2544 bp, Homo sapiens
tgccgcccgccggtgtccgcccgtgtcgcgccggggcaccaaggagccgttggagggtccgggcggaggcccgctcgtgtggaagtcgtcgacgccgccgctcgtccgtcctcccgtccgttctcgctcccggccgccatcatgctggcgctcatctcccgcctgctggactggttccgttcgctcttctggaaggaagagatggagctgacgctcgtggggctgcagtactcgggcaagaccaccttcgtcaatgtcatcgcgtcaggtcaattcagtgaagatatgatacccacagtgggcttcaacatgaggaaggtaactaaaggtaacgtcacaataaagatcttcctaatgccttggatgagaaacagctaattgaaaaaatgaatctgtctgctattcaggatagagaaatttgctgctattcaatttcttgcaaagaaaaggataatatagatatcacacttcagtggcttattcagcattcaaaatctagaagaagctgaagcatctcctgaagtcttccagtccttcttggctataatcctagaattattgtccgttcctctgaagtaattcccagaatacggtccttcctaaaccccagaaattgcctttttcagagtttatttctcatgtgcactgctgaagatgaatatccctaatccttcataaagaatcagctagagttgtcatgataaagtcagcacacacaaaaaggcttcttacacatacctgtcttaaaccatgtgtagagctttaaaaacagaaaaaaaaccccatatacttatgaccatcttaaatcaagaaaattgcatatttccattctggtctttctgggccagatttttatattggttttcagtaaatgtctatctataatatttcattatagagtccagtagcttaatactgacactgacttgatacagcatgaagtttctagtgccacacacagtatttagaaaacctttaggcgtgaatgactcatgtgggatatatgtaaacataatgtttattttatctcacaaatgcatgtgaaatgtataattacatcttaggaatccaaaatggtctgcagagagtgagcggaggcaccagatcaatgttggttctttgcactggtgagattctgcctgatgaatattaaagatatcctgctttctgagaactctatcaccagatggcagttgggatatgggaggaactaaagcatcctgttttgtatctgtccagatcattatttctgtctcttgttttttcttcctggttcaggatacttttttaaggggttgagaattgaagattttccaaaagcgttcatgaatttagagcattccacccaatataataaaacctgttaagaatgtcagtctttgttcaaacatctgtttgttctatctccagtcattaaatcagtgctgctgcatgacactcttaactcctgactttttatatccagtcataaagttgactttcagcacaaaagatacttataaacaaataaaaaatttttatttttctctcttactgatgtaagctttggcactcttttgactggtgccattagacatcttgattattgtgacaactctagacctgcctgctttatctaatgtaatcatgctcaatgtctacaggttgtttaataatcagtcacacagagaactgaggaactgatgctgtttgtttgcttctatgatacagagatgtctaaaaacttcaaatggacatgttttgtagtttagcgacttccgtatacataaagggacatattaatactggttcatttgtaaattattattcatatagaccactgtagtagataaaactctatggtacacctgcttatgtgttgcctcacactgtgtgtgattttgtttcttttgttaagcagcacttatgtagactgcatttccaaatgtgttgagcactcagagtgtagtcaacagtaagttcttttaatgaatatcagttttaatttatagactgccatggccttaaaaatattctgtacaatatactgcactgtgttgcacagacactacttgcttttctccattcatatttttatgagtagaatctgggcttttaaatttctcttcttattctttgaagcatgttgcatactaccctggtgggatggatggttctgtaaatgaagggatatttaaacttgctactgttgttcaacaccattaatggtcagtgtgaaccattacaaagaatgtggcaacttgcttgtgcctaaaaggaggaattggaactagaatgtgtgactctgtggggactgcataggtttgttaattgacctatagctaaaccttaatgtgtttgtgtgtctatacattgctttccgcatttcaagacatccagacgctattaccaacattttcctgtgcattaacctctgcatgtgaaaacttttaacagttactgaactatgtaaatatgtgaatttttttatttaggtggatgcattttttgtctgtttactgctcttctcagctttattcaataaacttgcattttaagggttgt

SEQ ID NO: 9086 - protein, 78 aa, Homo sapiens; identical to SEQ ID NO: 9084

SEQ ID NO: 9087 - DNA, 2712 bp, Homo sapiens
tgccgcccgccggtgtccgcccgtgtcgcgccggggcaccaaggagccgttggagggtccgggcggaggcccgctcgtgtggaagtcgtcgacgccgccgctcgtccgtcctcccgtccgttctcgctcccggccgccatcatgctggcgctcatctcccgcctgctggactggttccgttcgctcttctggaaggaagagatggagctgacgctcgtggggctgcagtactcgggcaagaccaccttcgtcaatgtcatcgcgtcaggtcaattcagtgaagatatgatacccacagtgggcttcaacatgaggaaggtaactaaaggtaacgtcacaataaagatcttcctaatgccttggatgagaaacagctaattgaaaaaatgaatctgtctgctattcaggatagagaaatttgctgctattcaatttcttgcaaagaaaaggataatatagatatcacacttcagtggcttattcagcattcaaaatctagaagaagctgaagcatctcctgaagtcttccagtccttcttggctataatcctagaattattgtccgttcctctgaagtaattcccagaatacggtccttcctaaaccccagaaattgcctttttcagagtttatttctcatgtgcactgctgaagatgaatatccctaatccttcataaagaatcagctagagttgtcatgataaagtcagcacacacaaaaaggcttcttacacatacctgtcttaaaccatgtgtagagctttaaaaacagaaaaaaaaccccatatacttatgaccatcttaaatcaagaaaattgcatatttccattctggtctttctgggccagatttttatattggttttcagtaaatgtctatctataatatttcattatagagtccagtagcttaatactgacactgacttgatacagcatgaagtttctagtgccacacacagtatttagaaaacctttaggcgtgaatgactcatgtgggatatatgtaaacataatgtttattttatctcacaaatgcatgtgaaatgtataattacatcttaggaatccaaaatggtctgcagagagtgagcggaggcaccagatcaatgttggttctttgcactggtgagattctgcctgatgaatattaaagatatcctgctttctgagaactctatcaccagatggcagttgggatatgggaggaactaaagcatcctgttttgtatctgtccagatcattatttctgtctcttgttttttcttcctggttcaggatacttttttaaggggttgagaattgaagattttccaaaagcgttcatgaatttagagcattccacccaatataataaaacctgttaagaatgtcagtctttgttcaaacatctgtttgttctatctccagtcattaaatcagtgctgctgcatgacactcttaactcctgactttttatatccagtcataaagttgactttcagcacaaaagatacttataaacaaataaaaaatttttatttttctctcttactgatgtaagctttggcactcttttgactggtgccattagacatcttgattattgtgacaactctagacctgcctgctttatctaatgtaatcatgctcaatgtctacaggttgtttaataatcagtcacacagagaactgaggaactgatgctgtttgtttgcttctatgatacagagatgtctaaaaacttcaaatggacatgttttgtagtttagcgacttccgtatacataaagggacatattaatactggttcatttgtaaattattattcatatagaccactgtagtagataaaactctatggtacacctgcttatgtgttgcctcacactgtgtgtgattttgtttcttttgttaagcagcacttatgtagactgcatttccaaatgtgttgagcactcagagtgtagtcaacagtaagttcttttaatgaatatcagttttaatttatagactgccatggccttaaaaatattctgtacaatatactgcactgtgttgcacagacactacttgcttttctccattcatatttttatgagtagaatctgggcttttaaatttctcttcttattctttgaagcatgttgcatactaccctggtgggatggatggttctgtaaatgaagggatatttaaacttgctactgttgttcaacaccattaatggtcagtgtgaaccattacaaagaatgtggcaacttgcttgtgcctaaaaggaggaattggaactagaatgtgtgactctgtggggactgcataggtttgttaattgacctatagctaaaccttaatgtgtttgtgtgtctatacattgctttccgcatttcaagacatccagacgctattaccaacattttcctgtgcattaacctctgcatgtgaaaacttttaacagttactgaactatgtaaatatgtgaatttttttatttaggtggatgcattttttgtctgtttactgctcttctcagctttattcaataaacttgcattttaagggttgtattggcaattttaacttaaaatgtgcatcatgatggaaggtgcagacttttttggaagtttccgagaggagggtctatagaccatttgtcagaaatcagatcagccctcaaagaatggggtctgtgggctagttaaaatagaaataaacttttaaaatatccacagaa

SEQ ID NO: 9088 - protein, 78 aa, Homo sapiens; identical to SEQ ID NO: 9084

SEQ ID NO: 9089 - DNA, 682 bp, Homo sapiens
ggccttgggtggatcgggtctctgggcagagcgtgtgtccggcagagctaggaccggaaaaagccactctaggtctaggttaggagtgatgacagttaaaagatatataaggaaaagaaggaaaggatcgtttctgtataaaacgagctatttttgcatatcgagcgcataagttttataacttaggtgtctgtttatggagagggtgggatactaccttttagctcaaggagtgcacaaaacggtatcatgaattctgctcttttgattcaaacacccaactttgaagaatcgctcatggtgcttgtaaaacacgtatccccagatccctccctagacctatcgaacaactccaacggtctcgggaatgtgcgtggtttctgaaaagcttgggaagcaagacctgactagacccccaaatctgatattggctgaatggccgaccaatggagtgcataagaagtctggatacaaaggcagcccaatttctagaaatgtataccagccatgaagagataaagctccaagaggagatttctctttctggtataaggatttaaacaaaacctagaatgtcgcagtactcgaagtatccaaaacaactgaaaaatgaagaagaataaaagaagaatccaaaagtatccaaaataactgaacatatgaagaatcatggctgggcaca

SEQ ID NO: 9090 - protein, 47 aa, Homo sapiens
MCVVSEKLGKQDLTRPPNLILAEWPTNGVHKKSGYKGSPISRNVYQP

SEQ ID NO: 9091 - DNA, 1077 bp, Homo sapiens
atagtaataaaactaatgagtaaaattgaacaaagtgataagtatgacagctgttctaagcacagacttatccttttaattcttctcataggaatctgtctgctattcaggatagagaaatttgctgctattcaatttcttgcaaagaaaaggataatatagatatcacacttcagtggcttattcagcattcaaaatctagaagaagctgaagcatctcctgaagtcttccagtccttcttggctataatcctagaattattgtccgttcctctgaagtaattcccagaatacggtccttcctaaaccccagaaattgcctttttcagagtttatttctcatgtgcactgctgaagatgaatatccctaatccttcataaagaatcagctagagttgtcatgataaagtcagcacacacaaaaaggcttcttacacatacctgtcttaaaccatgtgtagagctttaaaaacagaaaaaaaaccccatatacttatgaccatcttaaatcaagaaaattgcatatttccattctggtctttctgggccagatttttatattggttttcagtaaatgtctatctataatatttcattatagagtccagtagcttaatactgacactgacttgatacagcatgaagtttctagtgccacacacagtatttagaaaacctttaggcgtgaatgactcatgtgggatatatgtaaacataatgtttattttatctcacaaatgcatgtgaaatgtataattacatcttaggaatccaaaatggtctgcagagagtgagcggaggcaccagatcaatgttggttctttgcactggtgagattctgcctgatgaatattaaagatatcctgctttctgagaactctatcaccagatggcagttgggatatgggaggaactaaagcatcctgttttgtatctgtccagatcattatttctgtctcttgttttttcttcctggttcaggatacttttttaaggggttgagaattgaagattttccaaaagcgttcatgaatttagagcattccacccaatataataaaacctgttaagaatgtc

SEQ ID NO: 9092 - protein, 48 aa, Homo sapiens [sequence omitted]

SEQ ID NO: 9093 - DNA, 2247 bp, Homo sapiens
atagtaataaaactaatgagtaaaattgaacaaagtgataagtatgacagctgttctaagcacagacttatccttttaattcttctcataggaatctgtctgctattcaggatagagaaatttgctgctattcaatttcttgcaaagaaaaggataatatagatatcacacttcagtggcttattcagcattcaaaatctagaagaagctgaagcatctcctgaagtcttccagtccttcttggctataatcctagaattattgtccgttcctctgaagtaattcccagaatacggtccttcctaaaccccagaaattgcctttttcagagtttatttctcatgtgcactgctgaagatgaatatccctaatccttcataaagaatcagctagagttgtcatgataaagtcagcacacacaaaaaggcttcttacacatacctgtcttaaaccatgtgtagagctttaaaaacagaaaaaaaaccccatatacttatgaccatcttaaatcaagaaaattgcatatttccattctggtctttctgggccagatttttatattggttttcagtaaatgtctatctataatatttcattatagagtccagtagcttaatactgacactgacttgatacagcatgaagtttctagtgccacacacagtatttagaaaacctttaggcgtgaatgactcatgtgggatatatgtaaacataatgtttattttatctcacaaatgcatgtgaaatgtataattacatcttaggaatccaaaatggtctgcagagagtgagcggaggcaccagatcaatgttggttctttgcactggtgagattctgcctgatgaatattaaagatatcctgctttctgagaactctatcaccagatggcagttgggatatgggaggaactaaagcatcctgttttgtatctgtccagatcattatttctgtctcttgttttttcttcctggttcaggatacttttttaaggggttgagaattgaagattttccaaaagcgttcatgaatttagagcattccacccaatataataaaacctgttaagaatgtcagtctttgttcaaacatctgtttgttctatctccagtcattaaatcagtgctgctgcatgacactcttaactcctgactttttatatccagtcataaagttgactttcagcacaaaagatacttataaacaaataaaaaatttttatttttctctcttactgatgtaagctttggcactcttttgactggtgccattagacatcttgattattgtgacaactctagacctgcctgctttatctaatgtaatcatgctcaatgtctacaggttgtttaataatcagtcacacagagaactgaggaactgatgctgtttgtttgcttctatgatacagagatgtctaaaaacttcaaatggacatgttttgtagtttagcgacttccgtatacataaagggacatattaatactggttcatttgtaaattattattcatatagaccactgtagtagataaaactctatggtacacctgcttatgtgttgcctcacactgtgtgtgattttgtttcttttgttaagcagcacttatgtagactgcatttccaaatgtgttgagcactcagagtgtagtcaacagtaagttcttttaatgaatatcagttttaatttatagactgccatggccttaaaaatattctgtacaatatactgcactgtgttgcacagacactacttgcttttctccattcatatttttatgagtagaatctgggcttttaaatttctcttcttattctttgaagcatgttgcatactaccctggtgggatggatggttctgtaaatgaagggatatttaaacttgctactgttgttcaacaccattaatggtcagtgtgaaccattacaaagaatgtggcaacttgcttgtgcctaaaaggaggaattggaactagaatgtgtgactctgtggggactgcataggtttgttaattgacctatagctaaaccttaatgtgtttgtgtgtctatacattgctttccgcatttcaagacatccagacgctattaccaacattttcctgtgcattaacctctgcatgtgaaaacttttaacagttactgaactatgtaaatatgtgaatttttttatttaggtggatgcattttttgtctgtttactgctcttctcagctttattcaataaacttgcattttaagggttgt

SEQ ID NO: 9094 - protein, 55 aa, Homo sapiens
MALKIFCTIYCTVLHRHYLLFSIHIFMSRIWAFKFLFLFFEACCILPWWDGWFCK

SEQ ID NO: 9095 - DNA, 2415 bp, Homo sapiens
atagtaataaaactaatgagtaaaattgaacaaagtgataagtatgacagctgttctaagcacagacttatccttttaattcttctcataggaatctgtctgctattcaggatagagaaatttgctgctattcaatttcttgcaaagaaaaggataatatagatatcacacttcagtggcttattcagcattcaaaatctagaagaagctgaagcatctcctgaagtcttccagtccttcttggctataatcctagaattattgtccgttcctctgaagtaattcccagaatacggtccttcctaaaccccagaaattgcctttttcagagtttatttctcatgtgcactgctgaagatgaatatccctaatccttcataaagaatcagctagagttgtcatgataaagtcagcacacacaaaaaggcttcttacacatacctgtcttaaaccatgtgtagagctttaaaaacagaaaaaaaaccccatatacttatgaccatcttaaatcaagaaaattgcatatttccattctggtctttctgggccagatttttatattggttttcagtaaatgtctatctataatatttcattatagagtccagtagcttaatactgacactgacttgatacagcatgaagtttctagtgccacacacagtatttagaaaacctttaggcgtgaatgactcatgtgggatatatgtaaacataatgtttattttatctcacaaatgcatgtgaaatgtataattacatcttaggaatccaaaatggtctgcagagagtgagcggaggcaccagatcaatgttggttctttgcactggtgagattctgcctgatgaatattaaagatatcctgctttctgagaactctatcaccagatggcagttgggatatgggaggaactaaagcatcctgttttgtatctgtccagatcattatttctgtctcttgttttttcttcctggttcaggatacttttttaaggggttgagaattgaagattttccaaaagcgttcatgaatttagagcattccacccaatataataaaacctgttaagaatgtcagtctttgttcaaacatctgtttgttctatctccagtcattaaatcagtgctgctgcatgacactcttaactcctgactttttatatccagtcataaagttgactttcagcacaaaagatacttataaacaaataaaaaatttttatttttctctcttactgatgtaagctttggcactcttttgactggtgccattagacatcttgattattgtgacaactctagacctgcctgctttatctaatgtaatcatgctcaatgtctacaggttgtttaataatcagtcacacagagaactgaggaactgatgctgtttgtttgcttctatgatacagagatgtctaaaaacttcaaatggacatgttttgtagtttagcgacttccgtatacataaagggacatattaatactggttcatttgtaaattattattcatatagaccactgtagtagataaaactctatggtacacctgcttatgtgttgcctcacactgtgtgtgattttgtttcttttgttaagcagcacttatgtagactgcatttccaaatgtgttgagcactcagagtgtagtcaacagtaagttcttttaatgaatatcagttttaatttatagactgccatggccttaaaaatattctgtacaatatactgcactgtgttgcacagacactacttgcttttctccattcatatttttatgagtagaatctgggcttttaaatttctcttcttattctttgaagcatgttgcatactaccctggtgggatggatggttctgtaaatgaagggatatttaaacttgctactgttgttcaacaccattaatggtcagtgtgaaccattacaaagaatgtggcaacttgcttgtgcctaaaaggaggaattggaactagaatgtgtgactctgtggggactgcataggtttgttaattgacctatagctaaaccttaatgtgtttgtgtgtctatacattgctttccgcatttcaagacatccagacgctattaccaacattttcctgtgcattaacctctgcatgtgaaaacttttaacagttactgaactatgtaaatatgtgaatttttttatttaggtggatgcattttttgtctgtttactgctcttctcagctttattcaataaacttgcattttaagggttgtattggcaattttaacttaaaatgtgcatcatgatggaaggtgcagacttttttggaagtttccgagaggagggtctatagaccatttgtcagaaatcagatcagccctcaaagaatggggtctgtgggctagttaaaatagaaataaacttttaaaatatccacagaa

SEQ ID NO: 9096 - protein, 55 aa, Homo sapiens; identical to SEQ ID NO: 9094

SEQ ID NO: 9097 - DNA, 1558 bp, Homo sapiens
ttcagtggcttattcagcattcaaaatctagaagaagctgaagcatctcctgaagtcttccagtccttcttggctataatcctagaattattgtccgttcctctgaagtaattcccagaatacggtccttcctaaaccccagaaattgcctttttcagagtttatttctcatgtgcactgctgaagatgaatatccctaatccttcataaagaatcagctagagttgtcatgataaagtcagcacacacaaaaaggcttcttacacatacctgtcttaaaccatgtgtagagctttaaaaacagaaaaaaaaccccatatacttatgaccatcttaaatcaagaaaattgcatatttccattctggtctttctgggccagatttttatattggttttcagtaaatgtctatctataatatttcattatagagtccagtagcttaatactgacactgacttgatacagcatgaagtttctagtgccacacacagtatttagaaaacctttaggcgtgaatgactcatgtgggatatatgtaaacataatgtttattttatctcacaaatgcatgtgaaatgtataattacatcttaggaatccaaaatggtctgcagagagtgagcggaggcaccagatcaatgttggttctttgcactggtgagattctgcctgatgaatattaaagatatcctgctttctgagaactctatcaccagatggcagttgggatatgggaggaactaaagcatcctgttttgtatctgtccagatcattatttctgtctcttgttttttcttcctggttcaggatacttttttaaggggttgagaattgaagattttccaaaagcgttcatgaatttagagcattccacccaatataataaaacctgttaagaatgtcagtctttgttcaaacatctgtttgttctatctccagtcattaaatcagtgctgctgcatgacactcttaactcctgactttttatatccagtcataaagttgactttcagcacaaaagatacttataaacaaataaaaaatttttatttttctctcttactgatgtaagctttggcactcttttgactggtgccattagacatcttgattattgtgacaactctagacctgcctgctttattaccctggtgggatggatggttctgtaaatgaagggatatttaaacttgctactgttgttcaacaccattaatggtcagtgtgaaccattacaaagaatgtggcaacttgcttgtgcctaaaaggaggaattggaactagaatgtgtgactctgtggggactgcataggtttgttaattgacctatagctaaaccttaatgtgtttgtgtgtctatacattgctttccgcatttcaagacatccagacgctattaccaacattttcctgtgcattaacctctgcatgtgaaaacttttaacagttactgaactatgtaaatatgtgaatttttttatttaggtggatgcattttttgtctgtttactgctcttctcagctttattcaataaacttgcattttaagggttgt

SEQ ID NO: 9098 - protein, 44 aa, Homo sapiens
MCRALKTEKKPHILMTILNQENCIFPFWSFWARFLYWFSVNVYL

SEQ ID NO: 9099 - DNA, 1726 bp, Homo sapiens
ttcagtggcttattcagcattcaaaatctagaagaagctgaagcatctcctgaagtcttccagtccttcttggctataatcctagaattattgtccgttcctctgaagtaattcccagaatacggtccttcctaaaccccagaaattgcctttttcagagtttatttctcatgtgcactgctgaagatgaatatccctaatccttcataaagaatcagctagagttgtcatgataaagtcagcacacacaaaaaggcttcttacacatacctgtcttaaaccatgtgtagagctttaaaaacagaaaaaaaaccccatatacttatgaccatcttaaatcaagaaaattgcatatttccattctggtctttctgggccagatttttatattggttttcagtaaatgtctatctataatatttcattatagagtccagtagcttaatactgacactgacttgatacagcatgaagtttctagtgccacacacagtatttagaaaacctttaggcgtgaatgactcatgtgggatatatgtaaacataatgtttattttatctcacaaatgcatgtgaaatgtataattacatcttaggaatccaaaatggtctgcagagagtgagcggaggcaccagatcaatgttggttctttgcactggtgagattctgcctgatgaatattaaagatatcctgctttctgagaactctatcaccagatggcagttgggatatgggaggaactaaagcatcctgttttgtatctgtccagatcattatttctgtctcttgttttttcttcctggttcaggatacttttttaaggggttgagaattgaagattttccaaaagcgttcatgaatttagagcattccacccaatataataaaacctgttaagaatgtcagtctttgttcaaacatctgtttgttctatctccagtcattaaatcagtgctgctgcatgacactcttaactcctgactttttatatccagtcataaagttgactttcagcacaaaagatacttataaacaaataaaaaatttttatttttctctcttactgatgtaagctttggcactcttttgactggtgccattagacatcttgattattgtgacaactctagacctgcctgctttattaccctggtgggatggatggttctgtaaatgaagggatatttaaacttgctactgttgttcaacaccattaatggtcagtgtgaaccattacaaagaatgtggcaacttgcttgtgcctaaaaggaggaattggaactagaatgtgtgactctgtggggactgcataggtttgttaattgacctatagctaaaccttaatgtgtttgtgtgtctatacattgctttccgcatttcaagacatccagacgctattaccaacattttcctgtgcattaacctctgcatgtgaaaacttttaacagttactgaactatgtaaatatgtgaatttttttatttaggtggatgcattttttgtctgtttactgctcttctcagctttattcaataaacttgcattttaagggttgtattggcaattttaacttaaaatgtgcatcatgatggaaggtgcagacttttttggaagtttccgagaggagggtctatagaccatttgtcagaaatcagatcagccctcaaagaatggggtctgtgggctagttaaaatagaaataaacttttaaaatatccacagaa

SEQ ID NO: 9100 - protein, 44 aa, Homo sapiens; identical to SEQ ID NO: 9098

SEQ ID NO: 9101 - DNA, 6161 bp, Homo sapiens
ggacgatgggctagttcctggtgcgtcacgggggagttccttaaaggggaagcgagccgggctacggggcgagcgcggggtgcggtggtcggcggggaggcccccgcgctttaaaataatgcccgcggcgcccgcgcgaccatgcaatggcgagcgctcgtcctggggctggtgctcctccggcttggcctccatggagtattgtggctcgtcttcgggctggggcccagcatgggcttctaccagcgctttccgctcagcttcggcttccagcgtctgaggagccccgacggccccgcgtcgcccacctcggggcccgtgggccggcctgggggggtatccgggccgtcgtggctgcagccgccggggaccggggcagcgcagagcccgcgcaaggctccgcggcgtcctgggccggggatgtgcggcccagccaactggggctacgtgctgggcggccggggccgcggcccggacgagtacgagaagcgctacagcggcgccttccctccgcagctgcgtgcccagatgcgcgacctggcacggggcatgttcgtctttggctacgacaactacatggctcacgccttcccccaggacgagctcaaccccatccactgccgcggccgtgggcccgaccgcggggacccttcaaatctgaacatcaatgatgtactagggaactactcattgactcttgttgatgcattggatacacttgcaataatgggaaattcatccgagttccagaaagccgtcaagttagtgatcaacacagtttcatttgacaaagattccaccgtccaagtctttgaggccacgataagggtcctgggaagcctcctttctgctcacagaataataactgactccaagcagccctttggtgacatgacaattaaggactatgataatgagttgttatacatggcccatgacctggcggtgcggctcctccctgcttttgaaaacaccaagacagggattccatatcctcgggtgaatctaaagacaggagttcctcctgacaccaataatgagacatgcacagcgggagccggttccctcctggtggaatttgggattctgagtcgactcctgggggactccacatttgagtgggtggccagacgagcagtgaaagccctttggaacctccggagcaatgatacaggattactaggcaatgtcgtgaacattcagacgggccactgggttggaaagcagagtggcctgggtgccgggctggactccttctatgaatacctcttgaaatcttacattctctttggagaaaaagaagacctagaaatgtttaatgctgcatatcagagtattcagaactacttaagaagagggcgggaagcctgcaatgaaggagaaggagaccctccactctatgtcaacgtgaacatgttcagtgggcagctgatgaacacctggattgactctctgcaggcctttttccctggactgcaggtgctgataggagatgtggaagatgccatctgccttcatgccttctactatgccatatggaaacgatatggtgccctccctgagagatataactggcagctgcaggcccctgacgttctcttctacccactgagaccagagttagtggaatccacatatctcctctaccaggcaaccaagaatcccttctacctccatgtaggaatggatattctgcagagtctggaaaagtacacaaaagtcaagtgtgggtacgccacgctgcatcacgtcattgacaagtccacagaagaccggatggagagcttctttctcagtgagacctgtaaatatttgtatctgctgtttgatgaagacaatccagtacacaagtctggaaccagatacatgttcacaacagagggacacattgtatctgtggatgagcatcttcgggaattgccatggaaggaattcttctctgaagagggagggcaggaccaagggggaaagtctgtgcacaggccgaaacctcatgagttaaaagtcatcaactccagctccaactgcaatcgtgtacctgatgagaggaggtactccctgcccttaaagagcatctacatgcgacagattgaccagatggttggtttgatttgatctgctctctgtgaggcctcatcttgaaccagaccttaacgaccaaacccagaccatgccaaagtccagtctgaaatgaaaggggacagaagtcttgctgtccatggtggtgtaggaatttctgtgcaacacctcaccacgtctggttaatccttgcacacttcagtgtttctctcctgttcaataaaatgccctgttaaggatataatttgaagtgagaagatacatggaaattgccctcttatgacatgttgatgttataagcacaatagatggggcatctttggattgatgttcacagctttatacttcagaacctaagtctcttcactttgctggcacctgctatactggagtattgctatgtctttaaaaaattttttttattatattttatttttttgagacagggtcttgatatttttttgggacagggttacctgggctcaagtgatccttctgcctcagcctcccgagtagctgggattacaggtgagcaccactgtacctggctagctacttctttgttagaggattgagaatgaaatttctgcaaaagggcccatggttcatttggtatccctatttaattgcattgaaaatgtcatcctttctgttgttagataattggggtcttcccctgatatccaaccgtgattttggatcacatgggagaaaaagtcatccagtttttcatgtttgcctcaagtaatctttacagtgttacaaattatttgcttaagaagaatggtcttaaccagaattcttaacagatagtctcttaggttattatgttatggtctaagaggttaactgacatcttttgggtggtattttgcattttgaatatgaacttacctgaggaactcccatagttccagaatcaggtgccttttagggagagaacaatacctaagattgtctgagcttccatctttctcatatttcctaagcaaggattctcacttctgaccatatttgggttagagttctgttttgtttctgttttctgtgtctagtgccaattagctaaatcagggagaaagaaatgatcacatgacttttagcatccttgagccatttctctgtgtaatacaggctttagattagtgccttatattggttttggtttggggcactggatgtcgcagctactgctatggtttcaggaggcctgtttagccacatggtgagaccgtggtgaaagggggatggaaattgcttggccagtctttgcctttcatcctgtaaaagtaagcatgtagaaggaggaagttgtgctaaaatgcctttgtttttttgttattattttcttagccagaacatctctctttgaactcacactgatacacacctgctactcttacacagtgcagcagggttgactcttagtctggcttccatgaagcgtcatgggtggaaacgcattctagtaaaaaaggtaggaaatccctaaaacttccagcctcacatagcacggttctcacctgtcactgttttcccacctctaaggatttcatgtacatcttttcaaagctagaaataagcactgtctaagtttatgttgcatttttagtcaaaagggagaaatcttattccttcttgaaaattttaagtgttatggttttatatagttcagttctttgagatttttgaaaagagtattttcagtaataaacgtgccatctctatctcttaaacatttattacaacaattgttttaaaatagaaaaaataaaatgcttctattttaccttttttcatttcagaagcattattctgtttattaacagtgtcccatctactgaatagaaaactttgagaataatatatatatatattttaaatgttttcactgactcattgaaaatgttaattacacacacatgcatgcatgcacacacgagcatacttgtacctttgtctctgggcaaacaggtgggactgttagtgacccatttgggaaaatagagcatctcagagaaggaggtgagttcttcctgcctgtgatttctcttggcgctcccctcctctcccgctctggcttctgtggcggcagtggtgggtaagcactccagtgttctcttaatgaggcactttgcctgtcactcgagcaagcctgggtgttccttcctcctcatgctcctggaatagggaatagggatctcatgcttgcaaactacacaatgctgcaggtgcttcccaggggccacaggctgtcaggaaacgtgttttatgttaagtcacaaacccacttgacttctgggtactggaattaataccagtgggtgagactgagggtgagtgagttagtacatattaatcctggttgttgagcttccagactaccccgtccaaagtttgatgctatgtagtcagtggtttgtggggctggatgccagaaggttctttgagccagtttcaaaggttacttgttttttttttttttttttaaagtcagaatgttaacagctgtgatatatcctgcagggcttttgcagtttcttctgttctgtgttctgaaatactgggtagagaatggctgaggaggagattaccagagaagttgctttgctcagtgctttgccccaggattgcctcaaatctgagtggacttcatcctttgcggcggctctgagcctggcccatcttcctattcccacgtgtagctagtgtctagtgtcagctttgctcagtgtggtggaaacattttgcagaactgttgtagaaagctgccttatagttggcttgacaaagcataattctctcataacaaactttcaaatcattacagtagcttagctactttagttgatgtgaccgaggaatcccttctagaatcataggtggcaagggagggtttgctagctctccatttgcactggccattgtgaaaaaccagcttctgtattcaaatctttccttcatttttttaaattttttttttggcagcgcttgtgctggaacttactcattgtaactgaatcctcagggcttttcttgttttagatcatggactgtgcacgtgacacttaaataattttctatgtatttaaagaaaaatgcaccaggatggtgtctgtgcacgtgactattagaggagcgtctgtagaagtacctggtttggtcagtgcagttgtgcaatctgagggccttgtttcctcctcccctttccccttctccccaccaaaggaaaatatccctcttaatgatttcgtagttcagtttactgaatgattaccacctgtaattcctctttggattgtgtagactcaacatgagacattcctttctgctttctggagggcaccaggggcctttctctttgataaattttttttgtctgttgacaaaaacaaaaatcttttttcaaatgtagtgctggtgaaaaggtagggctgagtgattaccttagccacagggtggctgagcaggaactttagaagaaaatcctgagctttcctgtccattcccagcatccagctcctattctagtgcctcttccctgcagggcagggaccccttgggaaatcgaggaggtgggacgggctgggccctgtgtcccaggtttcacagggctcagggttatgctcccgcttgaatctggacgtgaatctggtaaaaatatcaagtacctgtggaactccctgattctataccctcttccttctttctgcaaggcagaggaataatatttttaaaggttattttgttttagttttaaatagcaaaacacaagctgcatttttatttattttgcataagaaaggtaaatctttttacaaaaaaaagtatagagttggaaactctgggaaaacttacggaaatacacaaatgcttctctgtaatgtgcaatatgctttgcaactgtagatgatattttatgtttaatctgtaaataagaaatgtatttaaattaaaagggatctttttgtaaaaggaccaaatgttcttttataaatgtaataaggaatatcttgctctttaaaatttattaggatttttatgagtaatttttattaaaagatttctttttttgagttgtc

SEQ ID NO: 9102 - protein, 657 aa, Homo sapiens; identical to SEQ ID NO: 748

SEQ ID NO: 9103 - DNA, 2319 bp, Homo sapiens
ggctagttcctggtgcgtcacgggggagttccttaaaggggaagcgagccgggctacggggcgagcgcggggtgcggtggtcggcggggaggcccccgcgctttaaaataatgcccgcggcgcccgcgcgaccatgcaatggcgagcgctcgtcctggggctggtgctcctccggcttggcctccatggagtattgtggctcgtcttcgggctggggcccagcatgggcttctaccagcgctttccgctcagcttcggcttccagcgtctgaggagccccgacggccccgcgtcgcccacctcggggcccgtgggccggcctgggggggtatccgggccgtcgtggctgcagccgccggggaccggggcagcgcagagcccgcgcaaggctccgcggcgtcctgggccggggatgtgcggcccagccaactggggctacgtgctgggcggccggggccgcggcccggacgagtacgagaagcgctacagcggcgccttccctccgcagctgcgtgcccagatgcgcgacctggcacggggcatgttcgtctttggctacgacaactacatggctcacgccttcccccaggacgagctcaaccccatccactgccgcggccgtgggcccgaccgcggggacccttcaaatctgaacatcaatgatgtactagggaactactcattgactcttgttgatgcattggatacacttgcaataatgggaaattcatccgagttccagaaagccgtcaagttagtgatcaacacagtttcatttgacaaagattccaccgtccaagtctttgaggccacgataagggtcctgggaagcctcctttctgctcacagaataataactgactccaagcagccctttggtgacatgacaattaaggactatgataatgagttgttatacatggcccatgacctggcggtgcggctcctccctgcttttgaaaacaccaagacagggattccatatcctcgggtgaatctaaagacaggagttcctcctgacaccaataatgagacatgcacagcgggagccggttccctcctggtggaatttgggattctgagtcgactcctgggggactccacatttgagtgggtggccagacgagcagtgaaagccctttggaacctccggagcaatgatacaggattactaggcaatgtcgtgaacattcagacgggccactgggttggaaagcagagtggcctgggtgccgggctggactccttctatgaatacctcttgaaatcttacattctctttggagaaaaagaagacctagaaatgtttaatgctgcatatcagagtattcagaactacttaagaagagggcgggaagcctgcaatgaaggagaaggagaccctccactctatgtcaacgtgaacatgttcagtgggcagctgatgaacacctggattgactctctgcaggcctttttccctggactgcaggtgctgataggagatgtggaagatgccatctgccttcatgccttctactatgccatatggaaacgatatggtgccctccctgagagatataactggcagctgcaggcccctgacgttctcttctacccactgagaccagagttagtggaatccacatatctcctctaccaggcaaccaagaatcccttctacctccatgtaggaatggatattctgcagagtctggaaaagtacacaaaagtcaagtgtgggtacgccacgctgcatcacgtcattgacaagtccacagaagaccggatggagagcttctttctcagtgagacctgtaaatatttgtatctgctgtttgatgaagacaatccagtacacaagtctggaaccagatacatgttcacaacagagggacacattgtatctgtggatgagcatcttcgggaattgccatggaaggaattcttctctgaagagggagggcaggaccaagggggaaagtctgtgcacaggccgaaacctcatgagttaaaagtcatcaactccagctccaactgcaatcgtgtacctgatgagaggaggtactccctgcccttaaagagcatctacatgcgacagattgaccagatggttggtttgatttgatctgctctctgtgaggcctcatcttgaaccagaccttaacgaccaaacccagaccatgccaaagtccagtctgaaatgaaaggggacagaagtcttgctgtccatggtggtgtaggaatttctgtgcaacacctcaccacgtctggttaatccttgcacacttcagtgtttctctcctgttcaataaaatgccctgttaaggatataatttg

SEQ ID NO: 9104 - protein, 657 aa, Homo sapiens; identical to SEQ ID NO: 748

SEQ ID NO: 9105 - DNA, 766 bp, Homo sapiens
gccgggctacggggcgagcgcggggtgcggtggtcggcggggaggcccccgcgctttaaaataatgcccgcggcgcccgcgcgaccatgcaatggcgagcgctcgtcctggggctggtgctcctccggcttggcctccatggagtattgtggctcgtcttcgggctggggcccagcatgggcttctaccagcgctttccgctcagcttcggcttccagcgtctgaggagccccgacggccccgcgtcgcccacctcggggcccgtgggccggcctgggggggtatccgggccgtcgtggctgcagccgccggggaccggggcagcgcagagcccgcgcaaggctccgcggcgtcctgggccggggatgtgcggcccagccaactggggctacgtgctgggcggccggggccgcggcccggacgagtacgagaagcgctacagcggcgccttccctccgcagctgcgtgcccagatgcgcgacctggcacggggcatgttcgtctttggctacgacaactacatggctcacgccttcccccaggacgagctcaaccccatccactgccgcggccgtgggcccgaccgcggggaccctttgagagcatgatttctaccgaagcaaggggacatcccaagctaaattcaaaggactgagccttttcaaaattctaggaaaccgatgagtttttcttgcttaaccatagcgtttatacgtataagtgtattttctatctcaatttttttgagaaaaaatattaaattttg

SEQ ID NO: 9106 - protein, 187 aa, Homo sapiens
MASARPGAGAPPAWPPWSIVARLRAGAQHGLLPALSAQLRLPASEEPRRPRVAHLGARGPAWGGIRAVVAAAAGDRGSAEPAQGSAASWAGDVRPSQLGLRAGRPGPRPGRVREALQRRLPSAAACPDARPGTGHVRLWLRQLHGSRLPPGRAQPHPLPRPWARPRGPFESMISTEARGHPKLNSKD

SEQ ID NO: 9107 - DNA, 445 bp, Homo sapiens
agcatgttatagagtccaaggaatttgccaaatccgtgtgagaagatttgcctctcacatgtgagagaattttttgagaaaaaaaagatcctgaccccgtccctctgccaccacccgagtgaggaagactgacagagcacattggcttgctgtggagacaagatcagggaaagcgcccctgaaaagaaagcattttggaagtcctgaaggtggagaaggagatttagaggaagagtgataaatcagaagtcttcgtccaagaattagctttgcaccatctacagacctaagcagctgcagtcctggaactgtgtgataacttgcccagaaaatcttcttgtggaatctgtctttacatggaaaagacttggcaatatttgtacagcaactggaagaaaggtctttgctgagatatacaaagaggcagaatgtgtgtggatcaccg

SEQ ID NO: 9108 - protein, 58 aa, Homo sapiens
LCTIYRPKQLQSWNCVITCPENLLVESVFTWKRLGNICTATGRKVFAEIYKEAECVWI

SEQ ID NO: 9109 - DNA, 1334 bp, Homo sapiens
gtagcaagggacggaagctctgcctgtgcgaccgccgcccacccgagcctatctgggctgcgtcttctcgccgctgctcttcgtggcccaacgccccaatccttgcgtgtgcttgcagtcccaccccacactcagccttgtgtccctcgatccagtctccgacttccatttcccaccctaaaccgcctacccggtgtctgttccccgcccggttgtcctcgccctgctgcgctgagtgtcccctgttagcctcgaccccatggcgctgcagacgctgcagagctcgtgggtgaccttccgcaagatcctgtctcacttccccgaggagctgagtctggctttcgtctacggctccggggtgtaccgccaggcagggccgagttcagaccagaagaatgctatgctggactttgtgttcacagtagatgaccctgtcgcatggcattcaaagaacctgaagaaaaattggagtcactactctttcctaaaagttttagggcccaagattatcacgtccatccagaataactatggcgctggagtttactacaattcattgatcatgtgtaatggtaggcttatcaaatatggagttattagcactaacgttctgattgaagatctcctcaactggaataacttatacattgctggacgactccaaaaaccggtgaaaattatctcagtgaacgaggatgtcactcttagatcagccctcgatagaaatctgaagagtgctgtgaccgctgctttcctcatgctccccgaaagcttttctgaagaagacctcttcatagagattgccggtctctcctattcaggtgactttcggatggtggttggagaagataaaacaaaagtgttgaatattgtgaagcccaatatagcccactttcgagagctctatggcagcatactacaggaaaatcctcaagtggtgtataaaagccagcaaggctggctggagatagataaaagcccagaaggacagttcactcagctgatgacattgcccaaaaccttacagcaacagataaatcatattatggaccctcctggaaaaaacagagatgtggaagaaactttattccaagtggctcatgatcccgactgtggagatgtggtgcgactagggctttcagcaatcgtgagaccgtctagtataagacagagcacgaaaggcatttttactgctggcctgaagaagtcagtgatttatagttcactaaaactgcacaaaatgtggaaagggtggctgaggaaaacatcctgattttgcttgcttttatatatgttatgtgtagatgaataaagtgtttgatcctttttgacag

SEQ ID NO: 9110 - protein, 337 aa, Homo sapiens
MALQTLQSSWVTFRKILSHFPEELSLAFVYGSGVYRQAGPSSDQKNAMLDFVFTVDDPVAWHSKNLKKNWSHYSFLKVLGPKIITSIQNNYGAGVYYNSLIMCNGRLIKYGVISTNVLIEDLLNWNNLYIAGRLQKPVKIISVNEDVTLRSALDRNLKSAVTAAFLMLPESFSEEDLFIEIAGLSYSGDFRMVVGEDKTKVLNIVKPNIAHFRELYGSILQENPQVVYKSQQGWLEIDKSPEGQFTQLMTLPKTLQQQINHIMDPPGKNRDVEETLFQVAHDPDCGDVVRLGLSAIVRPSSIRQSTKGIFTAGLKKSVIYSSLKLHKMWKGWLRKTS

SEQ ID NO: 9111 - DNA, 2931 bp, Homo sapiens
acttaaatataagtttattctaactaatcccaatatgtggcctcaaaacataagtccataaatgtcatttctaagattattttacataaatactcaaatttgttgtcatttttgtagccaaagctaagtagaggatggggcctgtgaatttagaaccatcctagtgataaatatcaaatatttagataaaaacctaaatatttacccctctagctttatggagccattaaataataacatttttctccttctcttcatagagtttatagacaaaactagaaaattcaggtatttggtatatacttttttgttttttttgataccatcttgctctgtggccaggctggagtgcagtggcgtgatctcggctcattgcaacctccgcttcccgggctcaagcgattcccctgtcccagcctcctaagtagctgggactacaggcacatgccaccacgcctggctaattttttgtatttttagtagagacggggtttcaccatgttggccaggttggtcttgatctcctgacctcatggtctgcccgcctcggcctccctaagtgttgggattatggctgtaagccatgtcatttcactctcttaatggtgtcttttggtgaaaagaagttcataatttcatgtagtccagtttatccattttgttttctatatgtttagcagttttttgtgtcctgtttagaaaatttttgcctattccaaaatcatgaaatttaagttctccacctctgttgaaattataatattaaggcagaaaagactcttcattctgatctgttggttcttagccttttgcaagtccaggatccctgtgaaaatctgactagaactctggacgccctgcacagaagtgcacctacgcacacacacagtagattttcctgcagtgttagggagttcacagacactcagacttaatctgtggaccccttgttagagaacccctcatctattccaacccagtcattttacagataaggaaattgaggcccagggaaaggccactgttagtttgtggcccacctggaactagagtccaggtctcttgactccgattctagtgctctttctaacagatttccctgctgcagtctttctgaaaatgtctcactggcagaaccatgaaagggagaatgttttagtcaagggagatttctgtccactagcagcaacaaaaaaaaaaaatggctacatggtgacactcttctactttatgtatttaccttaaatgtttaagatccaggaactgctttttgaagttgagctgggaattatcatggcccatgcatcctcctctagctgtgactcagtgccctggggttgctatatgaacctttccatgtataactacctgtattcggcttggtcttttggttggttctggctggaattttaaaaaccaccttatataataagcttctagtctcaatgctgaagtgggtggggtttaccagagtggttgctccagggagaaaattaaaaggggtggaggcagggaaaggaactctgagtttgttgactaggttatgttggtttgcaagtagtcagctggtagacaaacgaagccagagtgtctggaagtattcattaatgattttactgctcccctgccactgtctgcagtggtcttttccaaggctctaagtggactaagcagtttacaggtaacagggccagatattttcaagccatcactcaaaccccagtgctaggcatgtccagagcgaaacctgttaccttgtcggcatgctcaccaaagtgcactgccaggggtgtgcactttacactcatagcacagatcacagtttgtgtctcacagtgaaaaagactgttcatatctttgggccacaccctgaaacacaaactgaatgatcccaccctcaacacaaaggaagttgagtccataatcgcatccacagataggatactcttagatctgacaaataacacccatttattttattccctttttcttctttcccctaagcccccggagagcctttctccagtttcatcacacactcctgactaagtagatgggggtgctagggggccagctctccgaatgaggcacatttgtcttgtcatttcaaaagctttcacagagcacctgctgtgttctgggtcctgtactaggtgacagggccacctaggtgaacagggcaaggtccctgtcctcaggaagctcccagtccaggcagaggcgtgggtgaatcggcccacacgtactgcacagtgtgttgagtgagcacagatgctgtggggccaccctgtgggtccagggaagcacttcctagagaagaaatccaaacagggattccaagtcaacgaggcagaaagtgatgggaacagcatttgtcatagtcagacaggtgcctttcacagtgacatagagacagtgaggtggggttggaatttaggcctgagagaacggggacccagtggcatacagagtcttatccttgtcctacctttttgaaagagctaaattcagaggctgccaatatgttcataactcaaaaggatcacttatcccaataacttaggaaccgttggcatccatagccctaaatcggaaaatgccgaaatcagaatcatttccccctacattgatcacagtgacctttaatcaccttcagctccctggtctcctagagccacgggtcagcccctcactgccctcctccaaagacaagtctgctcagaatgtcactgaaactctgagcatccactcaacaagcctccatcttcttactttctcatcttttctcttttaggcctgaagaagtcagtgatttatagttcactaaaactgcacaaaatgtggaaagggtggctgaggaaaacatcctgattttgcttgcttttatatatgttatgtgtagatgaataaagtgtttgatcctttttgaca

SEQ ID NO: 9112 - protein, 68 aa, Homo sapiens [sequence omitted]

SEQ ID NO: 9113 - DNA, 1270 bp, Homo sapiens
gtagcaagggacggaagctctgcctgtgcgaccgccgcccacccgagcctatctgggctgcgtcttctcgccgctgctcttcgtggcccaacgccccaatccttgcgtgtgcttgcagtcccaccccacactcagccttgtgtccctcgatccagtctccgacttccatttcccaccctaaaccgcctacccggtgtctgttccccgcccggttgtcctcgccctgctgcgctgagtgtcccctgttagcctcgaccccatggcgctgcagacgctgcagagctcgtgggtgaccttccgcaagatcctgtctcacttccccgaggagctgagtctggctttcgtctacggctccggggtgtaccgccaggcagggccgagttcagaccagaagaatgctatgctggactttgtgttcacagtagatgaccctgtcgcatggcattcaaagaacctgaagaaaaattggagtcactactctttcctaaaagttttagggcccaagattatcacgtccatccagaataactatggcgctggagtttactacaattcattgatcatgtgtaatggtaggcttatcaaatatggagttattagcactaacgttctgattgaagatctcctcaactggaataacttatacattgctggacgactccaaaaaccggtgaaaattatctcagtgaacgaggatgtcactcttagatcagccctcgatagaaatctgaagagtgctgtgaccgctgctttcctcatgctccccgaaagcttttctgaagaagacctcttcatagagattgccggtctctcctattcaggtgactttcggatggtggttggagaagataaaacaaaagtgttgaatattgtgaagcccaatatagcccactttcgagagctctatggcagcatactacaggaaaatcctcaagtggtgtataaaagccagcaaggctggctggagatagataaaagcccagaaggacagttcactcagctgatgacattgcccaaaaccttacagcaacagataaatcatattatggaccctcctggaaaaaacagagatgtggaagaaactttattccaagtggctcatgatcccgactgtggagatgtggtgcgactaggcctgaagaagtcagtgatttatagttcactaaaactgcacaaaatgtggaaagggtggctgaggaaaacatcctgattttgcttgcttttatatatgttatgtgtagatgaataaagtgtttgatcctttttgaca

SEQ ID NO: 9114 - protein, 316 aa, Homo sapiens; identical to SEQ ID NO: 750

SEQ ID NO: 9115 - DNA, 742 bp, Homo sapiens
ggtcatctcagtgcctggatttgacgcggcctccacgagtgtcaactgcagcaccacttcctttgactgctggatttaagacaaatataaattttaaaaccaaaagtcagaaattgatccttgagagtggcttctattcttttctcaggtagaaatggaatattataggacaagaattgtcctttttgaagggacttagactcctgaacacttacccattcagtttcagaaaaagagagtttccttagcttgctgcctcgccaggggtgtgggtgcatatatgtttgtgtgatttttaaagagaagccctgagttttggagtatttgtaggatttaaagcacttccatagacgtcgtcttttttttcctcccttcagatagataaaagcccagaaggacagttcactcagctgatgacattgcccaaaaccttacagcaacagataaatcatattatggaccctcctggaaaaaacagagatgtggaagaaactttattccaagtggctcatgatcccgactgtggagatgtggtgcgactagggctttcagcaatcgtgagaccgtctagtataagacagagcacgaaaggcatttttactgctggcctgaagaagtcagtgatttatagttcactaaaactgcacaaaatgtggaaagggtggctgaggaaaacatcctgattttgcttgcttttatatatgttatgtgtagatgaataaagtgtttgatcctttttgac

SEQ ID NO: 9116 - protein, 89 aa, Homo sapiens
MTLPKTLQQQINHIMDPPGKNRDVEETLFQVAHDPDCGDVVRLGLSAIVRPSSIRQSTKGIFTAGLKKSVIYSSLKLHKMWKGWLRKTS

SEQ ID NO: 9117 - DNA, 2780 bp, Homo sapiens
gaaaatgagaatttaccaaatttttaaatcatgtcacctggtattttatctttacactcatgctttcaagtgaaaattccagtgcattattttcctcaagagaaagcagtggcagataagtactttctaatttttttatatgtcactcaagccgttggaagcttcataggtaaagcataacttaaatataagtttattctaactaatcccaatatgtggcctcaaaacataagtccataaatgtcatttctaagattattttacataaatactcaaatttgttgtcatttttgtagccaaagctaagtagaggatggggcctgtgaatttagaaccatcctagtgataaatatcaaatatttagataaaaacctaaatatttacccctctagctttatggagccattaaataataacatttttctccttctcttcatagagtttatagacaaaactagaaaattcaggtatttggtatatacttttttgttttttttgataccatcttggtcttgtcacccaggctgtagtgcagtggcacaatcaccactcatcgtagcctcaacttcccaggctcaagtgatcctcccacctcagcctcccaagtagacagaactgtaggcttgcaccaccatgtctggcttttttttgttttctttttttttttcgtagagccggatatctcactcttttgctagggctgatgttgaatttttgtgctcaagcaattctcctgcctcagcctcccaaactgttgggattacaggtgtgaacctgtgctcctggcccatttgatagataaaagcccagaaggacagttcactcagctgatgacattgcccaaaaccttacagcaacagataaatcatattatggaccctcctggaaaaaacagagatgtggaagaaactttattccaagtggctcatgatcccgactgtggagatgtggtgcgactaggtacgtttatgaatttgatgttgaggaaatgccagccatggggaaaagcagactttgtttgtgattggaatgtattatttcttcctttttgtttagcgagatagagagattgcctctcagaagaagaaagcactaaaaatttgagggttttctaaatctgcatttttatttgtttgaagtaagatggtgaaaatacttctgtttttaaattcctggatcctaaatcactgtcaaagggagaaacaatgtttcttttggttcctagagcacaacttctagaatttatttaaaagatgtgtctgtgttttgtggtggtctgagaaaagagattggtggcatttttttgtgcttttataacatcgagaacacagctttcctcaatcaactccatttgatgtgtctcatacattgttgagtacattccctcagacatggcccacgttccacagcattttccccagcactgccctgatgtttatccaaaactctgaacccaggccaggtgcagtggctcacgcctgtactcccaacactttaggaagtccaggagggagaatcacttgaggccaggagtttgagaccagcttgggcaacagagcaagaccctgtctctgcaaaaattacaaaagtagctgggcatggtggcacatgcctataatctcagctaacttgggagtctgaggtgggaggatcgcttgagcagttggaggctgcaatgagctaggatcgcaccactacactccaggcttggtgatagagcagcccgtatctcttaaaaaacaaacaaaaaaaagagcctgaaccttatcttcagagactaacttccctttaaggtgctaaaggtaatttatgagatcagtcaatcaagaaatatttatgaaattgagaatgagtccctctgtcaattgagtgcattctcctgttttcattcagtaaatatttactgagctcctccgcgtgccagatagaatttccagtaatgctttgcaaagaccatcgcactgcagtggatgagctgcagcaggcgctccacgcccactctcctcctgggcctgcactaggtttgcagagtgtgtgtttaggtcaccagctccccatcctgaagatagctctgtacgaggcacactgttgtttgtttgaacatgatcctggcaacagtgtgatctgggccgtctctttgaggtgagtgaaacttgttcctcactgtggaatccgtatgtgtgttttcagaatgaaagtttttctcgtagatgtaatcatttggtttttatcttttcatgttatggaattgagaaccagaaatctcaagcagatttaagtcataaaatgccctttgagggtcagctaacccatccccttgttttaaggggaagaggcacagagctgttcggtcatcggcttggactcacacagccgggtggcgccacggctggctgctctggtctcctggccctcaatcccactgcccttttcattgtcactgtgacagcaggacagagatagatttggtggtttgattggctgactagaaagaatatttagtttcaagttttaaaactgttaagatgactaacatctgttttgggtttttttggtctcctttttggtttttttctcgcagggctttcagcaatcgtgagaccgtctagtataagacagagcacgaaaggcatttttactgctggcctgaagaagtcagtgatttatagttcactaaaactgcacaaaatgtggaaagggtggctgaggaaaacatcctgattttgcttgcttttatatatgttatgtgtagatgaataaagtgtttgatcctttttgac

SEQ ID NO: 9118 - protein, 77 aa, Homo sapiens [sequence omitted]

SEQ ID NO: 9119 - DNA, 2572 bp, Homo sapiens
gtagcaagggacggaagctctgcctgtgcgaccgccgcccacccgagcctatctgggctgcgtcttctcgccgctgctcttcgtggcccaacgccccaatccttgcgtgtgcttgcagtcccaccccacactcagccttgtgtccctcgatccagtctccgacttccatttcccaccctaaaccgcctacccggtgtctgttccccgcccggttgtcctcgccctgctgcgctgagtgtcccctgttagcctcgaccccatggcgctgcagacgctgcagagctcgtgggtgaccttccgcaagatcctgtctcacttccccgaggagctgagtctggctttcgtctacggctccggggtgtaccgccaggcagggccgagttcagaccagaagaatgctatgctggactttgtgttcacagtagatgaccctgtcgcatggcattcaaagaacctgaagaaaaattggagtcactactctttcctaaaagttttagggcccaagattatcacgtccatccagaataactatggcgctggagtttactacaattcattgatcatgtgtaatggtaggcttatcaaatatggagttattagcactaacgttctgattgaagatctcctcaactggaataacttatacattgctggacgactccaaaaaccggcctctctggcagtgtcccaagagttcactggcttttcactctgaacaacaaataacagtgctgctgagacaagttcctagttcacctttcattgaagaaccagatcagcacagtagcagaatcttccgaactgacatttttcctttgagtgaaaattatctcagtgaacgaggatgtcactcttagatcagccctcgatagaaatctgaagagtgctgtgaccgctgctttcctcatgctccccgaaagcttttctgaagaagacctcttcatagagattgccggtctctcctattcaggtgactttcggatggtggttggagaagataaaacaaaagtgttgaatattgtgaagcccaatatagcccactttcgagagctctatggcagcatactacaggaaaatcctcaagtggtgtataaaagccagcaaggctggctggagatagataaaagcccagaaggacagttcactcagctgatgacattgcccaaaaccttacagcaacagataaatcatattatggaccctcctggaaaaaacagagatgtggaagaaactttattccaagtggctcatgatcccgactgtggagatgtggtgcgactaggtacgtttatgaatttgatgttgaggaaatgccagccatggggaaaagcagactttgtttgtgattggaatgtattatttcttcctttttgtttagcgagatagagagattgcctctcagaagaagaaagcactaaaaatttgagggttttctaaatctgcatttttatttgtttgaagtaagatggtgaaaatacttctgtttttaaattcctggatcctaaatcactgtcaaagggagaaacaatgtttcttttggttcctagagcacaacttctagaatttatttaaaagatgtgtctgtgttttgtggtggtctgagaaaagagattggtggcatttttttgtgcttttataacatcgagaacacagctttcctcaatcaactccatttgatgtgtctcatacattgttgagtacattccctcagacatggcccacgttccacagcattttccccagcactgccctgatgtttatccaaaactctgaacccaggccaggtgcagtggctcacgcctgtactcccaacactttaggaagtccaggagggagaatcacttgaggccaggagtttgagaccagcttgggcaacagagcaagaccctgtctctgcaaaaattacaaaagtagctgggcatggtggcacatgcctataatctcagctaacttgggagtctgaggtgggaggatcgcttgagcagttggaggctgcaatgagctaggatcgcaccactacactccaggcttggtgatagagcagcccgtatctcttaaaaaacaaacaaaaaaaagagcctgaaccttatcttcagagactaacttccctttaaggtgctaaagtaaatatttactgagctcctccgcgtgccagatagaatttccagtaatgctttgcaaagaccatcgcactgcagtggatgagctgcagcaggcgctccacgcccactctcctcctgggcctgcactaggtttgcagagtgtgtgtttaggtcaccagctccccatcctgaagatagctctgtacgaggcacactgttgtttgtttgaacatgatcctggcaacagtgtgatctgggccgtctctttgagggctttcagcaatcgtgagaccgtctagtataagacagagcacgaaaggcatttttactgctggcctgaagaagtcagtgatttatagttcactaaaactgcacaaaatgtggaaagggtggctgaggaaaacatcctgattttgcttgcttttatatatgttatgtgtagatgaataaagtgtttgatcctttttgac

SEQ ID NO: 9120 - protein, 159 aa, Homo sapiens
MLPESFSEEDLFIEIAGLSYSGDFRMVVGEDKTKVLNIVKPNIAHFRELYGSILQENPQVVYKSQQGWLEIDKSPEGQFTQLMTLPKTLQQQINHIMDPPGKNRDVEETLFQVAHDPDCGDVVRLGTFMNLMLRKCQPWGKADFVCDWNVLFLPFCLAR

SEQ ID NO: 9121 - DNA, 535 bp, Homo sapiens
tactccacttctggaatttttcttcccaatgttctgcttctttcaggtgaaaattatctcagtgaacgaggatgtcactcttagatcagccctcgatagaaatctgaagagtgctgtgaccgctgctttcctcatgctccccgaaagcttttctgaagaagacctcttcatagagattgccggtctctcctattcagatgagaaaactgaggcccagaatggttccctgtctaaggtcactcatctggtacatggtggactagtttgaataccagctttctaaaggtgactttcggatggtggttggagaagataaaacaaaagtgttgaatattgtgaagcccaatatagcccactttcgagagctctatggcagcatactacaggaaaatcctcaagtggtgtataaaagccagcaaggctggctggaggtaactgtatgtggaaaatagcttgtattgtttctaagacaaaggctatttgcaggaagaaagtcaggggtagaacagcatgactggtgtgagaacatttatag

SEQ ID NO: 9122 - protein, 79 aa, Homo sapiens
MFCFFQVKIISVNEDVTLRSALDRNLKSAVTAAFLMLPESFSEEDLFIEIAGLSYSDEKTEAQNGSLSKVTHLVHGGLV

SEQ ID NO: 9123 - DNA, 881 bp, Homo sapiens
gtagcaagggacggaagctctgcctgtgcgaccgccgcccacccgagcctatctgggctgcgtcttctcgccgctgctcttcgtggcccaacgccccaatccttgcgtgtgcttgcagtcccaccccacactcagccttgtgtccctcgatccagtctccgacttccatttcccaccctaaaccgcctacccggtgtctgttccccgcccggttgtcctcgccctgctgcgctgagtgtcccctgttagcctcgaccccatggcgctgcagacgctgcagagctcgtgggtgaccttccgcaagatcctgtctcacttccccgaggagctgagtctggctttcgtctacggctccggggtgtaccgccaggcagggccgagttcagaccagaagaatgctatgctggactttgtgttcacagtagatgaccctgtcgcatggcattcaaagaacctgaagaaaaattggagtcactactctttcctaaaagttttagggcccaagattatcacgtccatccagaataactatggcgctggagtttactacaattcattgatcatgtgtaatggtaggcttatcaaatatggagttattagcactaacgttctgattgaagatctcctcaactggaataacttatacattgctggacgactccaaaaaccggcctctctggcagtgtcccaagagttcactggcttttcactctgaacaacaaataacagtgctgctgagacaagttcctagttcacctttcattgaagaaccagatcagcacagtagcagaatcttccgaactgacatttttcctttgaggtctcaactgtgtctttcaggctggagtgtagtgtcatgatcatggctcactgcaacccac

SEQ ID NO: 9124 - protein, 151 aa, Homo sapiens
MALQTLQSSWVTFRKILSHFPEELSLAFVYGSGVYRQAGPSSDQKNAMLDFVFTVDDPVAWHSKNLKKNWSHYSFLKVLGPKIITSIQNNYGAGVYYNSLIMCNGRLIKYGVISTNVLIEDLLNWNNLYIAGRLQKPASLAVSQEFTGFSL

SEQ ID NO: 9125 - DNA, 978 bp, Homo sapiens
ccgcccacccgagcctatctgggctgcgtcttctcgccgctgctcttcgtggcccaacgccccaatccttgcgtgtgcttgcagtcccaccccacactcagccttgtgtccctcgatccagtctccgacttccatttcccaccctaaaccgcctacccggtgtctgttccccgcccggttgtcctcgccctgctgcgctgagtgtcccctgttagcctcgaccccatggcgctgcagacgctgcagagctcgtgggtgaccttccgcaagatcctgtctcacttccccgaggagctgagtctggctttcgtctacggctccggggtgtaccgccaggcagggccgagttcagaccagaagaatgctatgctggactttgtgttcacagtagatgaccctgtcgcatggcattcaaagaacctgaagaaaaattggagtcactactctttcctaaaagttttagggcccaagattatcacgtccatccagaataactatggcgctggagtttactacaattcattgatcatgtgtaatggtagggtaagtgactgctggcctttgtcttaacttggctggttatttacctgggttattagagtgccagctaaatatgtatgttcttgtggtcaggaaacattcacactcctgctggacgttgttatagtcgggaaatatgtatgtttttatagtatgtatattcttatagtcaggaaacattcacactcctgccagacgtcttgaacttggggacagagcagggactggagtccttcctcatgtcccattaactgtcattgcagtgtgaggaggtggttgggtgtgactgacttattttattttttttatttttttgagacggagttttgctcttgttgcccaggctggagtgcagtggtgtgatcgcagctcactgcaacctccgcctcacgggttcaagtgattctcccgcctcagcctcccagttagctgggatta

SEQ ID NO: 9126 - protein, 114 aa, Homo sapiens
MALQTLQSSWVTFRKILSHFPEELSLAFVYGSGVYRQAGPSSDQKNAMLDFVFTVDDPVAWHSKNLKKNWSHYSFLKVLGPKIITSIQNNYGAGVYYNSLIMCNGRVSDCWPLS

SEQ ID NO: 9127 - DNA, 2490 bp, Homo sapiens
agaccgccgctgctgtctgcggggtctggtgccggggcctgagtctctgctggctaagccgacgcctcagccgcctcagtcgcctcaatctcgccttccgccctcgctctccctccgcgccaccggaccccgtagccccgcgcgcccccagacctttaagccagatgatgaacttcctgcggcgccggctgtcggacacagcttattcagctcgctgtcccaagcggtaaagcagacggccgcctcggctggcctggtggacgcgcccggtgccgcgccggcagccgccaggaaggccaaggtgctgctggtggtcgacgagccgcacgccgactgggccaagtgctttcggggcaaaaaagtccttggagattatgatatcaaggtggaacaggcagaattttcagagctcaacctggtggcccatgcagatggcacctatgctgtggatatgcaggttctccggaatggcacaaaggttgtccggtccttccggccagacttcgtgctcatccggcagcatgcatttggcatggcggagaatgaggacttccgccacctgatcattggtatgcagtatgcaggcctccccagcatcaactcactggaatccatatacaacttctgtgacaagccatgggtgtttgcccagctggtcgctatctataagacactgggaggagaaaagttccctctcattgaacagacatactaccccaaccacaaagagatgctgacactgcccacgttccctgtggtggtgaagattggccacgctcactcaggcatgggcaaggtcaaagtggaaaaccactacgacttccaggacattgccagcgtggtggctctcacccagacctatgccactgcagagcctttcattgactccaagtatgacatccgggtccagaagattggcaacaactacaaggcttacatgaggacatcgatctcagggaactggaagacgaacactggctctgcgatgctggagcagattgccatgtcagacaggtacaaactgtgggtggacacctgctctgagatgtttggcggcctggacatctgtgctgtcaaagctgtacatggcaaagatgggaaagactacatttttgaggtcatggactgtagcatgccactgattggggaacatcaggtggaggacaggcaactcatcaccgaactagtcatcagcaagatgaaccagctgctgtccaggactcctgccctgtctcctcagagacccctaacaacccagcagccacagagcggaacacttaaggatccggactcaagcaagaccccacctcagcggccaccccctcaagggggccctgggcaaccccaaggaatgcagcccccaggcaaggtgctgcctccacgccggctcccccctggaccatcactgccaccttcctcctcttcctcctcttcttcctcctcctcggctcctcagcggccgggcggccccaccacccacggagatgcaccctccagcagcagctccctggcagaggcccagccacccctggctgctccaccacagaagccccagcctcacccacagctcaacaagtcgcagtccctgacaaatgccttcagcttctctgagtcctccttcttccggtcttcagccaatgaggatgaagccaaagcagagaccatccggagcttgaggaagtcctttgccagcctcttttcagattagctcttcagacacacggggcacccagcccaaccgggaaaggcatctaagacattcaccaacaacagtcagccagcttggtggttatgtcccatgaccttgacgtgtgtggtcccttcctctgctctgttgtactaagtgatgttgtgcagcccagaaaggaccatttgacagtctcagggcaggtgcctacccagcaaggggtacctggcatcagagaggaaagagctgcttccctgtagtcatgagagcttccttctgaagtcatcgttcgctgtgagtttagtggccttattgtgacagtgccatcatgtcttattcttccctgtgaaaccaggattaatcgtggactcctggcagcttaacctagctcagttgcagtgctaagcatgccccgcccccattcagtgatacctgtttgggaagtatatacttccccaaaagtactcttggccctaagttttaggaactttccccgacctggatcccttgtcatacctgtgttactgtttaaagcacacccacccaacttacaagatcttaggctgctgtggtggtgaagcaccttgagtctgctgatattcgggagaacaaggatctgcagtttccccttttctcccctctgaagagtggttcttatgtgcaatctgcagtaaccttgaactccagagctgcactatagaggagaatgcatgccactatgacagcagtatgccaagctttgtgttcatctcctaataaacgttaagacctttggtgtaataaaagcagcagcattcaccaac

SEQ ID NO: 9128 - protein, 418 aa, Homo sapiens
MQVLRNGTKVVRSFRPDFVLIRQHAFGMAENEDFRHLIIGMQYAGLPSINSLESIYNFCDKPWVFAQLVAIYKTLGGEKFPLIEQTYYPNHKEMLTLPTFPVVVKIGHAHSGMGKVKVENHYDFQDIASVVALTQTYATAEPFIDSKYDIRVQKIGNNYKAYMRTSISGNWKTNTGSAMLEQIAMSDRYKLWVDTCSEMFGGLDICAVKAVHGKDGKDYIFEVMDCSMPLIGEHQVEDRQLITELVISKMNQLLSRTPALSPQRPLTTQQPQSGTLKDPDSSKTPPQRPPPQGGPGQPQGMQPPGKVLPPRRLPPGPSLPPSSSSSSSSSSSAPQRPGGPTTHGDAPSSSSSLAEAQPPLAAPPQKPQPHPQLNKSQSLTNAFSFSESSFFRSSANEDEAKAETIRSLRKSFASLFSD

SEQ ID NO: 9129 - DNA, 3912 bp, Homo sapiens
ccgccgctgctgtctgcggggtctggtgccggggcctgagtctctgctggctaagccgacgcctcagccgcctcagtcgcctcaatctcgccttccgccctcgctctccctccgcgccaccggaccccgtagccccgcgcgcccccagacctttaagccagatgatgaacttcctgcggcgccggctgtcggacagcagcttcatcgccaatctgcccaacggctacatgaccgacctgcagcggcccgagccccagcaagcgccgacgccgccgccccccggcccgggcgccgcctcggcctaggcggcgcccccgaccgcctcgccgggaccggagcggacgccgccggccgcctaggcgcccgcgccgtaagacgcgccgaagaccgcgcccccccccccgcgcgaacaccgtcggtgggcagcagcttattcagctcgctgtcccaagcggtaaagcagacggccgcctcggctggcctggtggacgcgcccggtgccgcgccggcagccgccaggaaggccaaggtgctgctggtggtcgacgagccgcacgccgactgggccaagtgctttcggggcaaaaaagtccttggagattatgatatcaaggtggaacaggcagaattttcagagctcaacctggtggcccatgcagatggcacctatgctgtggatatgcaggttctccggaatggcacaaaggttgtccggtccttccggccagacttcgtgctcatccggcagcatgcatttggcatggcggagaatgaggacttccgccacctgatcattggtatgcagtatgcaggcctccccagcatcaactcactggaatccatatacaacttctgtgacaagccatgggtgtttgcccagctggtcgctatctataagacactgggaggagaaaagttccctctcattgaacagacatactaccccaaccacaaagagatgctgacactgcccacgttccctgtggtggtgaagattggccacgctcactcaggcatgggcaaggtcaaagtggaaaaccactacgacttccaggacattgccagcgtggtggctctcacccagacctatgccactgcagagcctttcattgactccaagtatgacatccgggtccagaagattggcaacaactacaaggcttacatgaggacatcgatctcagggaactggaagacgaacactggctctgcgatgctggagcagattgccatgtcagacaggtacaaactgtgggtggacacctgctctgagatgtttggcggcctggacatctgtgctgtcaaagctgtacatggcaaagatgggaaagactacatttttgaggtcatggactgtagcatgccactgattggggaacatcaggtggaggacaggcaactcatcaccgaactagtcatcagcaagatgaaccagctgctgtccaggactcctgccctgtctcctcagagacccctaacaacccagcagccacagagcggaacacttaaggatccggactcaagcaagaccccacctcagcggccaccccctcaaggttgtttacagtatattctcgactgtaatggcattgcagtagggccaaaacaagtccaagcttcttaaaatgattggtggttaatttttcaaagcagaaattttaagccaaaaacaaacgaaaggaaagcggggaggggaaaacagaccctcccactggtgccgttgctgcgttctttcaatgctgactggactgtgtttttcctatgcagtgtcagctcctctgtctggttgtttacctgttcctgttcgtgcttgtaatgctcacttatgttttctctgtataacttgtgattccagggctgtttgtcaacagtatacaaaagaattgtgcctctcccaagtccagtgtgactttatcttctgggtggtttgatagtgtttttaaaagtaatatataatgtggggtgaaatgggagtaggggggtggacaggggagaaacgaaaaccacaaaaagaaaacccaactcctctcctccccccaagctcagttaaatcccccacctccaactttccctccaccagtgtgcttgggatcttcaatgaactgtgcttttcgctttctttctgcatgactattgtaactagatagaacattaagagattttcaagatcaaacttccatagcttcatccactgaatttgaaggcatccacctttttctccatttgctaaaatttggtgcagtttgagtttatgtgaataggctggctgtgcctgtagagctcttgtgtttttagtgatgacatgaaatacaaagaacaagctatttccaggaatgtgttctgtattttacatcccagtgtaccctttattttattattaactaattaactatgagatttttaaaaaatggggccgctgatgtgcaatatcaaagtgaacttgtgagtattttgtgtgtgttgatctcagttgtttcttcattgttgctgtttctggatccagccatgtgtgcgcttgtgtggacctgaggctgctttctgttcccaaagcttgacctgtgtacagagataattccttggcaatgttggacatagaatgcagggagctactgaaggtctgtcagggatttgtccattctgctcttggcctctcctgaggcctcataatgggagaccaaatcaaaaatgtcccatgtcacttgagtgggtacactgcctacagaaccttgaggttgactcctgcttcagttctcagctgtttaccacagccctccagggtccaaagattgaggagctttctctttcctgggaggaactgtctcagatttagcttgtgtgtgttttggacagaggctccacagcggtggctcttgaggaatcctcaccagtttgttctcttccctctgacaagcagcacctgagcagatgctgaggcagttcattaaaccaggcctcagcttcagtgcctcatcttgccatctcccggccaggctgggaacgggcaccaagcagccgcctctaacaaacaccatggtccgtggaagttcatgccagcagcttgcctttgagaagaaatgctgctggctctatttttacattcccttccacctctatactgtcatgtcaccgttctgaactcccagatctgagaaggaactagtgttggtggtatgtaacaagagttacgtatccaggggcttgtgccttggtttctcctttgattgctggtaaattctgaggccacagagaaatgcattgagtgtgaatgttgtcatctgtaatccctccctcagctgataatggtagttgatctgttgtaaatatatacatatatgcatatttgcacttccagatgggttgcataagaatcaggtccttaaatacctcccaatctgatgaaacgatagaataaagtaacatttcccagaatggaggaatacattattttatcgtatatttttgtccaagcgatgagctgacggtggtattgcttctctgcatgttatcagtgtgtacatctggtgcttttcatgtgtcatttgtgagccacaaatgcaaagttgccatttgaattcagtcaggctacagggtggtgtcagtcaaggtctttcaggtgggggagaaattggttagggctcccactgccaaatgcaagcagatagcataacctgactgttatgtgccctcaggcagcatgcttagggacaactctgtggcctgggggacatctgtgtcacagtataggattgccattcaggtgttttgtacctatttctttcctgacgttgtcccctttttttgtactgatccaactgggagaacctcagccaatgctggaagtatgattgaagtacctctcttttgtgactcttgtacagcttaatgtgcaataaaggaaaagttatatctgtc

SEQ ID NO: 9130 - protein, 314 aa, Homo sapiens
MQVLRNGTKVVRSFRPDFVLIRQHAFGMAENEDFRHLIIGMQYAGLPSINSLESIYNFCDKPWVFAQLVAIYKTLGGEKFPLIEQTYYPNHKEMLTLPTFPVVVKIGHAHSGMGKVKVENHYDFQDIASVVALTQTYATAEPFIDSKYDIRVQKIGNNYKAYMRTSISGNWKTNTGSAMLEQIAMSDRYKLWVDTCSEMFGGLDICAVKAVHGKDGKDYIFEVMDCSMPLIGEHQVEDRQLITELVISKMNQLLSRTPALSPQRPLTTQQPQSGTLKDPDSSKTPPQRPPPQGCLQYILDCNGIAVGPKQVQAS

SEQ ID NO: 9131 - DNA, 2696 bp, Homo sapiens
ccgccgctgctgtctgcggggtctggtgccggggcctgagtctctgctggctaagccgacgcctcagccgcctcagtcgcctcaatctcgccttccgccctcgctctccctccgcgccaccggaccccgtagccccgcgcgcccccagacctttaagccagatgatgaacttcctgcggcgccggctgtcggacagcagcttcatcgccaatctgcccaacggctacatgaccgacctgcagcggcccgagccccagcaagcgccgacgccgccgccccccggcccgggcgccgcctcggcctaggcggcgcccccgaccgcctcgccgggaccggagcggacgccgccggccgcctaggcgcccgcgccgtaagacgcgccgaagaccgcgcccccccccccgcgcgaacaccgtcggtgggcagcagcttattcagctcgctgtcccaagcggtaaagcagacggccgcctcggctggcctggtggacgcgcccggtgccgcgccggcagccgccaggaaggccaaggtgctgctggtggtcgacgagccgcacgccgactgggccaagtgctttcggggcaaaaaagtccttggagattatgatatcaaggtggaacaggcagaattttcagagctcaacctggtggcccatgcagatggcacctatgctgtggatatgcaggttctccggaatggcacaaaggttgtccggtccttccggccagacttcgtgctcatccggcagcatgcatttggcatggcggagaatgaggacttccgccacctgatcattggtatgcagtatgcaggcctccccagcatcaactcactggaatccatatacaacttctgtgacaagccatgggtgtttgcccagctggtcgctatctataagacactgggaggagaaaagttccctctcattgaacagacatactaccccaaccacaaagagatgctgacactgcccacgttccctgtggtggtgaagattggccacgctcactcaggcatgggcaaggtcaaagtggaaaaccactacgacttccaggacattgccagcgtggtggctctcacccagacctatgccactgcagagcctttcattgactccaagtatgacatccgggtccagaagattggcaacaactacaaggcttacatgaggacatcgatctcagggaactggaagacgaacactggctctgcgatgctggagcagattgccatgtcagacaggtacaaactgtgggtggacacctgctctgagatgtttggcggcctggacatctgtgctgtcaaagctgtacatggcaaagatgggaaagactacatttttgaggtcatggactgtagcatgccactgattggggaacatcaggtggaggacaggcaactcatcaccgaactagtcatcagcaagatgaaccagctgctgtccaggactcctgccctgtctcctcagagacccctaacaacccagcagccacagagcggaacacttaaggatccggactcaagcaagaccccacctcagcggccaccccctcaagggggccctgggcaaccccaaggaatgcagcccccaggcaaggtgctgcctccacgccggctcccccctggaccatcactgccaccttcctcctcttcctcctcttcttcctcctcctcggctcctcagcggccgggcggccccaccacccacggagatgcaccctccagcagcagctccctggcagaggcccagccacccctggctgctccaccacagaagccccagcctcacccacagctcaacaagtcgcagtccctgacaaatgccttcagcttctctgagtcctccttcttccggtcttcagccaatgaggatgaagccaaagcagagaccatccggagcttgaggaagtcctttgccagcctcttttcagattagctcttcagacacacggggcacccagcccaaccgggaaaggcatctaagacattcaccaacaacagtcagccagcttggtggttatgtcccatgaccttgacgtgtgtggtcccttcctctgctctgttgtactaagtgatgttgtgcagcccagaaaggaccatttgacagtctcagggcaggtgcctacccagcaaggggtacctggcatcagagaggaaagagctgcttccctgtagtcatgagagcttccttctgaagtcatcgttcgctgtgagtttagtggccttattgtgacagtgccatcatgtcttattcttccctgtgaaaccaggattaatcgtggactcctggcagcttaacctagctcagttgcagtgctaagcatgccccgcccccattcagtgatacctgtttgggaagtatatacttccccaaaagtactcttggccctaagttttaggaactttccccgacctggatcccttgtcatacctgtgttactgtttaaagcacacccacccaacttacaagatcttaggctgctgtggtggtgaagcaccttgagtctgctgatattcgggagaacaaggatctgcagtttccccttttctcccctctgaagagtggttcttatgtgcaatctgcagtaaccttgaactccagagctgcactatagaggagaatgcatgccactatgacagcagtatgccaagctttgtgttcatctcctaataaacgttaagacctttggtgtaat

SEQ ID NO: 9132 - protein, 418 aa, Homo sapiens; identical to SEQ ID NO: 9128

SEQ ID NO: 9133 - DNA, 2701 bp, Homo sapiens
tgcggggtctggtgccggggcctgagtctctgctggctaagccgacgcctcagccgcctcagtcgcctcaatctcgccttccgccctcgctctccctccgcgccaccggaccccgtagccccgcgcgcccccagacctttaagccagatgatgaacttcctgcggcgccggctgtcggacagcagcttcatcgccaatctgcccaacggctacatgaccgacctgcagcggcccgagccccagcaagcgccgacgccgccgccccccggcccgggcgccgcctcggcctaggcggcgcccccgaccgcctcgccgggaccggagcggacgccgccggccgcctaggcgcccgcgccgtaagacgcgccgaagaccgcgcccccccccccgcgcgaacaccgtcggtgggcagcagcttattcagctcgctgtcccaagcggtaaagcagacggccgcctcggctggcctggtggacgcgcccggtgccgcgccggcagccgccaggaaggccaaggtgctgctggtggtcgacgagccgcacgccgactgggccaagtgctttcggggcaaaaaagtccttggagattatgatatcaaggtggaacaggcagaattttcagagctcaacctggtggcccatgcagatggcacctatgctgtggatatgcaggttctccggaatggcacaaaggttgtccggtccttccggccagacttcgtgctcatccggcagcatgcatttggcatggcggagaatgaggacttccgccacctgatcattggtatgcagtatgcaggcctccccagcatcaactcactggaatccatatacaacttctgtgacaagccatgggtgtttgcccagctggtcgctatctataagacactgggaggagaaaagttccctctcattgaacagacatactaccccaaccacaaagagatgctgacactgcccacgttccctgtggtggtgaagattggccacgctcactcaggcatgggcaaggtcaaagtggaaaaccactacgacttccaggacattgccagcgtggtggctctcacccagacctatgccactgcagagcctttcattgactccaagtatgacatccgggtccagaagattggcaacaactacaaggcttacatgaggacatcgatctcagggaactggaagacgaacactggctctgcgatgctggagcagattgccatgtcagacaggtacaaactgtgggtggacacctgctctgagatgtttggcggcctggacatctgtgctgtcaaagctgtacatggcaaagatgggaaagactacatttttgaggtcatggactgtagcatgccactgattggggaacatcaggtggaggacaggcaactcatcaccgaactagtcatcagcaagatgaaccagctgctgtccaggactcctgccctgtctcctcagagacccctaacaacccagcagccacagagcggaacacttaaggatccggactcaagcaagaccccacctcagcggccaccccctcaagggggccctgggcaaccccaaggaatgcagcccccaggcaaggtgctgcctccacgccggctcccccctggaccatcactgccaccttcctcctcttcctcctcttcttcctcctcctcggctcctcagcggccgggcggccccaccacccacggagatgcaccctccagcagcagctccctggcagaggcccagccacccctggctgctccaccacagaagccccagcctcacccacagctcaacaagtcgcagtccctgacaaatgccttcagcttctctgagtcctccttcttccggtcttcagccaatgaggatgaagccaaagcagagaccatccggagcttgaggaagtcctttgccagcctcttttcagattagctcttcagacacacggggcacccagcccaaccgggaaaggcatctaagacattcaccaacaacagtcagccagcttggtggttatgtcccatgaccttgacgtgtgtggtcccttcctctgctctgttgtactaagtgatgttgtgcagcccagaaaggaccatttgacagtctcagggcaggtgcctacccagcaaggggtacctggcatcagagaggaaagagctgcttccctgtagtcatgagagcttccttctgaagtcatcgttcgctgtgagtttagtggccttattgtgacagtgccatcatgtcttattcttccctgtgaaaccaggattaatcgtggactcctggcagcttaacctagctcagttgcagtgctaagcatgccccgcccccattcagtgatacctgtttgggaagtatatacttccccaaaagtactcttggccctaagttttaggaactttccccgacctggatcccttgtcatacctgtgttactgtttaaagcacacccacccaacttacaagatcttaggctgctgtggtggtgaagcaccttgagtctgctgatattcgggagaacaaggatctgcagtttccccttttctcccctctgaagagtggttcttatgtgcaatctgcagtaaccttgaactccagagctgcactatagaggagaatgcatgccactatgacagcagtatgccaagctttgtgttcatctcctaataaacgttaagacctttggtgtaataaaagcagcagcattcacc

SEQ ID NO: 9134 - protein, 418 aa, Homo sapiens; identical to SEQ ID NO: 9128

SEQ ID NO: 9135 - DNA, 1101 bp, Homo sapiens
ctgagtctctgctggctaagccgacgcctcagccgcctcagtcgcctcaatctcgccttccgccttcttcctcctcctcggctcctcagcggccgggcggccccaccacccacggagatgcaccctccagcagcagctccctggcagaggcccagccacccctggctgctccaccacagaagccccagcctcacccacagctcaacaagtcgcagtccctgacaaatgccttcagcttctctgagtcctccttcttccggtcttcagccaatgaggatgaagccaaagcagagaccatccggagcttgaggaagtcctttgccagcctcttttcagattagctcttcagacacacggggcacccagcccaaccgggaaaggcatctaagacattcaccaacaacagtcagccagcttggtggttatgtcccatgaccttgacgtgtgtggtcccttcctctgctctgttgtactaagtgatgttgtgcagcccagaaaggaccatttgacagtctcagggcaggtgcctacccagcaaggggtacctggcatcagagaggaaagagctgcttccctgtagtcatgagagcttccttctgaagtcatcgttcgctgtgagtttagtggccttattgtgacagtgccatcatgtcttattcttccctgtgaaaccaggattaatcgtggactcctggcagcttaacctagctcagttgcagtgctaagcatgccccgcccccattcagtgatacctgtttgggaagtatatacttccccaaaagtactcttggccctaagttttaggaactttccccgacctggatcccttgtcatacctgtgttactgtttaaagcacacccacccaacttacaagatcttaggctgctgtggtggtgaagcaccttgagtctgctgatattcgggagaacaaggatctgcagtttccccttttctcccctctgaagagtggttcttatgtgcaatctgcagtaaccttgaactccagagctgcactatagaggagaatgcatgccactatgacagcagtatgccaagctttgtgttcatctcctaataaacgttaagacctttggtgtaat

SEQ ID NO: 9136 - protein, 34 aa, Homo sapiens
MHPPAAAPWQRPSHPWLLHHRSPSLTHSSTSRSP

SEQ ID NO: 9137 - DNA, 1120 bp, Homo sapiens
ctgagtctctgctggctaagccgacgcctcagccgcctcagtcgcctcaatctcgccttccgccttcttcctcctcctcggctcctcagcggccgggcggccccaccacccacggagatgcaccctccagcagcagctccctggcagaggcccagccacccctggctgctccaccacagaagccccagcctcacccacagctcaacaagtcgcagtccctgacaaatgccttcagcttctctgagtcctccttcttccggtcttcagccaatgaggatgaagccaaagcagagaccatccggagcttgaggaagtcctttgccagcctcttttcagattagctcttcagacacacggggcacccagcccaaccgggaaaggcatctaagacattcaccaacaacagtcagccagcttggtggttatgtcccatgaccttgacgtgtgtggtcccttcctctgctctgttgtactaagtgatgttgtgcagcccagaaaggaccatttgacagtctcagggcaggtgcctacccagcaaggggtacctggcatcagagaggaaagagctgcttccctgtagtcatgagagcttccttctgaagtcatcgttcgctgtgagtttagtggccttattgtgacagtgccatcatgtcttattcttccctgtgaaaccaggattaatcgtggactcctggcagcttaacctagctcagttgcagtgctaagcatgccccgcccccattcagtgatacctgtttgggaagtatatacttccccaaaagtactcttggccctaagttttaggaactttccccgacctggatcccttgtcatacctgtgttactgtttaaagcacacccacccaacttacaagatcttaggctgctgtggtggtgaagcaccttgagtctgctgatattcgggagaacaaggatctgcagtttccccttttctcccctctgaagagtggttcttatgtgcaatctgcagtaaccttgaactccagagctgcactatagaggagaatgcatgccactatgacagcagtatgccaagctttgtgttcatctcctaataaacgttaagacctttggtgtaataaaagcagcagcattcacc

SEQ ID NO: 9138 - protein, 34 aa, Homo sapiens; identical to SEQ ID NO: 9136

SEQ ID NO: 9139 - DNA, 2069 bp, Homo sapiens
aggagattgctgcctatgcaaagcaggtaagaagccgaactctgaggcctctcgccattgtctccgagtcggccagctggagcgttttcggggctgtaaagggagaatggcgcatgcgcatattcagggcggaaggcgcgctaagagcagatttgtggtctgcattatgtctggagccagaagtaagcttgctcttttcctctgcggctgttacgtggttgccctgggagcccacaccggggaggagagcgtggctgaccatcacgaggctgaatattatgtggctgccgtgtatgagcatccatccatcctgagtctgaaccctctggctctcatcagccgccaagaggccttggagctcatgaaccagaaccttgacatctatgaacagcaagtgatgactgcagcccaaaaggatgtacagattatagtgtttccagaagatggcattcatggattcaactttacaagaacatccatttatccatttttggacttcatgccgtctccccaggtggtcaggtggaacccatgcctggagcctcaccgcttcaatgacacagaggtgctccagcgcctgagttgtatggccatcaggggagatatgttcttggtggccaatcttgggacaaaggagccttgtcatagcagtgacccaaggtgcccaaaagatgggagataccagttcaacacaaatgtcgtgttcagcaataatggaacccttgttgaccgctaccgtaaacacaacctctactttgaggcagcattcgatgttcctcttaaagtggatctcatcacctttgataccccctttgctggcaggtttggcatcttcacatgctttgatatattgttctttgaccctgccatcagagtcctcagagactacaaggtgaagcatgttgtgtacccaactgcctggatgaaccagctcccactcttggcagcaattgagattcagaaagcttttgctgttgcctttggcatcaacgttctggcagctaatgtccaccacccagttctggggatgacaggaagtggcatacacacccctctggagtccttttggtaccatgacatggaaaatcccaaaagtcaccttataattgcccaggtggccaaaaatccagtgggtctcattggtgcagagaatgcaacaggtgaaacggacccatcccatagtaagtttttaaaaattttgtcaggcgatccgtactgtgagaaggatgctcaggaagtccactgtgatgaggccaccaagtggaacgtgaatgctcctcccacatttcactctgagatgatgtatgacaatttcaccctggtccctgtctggggaaaggaaggctatctccacgtctgttccaatggcctctgctgttatttactttacgagaggcccaccttatccaaagagctgtatgccctgggggtctttgatgggcttcacacagtacatggcacttactacatccaagtgtgtgccctggtcaggtgtgggggtcttggcttcgacacctgtggacaggaaatcacagaggccacggggatatttgagtttcacctgtggggcaacttcagtacttcctatatctttcctttgtttctgacctcagggatgaccctagaagtccctgaccagcttggctgggagaatgaccactatttcctgaggaaaagtaggctgtcctctgggctggtgacggcggctctctatgggcgcttgtatgagagggactaggaaaagtgtgtggtctgtggggcggactctggccatcatgttgacagccttgcacttccacaggctacaagccctgggaccatctttctgccttaagggcaggagcccacttctgtggcaccagattccaccctgggaactgtggaaaaagtaggagaggcagattccctcagtgtcttcctcttaaacctcaatcatcgagacattagggggtattttctgttcacatttatctttttcaagccacatcttcctctaacaaatctctcagtatgcgattggtctcaagctaaaacaaaaataaatgtcagtttatattttacacatccac

SEQ ID NO: 9140 - protein, 543 aa, Homo sapiens; identical to SEQ ID NO: 756

SEQ ID NO: 9141 - DNA, 2280 bp, Homo sapiens
aggagattgctgcctatgcaaagcaggtaagaagccgaactctgaggcctctcgccattgtctccgagtcggccagctggagcgttttcggggctgtaaagggagaatggcgcatgcgcatattcagggcggaaggcgcgctaagagcagatttgtggtctgcattatgtctggagccagaagtaagcttgctcttttcctctgcggctgttacgtggttgccctgggagcccacaccggggaggagagcgtggctgaccatcacgaggctgaatattatgtggctgccgtgtatgagcatccatccatcctgagtctgaaccctctggctctcatcagccgccaagaggccttggagctcatgaaccagaaccttgacatctatgaacagcaagtgatgactgcagcccaaaaggatgtacagattatagtgtttccagaagatggcattcatggattcaactttacaagaacatccatttatccatttttggacttcatgccgtctccccaggtggtcaggtggaacccatgcctggagcctcaccgcttcaatgacacagaggtgctccagcgcctgagttgtatggccatcaggggagatatgttcttggtggccaatcttgggacaaaggagccttgtcatagcagtgacccaaggtgcccaaaagatgggagataccagttcaacacaaatgtcgtgttcagcaataatggaacccttgttgaccgctaccgtaaacacaacctctactttgaggcagcattcgatgttcctcttaaagtggatctcatcacctttgataccccctttgctggcaggtttggcatcttcacatgctttgatatattgttctttgaccctgccatcagagtcctcagagactacaaggtgaagcatgttgtgtacccaactgcctggatgaaccagctcccactcttggcagcaattgagattcagaaagcttttgctgttgcctttggcatcaacgttctggcagctaatgtccaccacccagttctggggatgacaggaagtggcatacacacccctctggagtccttttggtaccatgacatggaaaatcccaaaagtcaccttataattgcccaggtggccaaaaatccagtgggtctcattggtgcagagaatgcaacaggtgaaacggacccatcccatagtaagtttttaaaaattttgtcaggcgatccgtactgtgagaaggatgctcaggaagtccactgtgatgaggccaccaagtggaacgtgaatgctcctcccacatttcactctgagatgatgtatgacaatttcaccctggtccctgtctggggaaaggaaggctatctccacgtctgttccaatggcctctgctgttatttactttacgagaggcccaccttatccaaagagctgtatgccctgggggtctttgatgggcttcacacagtacatggcacttactacatccaagtgtgtgccctggtcaggtgtgggggtcttggcttcgacacctgtggacaggaaatcacagaggccacggggatatttgagtttcacctgtggggcaacttcagtacttcctatatctttcctttgtttctgacctcagggatgaccctagaagtccctgaccagcttggctgggagaatgaccactatttcctgaggaaaagtaggctgtcctctgggctggtgacggcggctctctatgggcgcttgtatgagagggactaggaaaagtgtgtggtctgtggggcggactctggccatcatgttgacagccttgcacttccacaggctacaagccctgggaccatctttctgccttaagggcaggagcccacttctgtggcaccagattccaccctgggaactgtggaaaaagtaggagaggcagattccctcagtgtcttcctcttaaacctcaatcatcgagacattagggggtattttctgttcacatttatctttttcaagccacatcttcctctaacaaatctctcagtatgcgattggtctcaagctaaaacaaaaataaatgtcagtttatattttacacatccacaaagcagtggcttggggtttttttttttttttttatcttgttgatcaagtgacacccaggacatgtaaatatttcataagccttaaacatttcctgaggtaagaaacaagctctcaaagcaaaagctcaattagaaatggcccttgtggggaaccttcccattctggtcgaccagaactctagccagatgaaatggcaatgctagcgccac

SEQ ID NO: 9142 - protein, 543 aa, Homo sapiens; identical to SEQ ID NO: 756

SEQ ID NO: 9143 - DNA, 756 bp, Homo sapiens
agattgctgcctatgcaaagcaggtaagaagccgaactctgaggcctctcgccattgtctccgagtcggccagctggagcgttttcggggctgtaaagggagaatggcgcatgcgcatattcagggcggaaggcgcgctaagagcagatttgtggtctgcattatgtctggagccagaagtaagcttgctcttttcctctgcggctgttacgtggttgccctgggagcccacaccggggaggagagcgtggctgaccatcacgaggctgaatattatgtggctgccgtgtatgagcatccatccatcctgagtctgaaccctctggctctcatcagccgccaagaggccttggagctcatgaaccagaaccttgacatctatgaacagcaagtgatgactgcagcccaaaaggatgtacagattatagtgtttccagaagatggcattcatggattcaactttacaagaacatccatttatccatttttggacttcatgccgtctccccaggtggtcaggtggaacccatgcctggagcctcaccgcttcaatgacacagaggtgattcctgcctttttcctcagtaggctgagggtacacagaggtgatctaagtcagggaccagaagctgtgacatgttaactaagattgataggagaccttaacatccccaaaatccaacccaaactcccaaagatccatgtgccacatgttcattccattaaagaatgtctgacgttacaaggcagttattc

SEQ ID NO: 9144 - protein, 179 aa, Homo sapiens
MAHAHIQGGRRAKSRFVVCIMSGARSKLALFLCGCYVVALGAHTGEESVADHHEAEYYVAAVYEHPSILSLNPLALISRQEALELMNQNLDIYEQQVMTAAQKDVQIIVFPEDGIHGFNFTRTSIYPFLDFMPSPQVVRWNPCLEPHRFNDTEVIPAFFLSRLRVHRGDLSQGPEAVTC

SEQ ID NO: 9145 - DNA, 1306 bp, Homo sapiens
agattgctgcctatgcaaagcaggtaagaagccgaactctgaggcctctcgccattgtctccgagtcggccagctggagcgttttcggggctgtaaagggagaatggcgcatgcgcatattcagggcggaaggcgcgctaagagcagatttgtggtctgcattatgtctggagccagaagtaagcttgctcttttcctctgcggctgttacgtggttgccctgggagcccacaccggggaggagagcgtggctgaccatcacgaggctgaatattatgtggctgccgtgtatgagcatccatccatcctgagtctgaaccctctggctctcatcagccgccaagaggccttggagctcatgaaccagaaccttgacatctatgaacagcaagtgatgactgcagcccaaaaggatgtacagattatagtgtttccagaagatggcattcatggattcaactttacaagaacatccatttatccatttttggacttcatgccgtctccccaggtggtcaggtggaacccatgcctggagcctcaccgcttcaatgacacagaggtgattcctgcctttttcctcagtaggctgagggtacacagaggtgatctaagtcagggaccagaagctgtgacatgttaactaagattgataggagaccttaacatccccaaaatccaacccaaactcccaaagatccatgtgccacatgttcattccattaaagaatgtctgacgttacaaggcagttattcatctatggatctttccatttattaattacacaataaatacaggaatgtatacttaaaccaaaccaaaagtaaaaaaagaaaagttcatcttcaccacagcctgcacctcatcccatgcccttgcttagagaaactgccatcaacaatttgatgtgcattcagttgtattcttttctatgcatttcatagttattgacatcctcttttttttttttttttttgagatggagtcttactctgccacccaggctggagcgcagtggcgcgatctcagctcactgcaagctctgccttccgggttcatgccattctcctgcctcagcctcccgagtagctgggactacaggcacccaccaccacgcccggctaattttttttgtgtgtgtatttttagtagagatggggtttcaccatgttagccaggatggtctcgatctcctgaccttgtgatctgtctacctcggcctgccaaagtgctgggattacaggcatgagccactgtgcctggccttgacatcctctttttaagcatactatatgcttattcatt

SEQ ID NO: 9146 - protein, 179 aa, Homo sapiens; identical to SEQ ID NO: 9144

SEQ ID NO: 9147 - DNA, 2227 bp, Homo sapiens
gggagctgggaagcccggcgcgcgtcgtttgctggggctgtttgtgcgttgctgctgtgctaccgcgttgcgttttctaggcatttacttacacgctttgtggtttacgctctcataaccttgtggttttatagtccttaaattattgtagcgcacgttacttaaatccagaagcagatgtgtaccccagcaagagataaaatgacgctcagagtcagtagatccagaccgtgcctgagatcctgaatcctgtttcctacccactattcagccattgggtcacaagcgatgaaaagagcaccttgaagatttgtggtctgcattatgtctggagccagaagtaagcttgctcttttcctctgcggctgttacgtggttgccctgggagcccacaccggggaggagagcgtggctgaccatcacgaggctgaatattatgtggctgccgtgtatgagcatccatccatcctgagtctgaaccctctggctctcatcagccgccaagaggccttggagctcatgaaccagaaccttgacatctatgaacagcaagtgatgactgcagcccaaaaggatgtacagattatagtgtttccagaagatggcattcatggattcaactttacaagaacatccatttatccatttttggacttcatgccgtctccccaggtggtcaggtggaacccatgcctggagcctcaccgcttcaatgacacagaggtgctccagcgcctgagttgtatggccatcaggggagatatgttcttggtggccaatcttgggacaaaggagccttgtcatagcagtgacccaaggtgcccaaaagatgggagataccagttcaacacaaatgtcgtgttcagcaataatggaacccttgttgaccgctaccgtaaacacaacctctactttgaggcagcattcgatgttcctcttaaagtggatctcatcacctttgataccccctttgctggcaggtttggcatcttcacatgctttgatatattgttctttgaccctgccatcagagtcctcagagactacaaggtgaagcatgttgtgtacccaactgcctggatgaaccagctcccactcttggcagcaattgagattcagaaagcttttgctgttgcctttggcatcaacgttctggcagctaatgtccaccacccagttctggggatgacaggaagtggcatacacacccctctggagtccttttggtaccatgacatggaaaatcccaaaagtcaccttataattgcccaggtggccaaaaatccagtgggtctcattggtgcagagaatgcaacaggtgaaacggacccatcccatagtaagtttttaaaaattttgtcaggcgatccgtactgtgagaaggatgctcaggaagtccactgtgatgaggccaccaagtggaacgtgaatgctcctcccacatttcactctgagatgatgtatgacaatttcaccctggtccctgtctggggaaaggaaggctatctccacgtctgttccaatggcctctgctgttatttactttacgagaggcccaccttatccaaagagctgtatgccctgggggtctttgatgggcttcacacagtacatggcacttactacatccaagtgtgtgccctggtcaggtgtgggggtcttggcttcgacacctgtggacaggaaatcacagaggccacggggatatttgagtttcacctgtggggcaacttcagtacttcctatatctttcctttgtttctgacctcagggatgaccctagaagtccctgaccagcttggctgggagaatgaccactatttcctgaggaaaagtaggctgtcctctgggctggtgacggcggctctctatgggcgcttgtatgagagggactaggaaaagtgtgtggtctgtggggcggactctggccatcatgttgacagccttgcacttccacaggctacaagccctgggaccatctttctgccttaagggcaggagcccacttctgtggcaccagattccaccctgggaactgtggaaaaagtaggagaggcagattccctcagtgtcttcctcttaaacctcaatcatcgagacattagggggtattttctgttcacatttatctttttcaagccacatcttcctctaacaaatctctcagtatgcgattggtctcaagctaaaacaaaaataaatgtcagtttatattttacacatccac

SEQ ID NO: 9148 - protein, 523 aa, Homo sapiens
MSGARSKLALFLCGCYVVALGAHTGEESVADHHEAEYYVAAVYEHPSILSLNPLALISRQEALELMNQNLDIYEQQVMTAAQKDVQIIVFPEDGIHGFNFTRTSIYPFLDFMPSPQVVRWNPCLEPHRFNDTEVLQRLSCMAIRGDMFLVANLGTKEPCHSSDPRCPKDGRYQFNTNVVFSNNGTLVDRYRKHNLYFEAAFDVPLKVDLITFDTPFAGRFGIFTCFDILFFDPAIRVLRDYKVKHVVYPTAWMNQLPLLAAIEIQKAFAVAFGINVLAANVHHPVLGMTGSGIHTPLESFWYHDMENPKSHLIIAQVAKNPVGLIGAENATGETDPSHSKFLKILSGDPYCEKDAQEVHCDEATKWNVNAPPTFHSEMMYDNFTLVPVWGKEGYLHVCSNGLCCYLLYERPTLSKELYALGVFDGLHTVHGTYYIQVCALVRCGGLGFDTCGQEITEATGIFEFHLWGNFSTSYIFPLFLTSGMTLEVPDQLGWENDHYFLRKSRLSSGLVTAALYGRLYERD

SEQ ID NO: 9149 - DNA, 2438 bp, Homo sapiens
gggagctgggaagcccggcgcgcgtcgtttgctggggctgtttgtgcgttgctgctgtgctaccgcgttgcgttttctaggcatttacttacacgctttgtggtttacgctctcataaccttgtggttttatagtccttaaattattgtagcgcacgttacttaaatccagaagcagatgtgtaccccagcaagagataaaatgacgctcagagtcagtagatccagaccgtgcctgagatcctgaatcctgtttcctacccactattcagccattgggtcacaagcgatgaaaagagcaccttgaagatttgtggtctgcattatgtctggagccagaagtaagcttgctcttttcctctgcggctgttacgtggttgccctgggagcccacaccggggaggagagcgtggctgaccatcacgaggctgaatattatgtggctgccgtgtatgagcatccatccatcctgagtctgaaccctctggctctcatcagccgccaagaggccttggagctcatgaaccagaaccttgacatctatgaacagcaagtgatgactgcagcccaaaaggatgtacagattatagtgtttccagaagatggcattcatggattcaactttacaagaacatccatttatccatttttggacttcatgccgtctccccaggtggtcaggtggaacccatgcctggagcctcaccgcttcaatgacacagaggtgctccagcgcctgagttgtatggccatcaggggagatatgttcttggtggccaatcttgggacaaaggagccttgtcatagcagtgacccaaggtgcccaaaagatgggagataccagttcaacacaaatgtcgtgttcagcaataatggaacccttgttgaccgctaccgtaaacacaacctctactttgaggcagcattcgatgttcctcttaaagtggatctcatcacctttgataccccctttgctggcaggtttggcatcttcacatgctttgatatattgttctttgaccctgccatcagagtcctcagagactacaaggtgaagcatgttgtgtacccaactgcctggatgaaccagctcccactcttggcagcaattgagattcagaaagcttttgctgttgcctttggcatcaacgttctggcagctaatgtccaccacccagttctggggatgacaggaagtggcatacacacccctctggagtccttttggtaccatgacatggaaaatcccaaaagtcaccttataattgcccaggtggccaaaaatccagtgggtctcattggtgcagagaatgcaacaggtgaaacggacccatcccatagtaagtttttaaaaattttgtcaggcgatccgtactgtgagaaggatgctcaggaagtccactgtgatgaggccaccaagtggaacgtgaatgctcctcccacatttcactctgagatgatgtatgacaatttcaccctggtccctgtctggggaaaggaaggctatctccacgtctgttccaatggcctctgctgttatttactttacgagaggcccaccttatccaaagagctgtatgccctgggggtctttgatgggcttcacacagtacatggcacttactacatccaagtgtgtgccctggtcaggtgtgggggtcttggcttcgacacctgtggacaggaaatcacagaggccacggggatatttgagtttcacctgtggggcaacttcagtacttcctatatctttcctttgtttctgacctcagggatgaccctagaagtccctgaccagcttggctgggagaatgaccactatttcctgaggaaaagtaggctgtcctctgggctggtgacggcggctctctatgggcgcttgtatgagagggactaggaaaagtgtgtggtctgtggggcggactctggccatcatgttgacagccttgcacttccacaggctacaagccctgggaccatctttctgccttaagggcaggagcccacttctgtggcaccagattccaccctgggaactgtggaaaaagtaggagaggcagattccctcagtgtcttcctcttaaacctcaatcatcgagacattagggggtattttctgttcacatttatctttttcaagccacatcttcctctaacaaatctctcagtatgcgattggtctcaagctaaaacaaaaataaatgtcagtttatattttacacatccacaaagcagtggcttggggtttttttttttttttttatcttgttgatcaagtgacacccaggacatgtaaatatttcataagccttaaacatttcctgaggtaagaaacaagctctcaaagcaaaagctcaattagaaatggcccttgtggggaaccttcccattctggtcgaccagaactctagccagatgaaatggcaatgctagcgccac

SEQ ID NO: 9150 - protein, 523 aa, Homo sapiens; identical to SEQ ID NO: 9148

SEQ ID NO: 9151 - DNA, 731 bp, Homo sapiens
cagacagatttccccacgcagacgctgtgtgtcacagggggaatgggcagcgtcactttttacatccagtcatattgtatgaaattgcaacaaattcaaaaagatgccatcgtgggagtgtgatttgtggtctgcattatgtctggagccagaagtaagcttgctcttttcctctgcggctgttacgtggttgccctgggagcccacaccggggaggagagcgtggctgaccatcacgaggctgaatattatgtggctgccgtgtatgagcatccatccatcctgagtctgaaccctctggctctcatcagccgccaagaggccttggagctcatgaaccagaaccttgacatctatgaacagcaagtgatgactgcagcccaaaaggatgtacagattatagtgtttccagaagatggcattcatggattcaactttacaagaacatccatttatccatttttggacttcatgccgtctccccaggtggtcaggtggaacccatgcctggagcctcaccgcttcaatgacacagaggtgattcctgcctttttcctcagtaggctgagggtacacagaggtgatctaagtcagggaccagaagctgtgacatgttaactaagattgataggagaccttaacatccccaaaatccaacccaaactcccaaagatccatgtgccacatgttcattccattaaagaatgtctgacgttacaaggcagttattc

SEQ ID NO: 9152 - protein, 159 aa, Homo sapiens
MSGARSKLALFLCGCYVVALGAHTGEESVADHHEAEYYVAAVYEHPSILSLNPLALISRQEALELMNQNLDIYEQQVMTAAQKDVQIIVFPEDGIHGFNFTRTSIYPFLDFMPSPQVVRWNPCLEPHRFNDTEVIPAFFLSRLRVHRGDLSQGPEAVTC

SEQ ID NO: 9153 - DNA, 1281 bp, Homo sapiens
cagacagatttccccacgcagacgctgtgtgtcacagggggaatgggcagcgtcactttttacatccagtcatattgtatgaaattgcaacaaattcaaaaagatgccatcgtgggagtgtgatttgtggtctgcattatgtctggagccagaagtaagcttgctcttttcctctgcggctgttacgtggttgccctgggagcccacaccggggaggagagcgtggctgaccatcacgaggctgaatattatgtggctgccgtgtatgagcatccatccatcctgagtctgaaccctctggctctcatcagccgccaagaggccttggagctcatgaaccagaaccttgacatctatgaacagcaagtgatgactgcagcccaaaaggatgtacagattatagtgtttccagaagatggcattcatggattcaactttacaagaacatccatttatccatttttggacttcatgccgtctccccaggtggtcaggtggaacccatgcctggagcctcaccgcttcaatgacacagaggtgattcctgcctttttcctcagtaggctgagggtacacagaggtgatctaagtcagggaccagaagctgtgacatgttaactaagattgataggagaccttaacatccccaaaatccaacccaaactcccaaagatccatgtgccacatgttcattccattaaagaatgtctgacgttacaaggcagttattcatctatggatctttccatttattaattacacaataaatacaggaatgtatacttaaaccaaaccaaaagtaaaaaaagaaaagttcatcttcaccacagcctgcacctcatcccatgcccttgcttagagaaactgccatcaacaatttgatgtgcattcagttgtattcttttctatgcatttcatagttattgacatcctcttttttttttttttttttgagatggagtcttactctgccacccaggctggagcgcagtggcgcgatctcagctcactgcaagctctgccttccgggttcatgccattctcctgcctcagcctcccgagtagctgggactacaggcacccaccaccacgcccggctaattttttttgtgtgtgtatttttagtagagatggggtttcaccatgttagccaggatggtctcgatctcctgaccttgtgatctgtctacctcggcctgccaaagtgctgggattacaggcatgagccactgtgcctggccttgacatcctctttttaagcatactatatgcttattcatt

SEQ ID NO: 9154 - protein, 159 aa, Homo sapiens; identical to SEQ ID NO: 9152

SEQ ID NO: 9155 - DNA, 1079 bp, Homo sapiens
caatcttgggacaaaggagccttgtcatagcagtgacccaaggtgcccaaaagatgggagataccagttcaacacaaatgtcgtgttcagcaataatggaacccttgttgaccgctaccgtaaacacaacctctactttgaggcagcattcgatgttcctcttaaagtggatctcatcacctttgataccccctttgctggcaggtttggcatcttcacatgctttgatatattgttctttgaccctgccatcagagtcctcagagactacaaggtgaagcatgttgtgtacccaactgcctggatgaaccagctcccactcttggcagcaattgagattcagaaagcttttgctgttgcctttggcatcaacgttctggcagctaatgtccaccacccagttctggggatgacaggaagtggcatacacacccctctggagtccttttggtaccatgacatggaaaatcccaaaagtcaccttataattgcccaggtggccaaaaatccagtgggtctcattggtgcagagaatgcaacaggtgaaacggaggggatatttgagtttcacctgtggggcaacttcagtacttcctatatctttcctttgtttctgacctcagggatgaccctagaagtccctgaccagcttggctgggagaatgaccactatttcctgaggaaaagtaggctgtcctctgggctggtgacggcggctctctatgggcgcttgtatgagagggactaggaaaagtgtgtggtctgtggggcggactctggccatcatgttgacagccttgcacttccacaggctacaagccctgggaccatctttctgccttaagggcaggagcccacttctgtggcaccagattccaccctgggaactgtggaaaaagtaggagaggcagattccctcagtgtcttcctcttaaacctcaatcatcgagacattagggggtattttctgttcacatttatctttttcaagccacatcttcctctaacaaatctctcagtatgcgattggtctcaagctaaaacaaaaataaatgtcagtttatattttacacatccac

SEQ ID NO: 9156 - protein, 147 aa, Homo sapiens
MNQLPLLAAIEIQKAFAVAFGINVLAANVHHPVLGMTGSGIHTPLESFWYHDMENPKSHLIIAQVAKNPVGLIGAENATGETEGIFEFHLWGNFSTSYIFPLFLTSGMTLEVPDQLGWENDHYFLRKSRLSSGLVTAALYGRLYERD

SEQ ID NO: 9157 - DNA, 1290 bp, Homo sapiens
caatcttgggacaaaggagccttgtcatagcagtgacccaaggtgcccaaaagatgggagataccagttcaacacaaatgtcgtgttcagcaataatggaacccttgttgaccgctaccgtaaacacaacctctactttgaggcagcattcgatgttcctcttaaagtggatctcatcacctttgataccccctttgctggcaggtttggcatcttcacatgctttgatatattgttctttgaccctgccatcagagtcctcagagactacaaggtgaagcatgttgtgtacccaactgcctggatgaaccagctcccactcttggcagcaattgagattcagaaagcttttgctgttgcctttggcatcaacgttctggcagctaatgtccaccacccagttctggggatgacaggaagtggcatacacacccctctggagtccttttggtaccatgacatggaaaatcccaaaagtcaccttataattgcccaggtggccaaaaatccagtgggtctcattggtgcagagaatgcaacaggtgaaacggaggggatatttgagtttcacctgtggggcaacttcagtacttcctatatctttcctttgtttctgacctcagggatgaccctagaagtccctgaccagcttggctgggagaatgaccactatttcctgaggaaaagtaggctgtcctctgggctggtgacggcggctctctatgggcgcttgtatgagagggactaggaaaagtgtgtggtctgtggggcggactctggccatcatgttgacagccttgcacttccacaggctacaagccctgggaccatctttctgccttaagggcaggagcccacttctgtggcaccagattccaccctgggaactgtggaaaaagtaggagaggcagattccctcagtgtcttcctcttaaacctcaatcatcgagacattagggggtattttctgttcacatttatctttttcaagccacatcttcctctaacaaatctctcagtatgcgattggtctcaagctaaaacaaaaataaatgtcagtttatattttacacatccacaaagcagtggcttggggtttttttttttttttttatcttgttgatcaagtgacacccaggacatgtaaatatttcataagccttaaacatttcctgaggtaagaaacaagctctcaaagcaaaagctcaattagaaatggcccttgtggggaaccttcccattctggtcgaccagaactctagccagatgaaatggcaatgctagcgccac

SEQ ID NO: 9158 - protein, 147 aa, Homo sapiens; identical to SEQ ID NO: 9156

SEQ ID NO: 9159 - DNA, 1018 bp, Homo sapiens
ataccagttcaacacaaatgtcgtgttcagcaataatggaacccttgttgaccgctaccgtaaacacaacctctactttgaggcagcattcgatgttcctcttaaagtggatctcatcacctttgataccccctttgctggcaggtttggcatcttcacatgctttgatatattgttctttgaccctgccatcagagtcctcagagactacaaggtgaagcatgttgtgtacccaactgcctggatgaaccagctcccactcttggcagcaattgagattcagaaagcttttgctgttgcctttggcatcaacgttctggcagctaatgtccaccacccagttctggggatgacaggaagtggcatacacacccctctggagtccttttggtaccatgacatggaaaatcccaaaagtcaccttataattgcccaggtggccaaaaatccagtgggtctcattggtgcagagaatgcaacaggtgaaacggacccatcccatagtaagtttttaaaaattttgtcagtacttcctatatctttcctttgtttctgacctcagggatgaccctagaagtccctgaccagcttggctgggagaatgaccactatttcctgaggaaaagtaggctgtcctctgggctggtgacggcggctctctatgggcgcttgtatgagagggactaggaaaagtgtgtggtctgtggggcggactctggccatcatgttgacagccttgcacttccacaggctacaagccctgggaccatctttctgccttaagggcaggagcccacttctgtggcaccagattccaccctgggaactgtggaaaaagtaggagaggcagattccctcagtgtcttcctcttaaacctcaatcatcgagacattagggggtattttctgttcacatttatctttttcaagccacatcttcctctaacaaatctctcagtatgcgattggtctcaagctaaaacaaaaataaatgtcagtttatattttacacatccac

SEQ ID NO: 9160 - protein, 103 aa, Homo sapiens
MNQLPLLAAIEIQKAFAVAFGINVLAANVHHPVLGMTGSGIHTPLESFWYHDMENPKSHLIIAQVAKNPVGLIGAENATGETDPSHSKFLKILSVLPISFLCF

SEQ ID NO: 9161 - DNA, 1229 bp, Homo sapiens
ataccagttcaacacaaatgtcgtgttcagcaataatggaacccttgttgaccgctaccgtaaacacaacctctactttgaggcagcattcgatgttcctcttaaagtggatctcatcacctttgataccccctttgctggcaggtttggcatcttcacatgctttgatatattgttctttgaccctgccatcagagtcctcagagactacaaggtgaagcatgttgtgtacccaactgcctggatgaaccagctcccactcttggcagcaattgagattcagaaagcttttgctgttgcctttggcatcaacgttctggcagctaatgtccaccacccagttctggggatgacaggaagtggcatacacacccctctggagtccttttggtaccatgacatggaaaatcccaaaagtcaccttataattgcccaggtggccaaaaatccagtgggtctcattggtgcagagaatgcaacaggtgaaacggacccatcccatagtaagtttttaaaaattttgtcagtacttcctatatctttcctttgtttctgacctcagggatgaccctagaagtccctgaccagcttggctgggagaatgaccactatttcctgaggaaaagtaggctgtcctctgggctggtgacggcggctctctatgggcgcttgtatgagagggactaggaaaagtgtgtggtctgtggggcggactctggccatcatgttgacagccttgcacttccacaggctacaagccctgggaccatctttctgccttaagggcaggagcccacttctgtggcaccagattccaccctgggaactgtggaaaaagtaggagaggcagattccctcagtgtcttcctcttaaacctcaatcatcgagacattagggggtattttctgttcacatttatctttttcaagccacatcttcctctaacaaatctctcagtatgcgattggtctcaagctaaaacaaaaataaatgtcagtttatattttacacatccacaaagcagtggcttggggtttttttttttttttttatcttgttgatcaagtgacacccaggacatgtaaatatttcataagccttaaacatttcctgaggtaagaaacaagctctcaaagcaaaagctcaattagaaatggcccttgtggggaaccttcccattctggtcgaccagaactctagccagatgaaatggcaatgctagcgccac

SEQ ID NO: 9162 - protein, 103 aa, Homo sapiens; identical to SEQ ID NO: 9160

SEQ ID NO: 9163 - DNA, 993 bp, Homo sapiens
gttcctcttaaagtggatctcatcacctttgataccccctttgctggcaggtttggcatcttcacatgctttgatatattgttctttgaccctgccatcagagtcctcagagactacaaggtgaagcatgttgtgtacccaactgcctggatgaaccagctcccactcttggcagcaattgagattcagaaagcttttgctgttgcctttggcatcaacgttctggcagctaatgtccaccacccagttctggggatgacaggaagtggcatacacacccctctggagtccttttggtaccatgacatggaaaatcccaaaagtcaccttataattgcccaggtggccaaaaatccagtgggtctcattggtgcagagaatgcaacaggtgaaacggacccatcccatagtaagtttttaaaaattttgtcaggcgatccgtactgtgagaaggatgctcaggaagtccactgtgatgaggccaccaagtggaacgtgaatgctcctcccacatttcactctgagatgatgtatgacaatttcaccctgaagtccctgaccagcttggctgggagaatgaccactatttcctgaggaaaagtaggctgtcctctgggctggtgacggcggctctctatgggcgcttgtatgagagggactaggaaaagtgtgtggtctgtggggcggactctggccatcatgttgacagccttgcacttccacaggctacaagccctgggaccatctttctgccttaagggcaggagcccacttctgtggcaccagattccaccctgggaactgtggaaaaagtaggagaggcagattccctcagtgtcttcctcttaaacctcaatcatcgagacattagggggtattttctgttcacatttatctttttcaagccacatcttcctctaacaaatctctcagtatgcgattggtctcaagctaaaacaaaaataaatgtcagtttatattttacacatccac

SEQ ID NO: 9164 - protein, 147 aa, Homo sapiens
MNQLPLLAAIEIQKAFAVAFGINVLAANVHHPVLGMTGSGIHTPLESFWYHDMENPKSHLIIAQVAKNPVGLIGAENATGETDPSHSKFLKILSGDPYCEKDAQEVHCDEATKWNVNAPPTFHSEMMYDNFTLKSLTSLAGRMTTIS

SEQ ID NO: 9165 - DNA, 1204 bp, Homo sapiens
gttcctcttaaagtggatctcatcacctttgataccccctttgctggcaggtttggcatcttcacatgctttgatatattgttctttgaccctgccatcagagtcctcagagactacaaggtgaagcatgttgtgtacccaactgcctggatgaaccagctcccactcttggcagcaattgagattcagaaagcttttgctgttgcctttggcatcaacgttctggcagctaatgtccaccacccagttctggggatgacaggaagtggcatacacacccctctggagtccttttggtaccatgacatggaaaatcccaaaagtcaccttataattgcccaggtggccaaaaatccagtgggtctcattggtgcagagaatgcaacaggtgaaacggacccatcccatagtaagtttttaaaaattttgtcaggcgatccgtactgtgagaaggatgctcaggaagtccactgtgatgaggccaccaagtggaacgtgaatgctcctcccacatttcactctgagatgatgtatgacaatttcaccctgaagtccctgaccagcttggctgggagaatgaccactatttcctgaggaaaagtaggctgtcctctgggctggtgacggcggctctctatgggcgcttgtatgagagggactaggaaaagtgtgtggtctgtggggcggactctggccatcatgttgacagccttgcacttccacaggctacaagccctgggaccatctttctgccttaagggcaggagcccacttctgtggcaccagattccaccctgggaactgtggaaaaagtaggagaggcagattccctcagtgtcttcctcttaaacctcaatcatcgagacattagggggtattttctgttcacatttatctttttcaagccacatcttcctctaacaaatctctcagtatgcgattggtctcaagctaaaacaaaaataaatgtcagtttatattttacacatccacaaagcagtggcttggggtttttttttttttttttatcttgttgatcaagtgacacccaggacatgtaaatatttcataagccttaaacatttcctgaggtaagaaacaagctctcaaagcaaaagctcaattagaaatggcccttgtggggaaccttcccattctggtcgaccagaactctagccagatgaaatggcaatgctagcgccac

SEQ ID NO: 9166 - protein, 147 aa, Homo sapiens; identical to SEQ ID NO: 9164

SEQ ID NO: 9167 - DNA, 1337 bp, Homo sapiens
gctcccaataaggatgtggctgattgcctggctctcattttggccaccatgatgcctgtctcatcaagtagtcctttatcatccttaacattcaatgccattaaccgttataccaacacctcaaaaacagtcagctttgaagctttgcccatcatgaggaatgaacctagctcctattgcagtttcaataacattggaggggaacaggagtacttatacactgacgtggatgagctcaacgactccgattctgagacctactgagaggctgaggaggagggagttctcacagtaaagcttcaaactgtgctttttcaggaaaaaggcactttgatattcacgtagaaattcaacctaagaggaaagatcccacagtgagccaatgttaagagatctgatggcattaggaggaagagttttaaaggcaagttttacaaaaggaacttctagaatcttgaaatagacctgactgaggaaaacacattgatgtcagaattctttgtggaattgtttaatttggttttgcagtgccaggaacaattggggacactgtgcactctaacctgcttacacaagcaacactattgtaacagaagaaataaagacactagatttaaattttatcaataaaattacaactaaatttaaaggcaataaaagtttggtacagtaggcattatgtgcacagcaaattgcaaaaggaccaaataactgaaaggtttttttaataaaatgccattttgtggaaactggagtagattaaatgaaacattacctaaaccaaactgcaatatttctggaaatgaagctgagatttggttttaaatgttgagtttttttgggttttgttttttttttaagaaaacatctgaaagccttccaatgctgtattaaaccatgagagaaagcagatgtatttttacatttttttcttttacagaactatttcaaatttccaatttttatactattagaattaaaaaccagctgactgggtgcaatacgggtgaaaatacttgtgacatagacattcaaatgacctcctttaacaagacactcatctcaaacaatgccatttagttcaggagatctctaagtgtagctgtaaattttggggttaatttggcttatattggaccttttaaaagaaataaagttttttaatgcaataaatcaagtgtctgtctcttttacatgcaaacttcttttcccttaaactgtctagcattgaattgacaagttttttttccttttctaataaaaaaatgactttttagcaaagttgttttagacttaaatgaacctatctatatgggattttcaaatatatttattca

SEQ ID NO: 9168 - protein, 60 aa, Homo sapiens
MRESRCIFTFFSFTELFQISNFYTIRIKNQLTGCNTGENTCDIDIQMTSFNKTLISNNAI

SEQ ID NO: 9169 - DNA, 4530 bp, Homo sapiens
gtgacctataattataaaaatgataaatggatttttttaaacatgtgactattggaataggtttcattagtcatagaagcaattttaatagttttacaactgtcaaaactcatttctaaaatgatcacaactaaaagccatattatttaaaatgcttttgaactgaaattttattataacattgacaataatgtatttttttccttaatccacctacctaattttctgaaggaaagtagtactattttgtgtattctgtggaaatcaactgtaataatatgttacttgaaactaacaataaatgaggtaagaagctttatgtgtgtctgtaagccaataaggtttcttaaagaatcaaaatttttaataatgtgagcagccaacctccagatagactgacagagatcttacatcagtgtctctcattgtcccttgctattccattttgaggtttagtaaagataaaaatcttagaatattgttgcccgttctgggattagtcagatcccttgaaggtccaaaaattagtcatgatgcttgtaagctgttttcaaagcctattagaatttatgctactgcagtttacagtttttaatgtatagtctgtatctttaccagcctcattccttaacaacggaggaatgcaatttcaatggtaaaatgtttttaaacattgaaaagaaaagtaacaaaaggattgggtgaaggtagggacctgtcgatgggacctatggctgagcttgatgccgagctacacgttgacaaggtgtgacagtgcactgcacagaggttctgctctccctgcccccatctttgttattaggactaggtttctcgagtttgtacctcttggtcttcacaagttgacaaaaatgctctttgacagccaggtgtgtatgtgtatgtgcatgcacatgcacatatgtgtacatgtatcatgttttttcccctagacctctgcatgttgctgcccgaaatgggctaacaatggtggttcaggaacttttgggaaaaggagcaagtgtgcttgcagtagatgaaaatggctataccccagctttggcctgtgctcccaataaggatgtggctgattgcctggctctcattttggccaccatgatgcctgtctcatcaagtagtcctttatcatccttaacattcaatgccattaaccgttataccaacacctcaaaaacagtcagctttgaagctttgcccatcatgaggaatgaacctagctcctattgcagtttcaataacattggaggggaacaggagtacttatacactgacgtggatgagctcaacgactccgattctgagacctactgagaggctgaggaggagggagttctcacagtaaagcttcaaactgtgctttttcaggaaaaaggcactttgatattcacgtagaaattcaacctaagaggaaagatcccacagtgagccaatgttaagagatctgatggcattaggaggaagagttttaaaggcaagttttacaaaaggaacttctagaatcttgaaatagacctgactgaggaaaacacattgatgtcagaattctttgtggaattgtttaatttggttttgcagtgccaggaacaattggggacactgtgcactctaacctgcttacacaagcaacactattgtaacagaagaaataaagacactagatttaaattttatcaataaaattacaactaaatttaaaggcaataaaagtttggtacagtaggcattatgtgcacagcaaattgcaaaaggaccaaataactgaaaggtttttttaataaaatgccattttgtggaaactggagtagattaaatgaaacattacctaaaccaaactgcaatatttctggaaatgaagctgagatttggttttaaatgttgagtttttttgggttttgttttttttttaagaaaacatctgaaagccttccaatgctgtattaaaccatgagagaaagcagatgtatttttacatttttttcttttacagaactatttcaaatttccaatttttatactattagaattaaaaaccagctgactgggtgcaatacgggtgaaaatacttgtgacatagacattgagatggattggggtcaggctgttgccctgttttgaatggtttgggtttaaaatagtactatttttgtttgaaaatgtaaagaatttcctagaaaaaaattcatgaaatcaaaaagtagactatttcaccctattgcagctaagtggtcctggggcatggagtcttcaacctctctatgaatggcacaccttagtcacttatgttacttttgtgtccccaccatgggttgggggattttttgtttattctgatctatgagttttgaaaaagtgaataatcaaaaggaaaataattccttgttgttcataaattaagcatcactaaagtctcttgaaaggcatttctgtattgggcaagatttaaaatactaaagccttaggtcctattcatatttaaagtagcatgtttgtaacctgttactatttggagagagaagcagttgcctgccaaattgaagactacctttcaaatagcaaaagagagagagaaggctgatatttcggcttttaaataaagatttgtgtggttctgcttttactgtaactgtcactttcccagtgaaaatgatttcatatacattgagggtcttacaggtatgggtaaagttctataaattgcaacaaaatgatacccaatttcattttatcctttttgtattgtgaaactggaaactttatgacattgtaaattatcagctggtttttctgaatataaagtgtgaaaacacagaacagtattttgatctatttgataattttgtgggttttttgaagaattaatgagcatgtacatagaaatagtgactgcttgaatactgtatttacttgcactctttcagtacatcaagattcctgtatattttagagtataataaaacacagatgtgagttgtatttaatgaataatgtatttgtatctgtgcatattatctacaaatctataaagtttctagggcattgactactagattttaagcattttttctaaaatatttacagaaattataaatctaatcccccatcttttctttataatataaagaagtcataatgaacccttcctaattattagtagtaggaaggtgaatatgcattttaatgacagtggactacattttctattgtaccttttgaaaaaaaaaaaaatcaagcagattctaaaagtatacatatgtgtgctttctctttccttttaggaattctcttctgaattccctgagggaattttctagaatctcagaattgaaagagacctgaggttcatccagtctctaacctcttaacaaatgcaggagtcccttctacaagggtgatctttccaccttgaacacttccaagtgactctacctcaccaagcagtccattcagttgttgagcagctctaactgttagaaaggtcttccttagatggagttgaagcctccctcccggtaacttctgtctttgggcctgggtctgtcctccaagagaaccctgagaatgttggaaggatgaatctcgcacattctgccatgtcttctcttttacaggctgtttgacttctctgctgaagtgatttccagaaggactcatttgacacactattagatttaccacatctaatgaaatccaaggtgtagctataaagtgacaagctgtttttaatttatcacatacaccagaacttctatcctgcatcacttatatgtaaatgatgctgttaccaaaaacattaaggtagttcttgcgaatgccaccccactaagaaaactatttcattacttttgtaatccatctgtgagagtctgccccccagcttaaccacttcctttggtctgcacccaatgaagggaaaccccaaagtactgtctcaaatggtatttgaactacgccagtattgttggaataagtacattaattacttgaatgaatgaacacagcaccgtagaaatttcctttatggttacaccttgtatgtctaaagcattcaggccctgttctgtagtgtttcttatcctcacacagagtagaaaagcctgtttgctttatttaacttatacataaaagatgacatctgaaatatctgatgtgtattataataccagcttctgctctagaactactttgggtgaaatggtggtaatagcaaatgacctcctttaacaagacactcatctcaaacaatgccatttagttcaggagatctctaagtgtagctgtaaattttggggttaatttggcttatattggaccttttaaaagaaataaagttttttaatgcaataaatcaagtgtctgtctcttttacatgcaaacttcttttcccttaaactgtctagcattgaattgacaagttttttttccttttctaataaaaaaatgactttttagcaaagttgttttagacttaaatgaacctatctatatgggattttcaaatatatttattca

SEQ ID NO: 9170 - protein, 133 aa, Homo sapiens
MYHVFSPRPLHVAARNGLTMVVQELLGKGASVLAVDENGYTPALACAPNKDVADCLALILATMMPVSSSSPLSSLTFNAINRYTNTSKTVSFEALPIMRNEPSSYCSFNNIGGEQEYLYTDVDELNDSDSETY

SEQ ID NO: 9171 - DNA, 6242 bp, Homo sapiens
gactgtgtcttcacaacgttagacctctcttcagctgcattgctggctgcctagagccctagactaatgtaagagctagagttaatgccaaagacagcaaatggttgacacctttacacagagcagttgcatcttgtagtgaggaagcagttcaggtacttttgaagcattctgcagatgttaatgctcgagacaaaaattggcaaacccctttacatatagctgctgctaataaagctgtaaagtgtgctgaagctttggtacctcttctgagtaatgtaaacgtatctgatcgagcagggaggactgcattacatcatgcagctttcagtggacatggtgagatggtcaaactactcttgtctagaggtgccaatattaatgcttttgacaagaaagataggcgtgctatccattgggcagcatatatgggtcacattgaagtagtgaaattgcttgtgtcgcatggagctgaagtgacatgcaaggataaaaagtcttatacacctcttcatgcagcagcctctagtggaatgatcagcgtagtcaagtaccttctagatcttggagttgatatgaatgaaccaaatgcctatggaaatacacctcttcatgtagcctgctataatggacaagatgttgtagtgaatgaacttatagactgtggtgctattgtgaatcaaaagaatgaaaaaggatttactcctttgcactttgctgctgcatcaacacatggagcattgtgtttagagcttctagttggcaatggggccgatgtcaatatgaagagtaaagatgggaaaaccccactacacatgactgctctccacggtagattctcccgatcacaaaccattatccagagtggagctgtaatcgactgtgaggataagaatggaaatacccctttgcacatagcagcacggtatggccatgagctgctgatcaacactcttattacaagtggtgctgacactgcaaagcgtggcatacatggaatgttccccctccatttggcagccttaagcggcttttcagattgctgcagaaaacttctttcttcaggatttgatatagataccccagatgattttggcaggacttgtctacatgcagctgcagctggagggaatttggagtgcctaaaccttctgctgaatactggtgcagactttaataaaaaggacaaatttgggagatctccactgcactacgctgctgccaactgcaattaccagtgcctgtttgctcttgtgggatcaggagcaagtgtgaatgaccttgatgaaagaggctgcacacccctgcactatgcagctacatcagacacagatggcaagtgcctggaatacttattaagaaacgatgcaaatccagggatccgtgataagcaaggatacaacgcagttcattattcagctgcttatggtcaccgtctatgtcttcagctgattgcaagtgaaactcctctagatgttttaatggaaacctcaggaacagacatgctgagtgattcagataatagagcaacaataagccctttacacttggctgcctatcatggtcaccatcaagcactggaagtgttggtacagtctttgttagatcttgatgtcagaaatagtagtggaagaacacccctagatcttgcagcttttaagggccatgttgaatgtgtggatgtactcattaatcagggagcctcaatcttagtaaaagattacattttgaagaggacacctattcatgcagcagcaacaaatggtcattcagaatgcttacggctattaataggaaatgcagaaccacagaatgcagtggatattcaagatggaaatggacagacgcctctgatgctatctgttctcaacgggcacacagactgtgtttactcattgctgaacaaaggagcaaatgtagatgccaaagataagtggggaaggacagcgttgcatagaggggcagttacaggccatgaagaatgtgtagatgcattacttcaacatggtgctaagtgcttacttcgggatagcaggggccggacgcctatacacctgtctgctgcctgtggacacattggtgttcttggagcccttttgcagtcagcagcatctatggatgcaaatccagccacagcagacaatcatggatatacggcacttcactgggcttgctacaatggtcacgagacatgtgtagaactgcttttagaacaggaagttttccagaaaacggaaggaaatgcttttagtccattgcattgtgccgtgataaatgacaacgaaggtgctgctgagatgttaattgatacattaggtgccagcattgtgaacgccacagattcaaaaggaagaactcctctccatgcagccgccttcacagaccatgtagagtgtttacagctgctgctcagccataatgctcaagtcaattctgtggactctacagggaaaacacctcttatgatggctgcagaaaatggacaaacaaatacagttgagatgctggttagcagtgctagtgcagaactgactttacaagataacagtaaaaatactgccctccatttggcttgtagcaagggtcatgaaactagtgccttgttaatactggaaaagataacagatagaaacctcatcaatgcaaccaacgcagccttgcaaacacctctgcatgttgctgcccgaaatgggctaacaatggtggttcaggaacttttgggaaaaggagcaagtgtgcttgcagtagatgaaaatggctataccccagctttggcctgtgctcccaataaggatgtggctgattgcctggctctcattttggccaccatgatgcctgtctcatcaagtagtcctttatcatccttaacattcaatgccattaaccgttataccaacacctcaaaaacagtcagctttgaagctttgcccatcatgaggaatgaacctagctcctattgcagtttcaataacattggaggggaacaggagtacttatacactgacgtggatgagctcaacgactccgattctgagacctactgagaggctgaggaggagggagttctcacagtaaagcttcaaactgtgctttttcaggaaaaaggcactttgatattcacgtagaaattcaacctaagaggaaagatcccacagtgagccaatgttaagagatctgatggcattaggaggaagagttttaaaggcaagttttacaaaaggaacttctagaatcttgaaatagacctgactgaggaaaacacattgatgtcagaattctttgtggaattgtttaatttggttttgcagtgccaggaacaattggggacactgtgcactctaacctgcttacacaagcaacactattgtaacagaagaaataaagacactagatttaaattttatcaataaaattacaactaaatttaaaggcaataaaagtttggtacagtaggcattatgtgcacagcaaattgcaaaaggaccaaataactgaaaggtttttttaataaaatgccattttgtggaaactggagtagattaaatgaaacattacctaaaccaaactgcaatatttctggaaatgaagctgagatttggttttaaatgttgagtttttttgggttttgttttttttttaagaaaacatctgaaagccttccaatgctgtattaaaccatgagagaaagcagatgtatttttacatttttttcttttacagaactatttcaaatttccaatttttatactattagaattaaaaaccagctgactgggtgcaatacgggtgaaaatacttgtgacatagacattgagatggattggggtcaggctgttgccctgttttgaatggtttgggtttaaaatagtactatttttgtttgaaaatgtaaagaatttcctagaaaaaaattcatgaaatcaaaaagtagactatttcaccctattgcagctaagtggtcctggggcatggagtcttcaacctctctatgaatggcacaccttagtcacttatgttacttttgtgtccccaccatgggttgggggattttttgtttattctgatctatgagttttgaaaaagtgaataatcaaaaggaaaataattccttgttgttcataaattaagcatcactaaagtctcttgaaaggcatttctgtattgggcaagatttaaaatactaaagccttaggtcctattcatatttaaagtagcatgtttgtaacctgttactatttggagagagaagcagttgcctgccaaattgaagactacctttcaaatagcaaaagagagagagaaggctgatatttcggcttttaaataaagatttgtgtggttctgcttttactgtaactgtcactttcccagtgaaaatgatttcatatacattgagggtcttacaggtatgggtaaagttctataaattgcaacaaaatgatacccaatttcattttatcctttttgtattgtgaaactggaaactttatgacattgtaaattatcagctggtttttctgaatataaagtgtgaaaacacagaacagtattttgatctatttgataattttgtgggttttttgaagaattaatgagcatgtacatagaaatagtgactgcttgaatactgtatttacttgcactctttcagtacatcaagattcctgtatattttagagtataataaaacacagatgtgagttgtatttaatgaataatgtatttgtatctgtgcatattatctacaaatctataaagtttctagggcattgactactagattttaagcattttttctaaaatatttacagaaattataaatctaatcccccatcttttctttataatataaagaagtcataatgaacccttcctaattattagtagtaggaaggtgaatatgcattttaatgacagtggactacattttctattgtaccttttgaaaaaaaaaaaaatcaagcagattctaaaagtatacatatgtgtgctttctctttccttttaggaattctcttctgaattccctgagggaattttctagaatctcagaattgaaagagacctgaggttcatccagtctctaacctcttaacaaatgcaggagtcccttctacaagggtgatctttccaccttgaacacttccaagtgactctacctcaccaagcagtccattcagttgttgagcagctctaactgttagaaaggtcttccttagatggagttgaagcctccctcccggtaacttctgtctttgggcctgggtctgtcctccaagagaaccctgagaatgttggaaggatgaatctcgcacattctgccatgtcttctcttttacaggctgtttgacttctctgctgaagtgatttccagaaggactcatttgacacactattagatttaccacatctaatgaaatccaaggtgtagctataaagtgacaagctgtttttaatttatcacatacaccagaacttctatcctgcatcacttatatgtaaatgatgctgttaccaaaaacattaaggtagttcttgcgaatgccaccccactaagaaaactatttcattacttttgtaatccatctgtgagagtctgccccccagcttaaccacttcctttggtctgcacccaatgaagggaaaccccaaagtactgtctcaaatggtatttgaactacgccagtattgttggaataagtacattaattacttgaatgaatgaacacagcaccgtagaaatttcctttatggttacaccttgtatgtctaaagcattcaggccctgttctgtagtgtttcttatcctcacacagagtagaaaagcctgtttgctttatttaacttatacataaaagatgacatctgaaatatctgatgtgtattataataccagcttctgctctagaactactttgggtgaaatggtggtaatagcaaatgacctcctttaacaagacactcatctcaaacaatgccatttagttcaggagatctctaagtgtagctgtaaattttggggttaatttggcttatattggaccttttaaaagaaataaagttttttaatgcaataaatcaagtgtctgtctcttttacatgcaaacttcttttcccttaaactgtctagcattgaattgacaagttttttttccttttctaataaaaaaatgactttttagcaaagttgttttagacttaaatgaacctatctatatgggattttcaaatatatttattca

SEQ ID NO: 9172 - protein, 899 aa, Homo sapiens
MVKLLLSRGANINAFDKKDRRAIHWAAYMGHIEVVKLLVSHGAEVTCKDKKSYTPLHAAASSGMISVVKYLLDLGVDMNEPNAYGNTPLHVACYNGQDVVVNELIDCGAIVNQKNEKGFTPLHFAAASTHGALCLELLVGNGADVNMKSKDGKTPLHMTALHGRFSRSQTIIQSGAVIDCEDKNGNTPLHIAARYGHELLINTLITSGADTAKRGIHGMFPLHLAALSGFSDCCRKLLSSGFDIDTPDDFGRTCLHAAAAGGNLECLNLLLNTGADFNKKDKFGRSPLHYAAANCNYQCLFALVGSGASVNDLDERGCTPLHYAATSDTDGKCLEYLLRNDANPGIRDKQGYNAVHYSAAYGHRLCLQLIASETPLDVLMETSGTDMLSDSDNRATISPLHLAAYHGHHQALEVLVQSLLDLDVRNSSGRTPLDLAAFKGHVECVDVLINQGASILVKDYILKRTPIHAAATNGHSECLRLLIGNAEPQNAVDIQDGNGQTPLMLSVLNGHTDCVYSLLNKGANVDAKDKWGRTALHRGAVTGHEECVDALLQHGAKCLLRDSRGRTPIHLSAACGHIGVLGALLQSAASMDANPATADNHGYTALHWACYNGHETCVELLLEQEVFQKTEGNAFSPLHCAVINDNEGAAEMLIDTLGASIVNATDSKGRTPLHAAAFTDHVECLQLLLSHNAQVNSVDSTGKTPLMMAAENGQTNTVEMLVSSASAELTLQDNSKNTALHLACSKGHETSALLILEKITDRNLINATNAALQTPLHVAARNGLTMVVQELLGKGASVLAVDENGYTPALACAPNKDVADCLALILATMMPVSSSSPLSSLTFNAINRYTNTSKTVSFEALPIMRNEPSSYCSFNNIGGEQEYLYTDVDELNDSDSETY

SEQ ID NO: 9173 - DNA, 4920 bp, Homo sapiens
ccgcgggggctgccagggtatttcgggaagggggcgtgaggaggcggcggcggcagcggcgggtagggcaggcagcagagggaaggagaaagaaaggaaggaagagggcggggagtcctcagaggaggaggcgggaccggccgggcacctcacctctcggcggcggcggcggcggcggcggcggcgggcggccggggaggcggcgccgccccctgcccgcaggtcttctcagcgcagtcggccgcggacccgctggtcccgggcagcggccaaggctactggggcgggagcagtgggccggtcggcggcggcagcggcagcggcggaggaggaggaggctggagtgggcgcggaggcgaccgccatggcgttcctcaaactccgtgaccagccatcactggtgcaagctatatttaacggagatcctgatgaagttcgagcactaatatttaagaaagaagatgttaactttcaggacaatgaaaagcgaaccccattgcacgccgcagcttaccttggagatgcagaaatcattgaacttcttattttatctggagctagagttaatgccaaagacagcaaatggttgacacctttacacagagcagttgcatcttgtagtgaggaagcagttcaggtacttttgaagcattctgcagatgttaatgctcgagacaaaaattggcaaacccctttacatatagctgctgctaataaagctgtaaagtgtgctgaagctttggtacctcttctgagtaatgtaaacgtatctgatcgagcagggaggactgcattacatcatgcagctttcagtggacatggtgagatggtcaaactactcttgtctagaggtgccaatattaatgcttttgacaagaaagataggcgtgctatccattgggcagcatatatgggtcacattgaagtagtgaaattgcttgtgtcgcatggagctgaagtgacatgcaaggataaaaagtcttatacacctcttcatgcagcagcctctagtggaatgatcagcgtagtcaagtaccttctagatcttggagttgatatgaatgaaccaaatgcctatggaaatacacctcttcatgtagcctgctataatggacaagatgttgtagtgaatgaacttatagactgtggtgctattgtgaatcaaaagaatgaaaaaggatttactcctttgcactttgctgctgcatcaacacatggagcattgtgtttagagcttctagttggcaatggggccgatgtcaatatgaagagtaaagatgggaaaaccccactacacatgactgctctccacggtagattctcccgatcacaaaccattatccagagtggagctgtaatcgactgtgaggataagaatggaaatacccctttgcacatagcagcacggtatggccatgagctgctgatcaacactcttattacaagtggtgctgacactgcaaagcgtggcatacatggaatgttccccctccatttggcagccttaagcggcttttcagattgctgcagaaaacttctttcttcaggatttgatatagataccccagatgattttggcaggacttgtctacatgcagctgcagctggagggaatttggagtgcctaaaccttctgctgaatactggtgcagactttaataaaaaggacaaatttgggagatctccactgcactacgctgctgccaactgcaattaccagtgcctgtttgctcttgtgggatcaggagcaagtgtgaatgaccttgatgaaagaggctgcacacccctgcactatgcagctacatcagacacagatggcaagtgcctggaatacttattaagaaacgatgcaaatccagggatccgtgataagcaaggatacaacgcagttcattattcagctgcttatggtcaccgtctatgtcttcagctgattgcaagtgaaactcctctagatgttttaatggaaacctcaggaacagacatgctgagtgattcagataatagagcaacaataagccctttacacttggctgcctatcatggtcaccatcaagcactggaagtgttggtacagtctttgttagatcttgatgtcagaaatagtagtggaagaacacccctagatcttgcagcttttaagggccatgttgaatgtgtggatgtactcattaatcagggagcctcaatcttagtaaaagattacattttgaagaggacacctattcatgcagcagcaacaaatggtcattcagaatgcttacggctattaataggaaatgcagaaccacagaatgcagtggatattcaagatggaaatggacagacgcctctgatgctatctgttctcaacgggcacacagactgtgtttactcattgctgaacaaaggagcaaatgtagatgccaaagataagtggggaaggacagcgttgcatagaggggcagttacaggccatgaagaatgtgtagatgcattacttcaacatggtgctaagtgcttacttcgggatagcaggggccggacgcctatacacctgtctgctgcctgtggacacattggtgttcttggagcccttttgcagtcagcagcatctatggatgcaaatccagccacagcagacaatcatggatatacggcacttcactgggcttgctacaatggtcacgagacatgtgtagaactgcttttagaacaggaagttttccagaaaacggaaggaaatgcttttagtccattgcattgtgccgtgataaatgacaacgaaggtgctgctgagatgttaattgatacattaggtgccagcattgtgaacgccacagattcaaaaggaagaactcctctccatgcagccgccttcacagaccatgtagagtgtttacagctgctgctcagccataatgctcaagtcaattctgtggactctacagggaaaacacctcttatgatggctgcagaaaatggacaaacaaatacagttgagatgctggttagcagtgctagtgcagaactgactttacaagataacagtaaaaatactgccctccatttggcttgtagcaagggtcatgaaactagtgccttgttaatactggaaaagataacagatagaaacctcatcaatgcaaccaacgcagccttgcaaacacctctgcatgttgctgcccgaaatgggctaacaatggtggttcaggaacttttgggaaaaggagcaagtgtgcttgcagtagatgaaaatggctataccccagctttggcctgtgctcccaataaggatgtggctgattgcctggctctcattttggccaccatgatgcctgtctcatcaagtagtcctttatcatccttaacattcaatgccattaaccgttataccaacacctcaaaaacagtcagctttgaagctttgcccatcatgaggaatgaacctagctcctattgcagtttcaataacattggaggggaacaggagtacttatacactgacgtggatgagctcaacgactccgattctgagacctactgagaggctgaggaggagggagttctcacagtaaagcttcaaactgtgctttttcaggaaaaaggcactttgatattcacgtagaaattcaacctaagaggaaagatcccacagtgagccaatgttaagagatctgatggcattaggaggaagagttttaaaggaattctcttctgaattccctgagggaattttctagaatctcagaattgaaagagacctgaggttcatccagtctctaacctcttaacaaatgcaggagtcccttctacaagggtgatctttccaccttgaacacttccaagtgactctacctcaccaagcagtccattcagttgttgagcagctctaactgttagaaaggtcttccttagatggagttgaagcctccctcccggtaacttctgtctttgggcctgggtctgtcctccaagagaaccctgagaatgttggaaggatgaatctcgcacattctgccatgtcttctcttttacaggctgtttgacttctctgctgaagtgatttccagaaggactcatttgacacactattagatttaccacatctaatgaaatccaaggtgtagctataaagtgacaagctgtttttaatttatcacatacaccagaacttctatcctgcatcacttatatgtaaatgatgctgttaccaaaaacattaaggtagttcttgcgaatgccaccccactaagaaaactatttcattacttttgtaatccatctgtgagagtctgccccccagcttaaccacttcctttggtctgcacccaatgaagggaaaccccaaagtactgtctcaaatggtatttgaactacgccagtattgttggaataagtacattaattacttgaatgaatgaacacagcaccgtagaaatttcctttatggttacaccttgtatgtctaaagcattcaggccctgttctgtagtgtttcttatcctcacacagagtagaaaagcctgtttgctttatttaacttatacataaaagatgacatctgaaatatctgatgtgtattataataccagcttctgctctagaactactttgggtgaaatggtggtaatagcaaatgacctcctttaacaagacactcatctcaaacaatgccatttagttcaggagatctctaagtgtagctgtaaattttggggttaatttggcttatattggaccttttaaaagaaataaagttttttaatgcaataaatcaagtgtctgtctcttttacatgcaaacttcttttcccttaaactgtctagcattgaattgacaagttttttttccttttctaataaaaaaatgactttttagcaaagttgttttagacttaaatgaacctatctatatgggattttcaaatatatttattca

SEQ ID NO: 9174 - protein, 1053 aa, Homo sapiens; identical to SEQ ID NO: 758

SEQ ID NO: 9175 - DNA, 4363 bp, Homo sapiens
gtgacctataattataaaaatgataaatggatttttttaaacatgtgactattggaataggtttcattagtcatagaagcaattttaatagttttacaactgtcaaaactcatttctaaaatgatcacaactaaaagccatattatttaaaatgcttttgaactgaaattttattataacattgacaataatgtatttttttccttaatccacctacctaattttctgaaggaaagtagtactattttgtgtattctgtggaaatcaactgtaataatatgttacttgaaactaacaataaatgaggtaagaagctttatgtgtgtctgtaagccaataaggtttcttaaagaatcaaaatttttaataatgtgagcagccaacctccagatagactgacagagatcttacatcagtgtctctcattgtcccttgctattccattttgaggtttagtaaagataaaaatcttagaatattgttgcccgttctgggattagtcagatcccttgaaggtccaaaaattagtcatgatgcttgtaagctgttttcaaagcctattagaatttatgctactgcagtttacagtttttaatgtatagtctgtatctttaccagcctcattccttaacaacggaggaatgcaatttcaatggtaaaatgtttttaaacattgaaaagaaaagtaacaaaaggattgggtgaaggtagggacctgtcgatgggacctatggctgagcttgatgccgagctacacgttgacaaggtgtgacagtgcactgcacagaggttctgctctccctgcccccatctttgttattaggactaggtttctcgagtttgtacctcttggtcttcacaagttgacaaaaatgctctttgacagccaggtgtgtatgtgtatgtgcatgcacatgcacatatgtgtacatgtatcatgttttttcccctagacctctgcatgttgctgcccgaaatgggctaacaatggtggttcaggaacttttgggaaaaggagcaagtgtgcttgcagtagatgaaaatggctataccccagctttggcctgtgctcccaataaggatgtggctgattgcctggctctcattttggccaccatgatgcctgtctcatcaagtagtcctttatcatccttaacattcaatgccattaaccgttataccaacacctcaaaaacagtcagctttgaagctttgcccatcatgaggaatgaacctagctcctattgcagtttcaataacattggaggggaacaggagtacttatacactgacgtggatgagctcaacgactccgattctgagacctactgagaggctgaggaggagggagttctcacagtaaagcttcaaactgtgctttttcaggaaaaaggcactttgatattcacgtagaaattcaacctaagaggaaagatcccacagtgagccaatgttaagagatctgatggcattaggaggaagagttttaaaggcaagttttacaaaaggaacttctagaatcttgaaatagacctgactgaggaaaacacattgatgtcagaattctttgtggaattgtttaatttggttttgcagtgccaggaacaattggggacactgtgcactctaacctgcttacacaagcaacactattgtaacagaagaaataaagacactagatttaaattttatcaataaaattacaactaaatttaaaggcaataaaagtttggtacagtaggcattatgtgcacagcaaattgcaaaaggaccaaataactgaaaggtttttttaataaaatgccattttgtggaaactggagtagattaaatgaaacattacctaaaccaaactgcaatatttctggaaatgaagctgagatttggttttaaatgttgagtttttttgggttttgttttttttttaagaaaacatctgaaagccttccaatgctgtattaaaccatgagagaaagcagatgtatttttacatttttttcttttacagaactatttcaaatttccaatttttatactattagaattaaaaaccagctgactgggtgcaatacgggtgaaaatacttgtgacatagacattgagatggattggggtcaggctgttgccctgttttgaatggtttgggtttaaaatagtactatttttgtttgaaaatgtaaagaatttcctagaaaaaaattcatgaaatcaaaaagtagactatttcaccctattgcagctaagtggtcctggggcatggagtcttcaacctctctatgaatggcacaccttagtcacttatgttacttttgtgtccccaccatgggttgggggattttttgtttattctgatctatgagttttgaaaaagtgaataatcaaaaggaaaataattccttgttgttcataaattaagcatcactaaagtctcttgaaaggcatttctgtattgggcaagatttaaaatactaaagccttaggtcctattcatatttaaagtagcatgtttgtaacctgttactatttggagagagaagcagttgcctgccaaattgaagactacctttcaaatagcaaaagagagagagaaggctgatatttcggcttttaaataaagatttgtgtggttctgcttttactgtaactgtcactttcccagtgaaaatgatttcatatacattgagggtcttacaggtatgggtaaagttctataaattgcaacaaaatgatacccaatttcattttatcctttttgtattgtgaaactggaaactttatgacattgtaaattatcagctggtttttctgaatataaagtgtgaaaacacagaacagtattttgatctatttgataattttgtgggttttttgaagaattaatgagcatgtacatagaaatagtgactgcttgaatactgtatttacttgcactctttcagtacatcaagattcctgtatattttagagtataataaaacacagatgtgagttgtatttaatgaataatgtatttgtatctgtgcatattatctacaaatctataaagtttctagggcattgactactagattttaagcattttttctaaaatatttacagaaattataaatctaatcccccatcttttctttataatataaagaagtcataatgaacccttcctaattattagtagtaggaaggtgaatatgcattttaatgacagtggactacattttctattgtaccttttgaaaaaaaaaaaaatcaagcagattctaaaagtatacatatgtgtgctttctctttccttttaggaattctcttctgaattccctgagggaattttctagaatctcagaattgaaagagacctgaggttcatccagtctctaacctcttaacaaatgcaggagtcccttctacaagggtgatctttccaccttgaacacttccaagtgactctacctcaccaagcagtccattcagttgttgagcagctctaactgttagaaaggtcttccttagatggagttgaagcctccctcccggtaacttctgtctttgggcctgggtctgtcctccaagagaaccctgagaatgttggaaggatgaatctcgcacattctgccatgtcttctcttttacaggctgtttgacttctctgctgaagtgatttccagaaggactcatttgacacactattagatttaccacatctaatgaaatccaaggtgtagctataaagtgacaagctgtttttaatttatcacatacaccagaacttctatcctgcatcacttatatgtaaatgatgctgttaccaaaaacattaaggtagttcttgcgaatgccaccccactaagaaaactatttcattacttttgtaatccatctgtgagagtctgccccccagcttaaccacttcctttggtctgcacccaatgaagggaaaccccaaagtactgtctcaaatggtatttgaactacgccagtattgttggaataagtacattaattacttgaatgaatgaacacagcaccgtagaaatttcctttatggttacaccttgtatgtctaaagcattcaggccctgttctgtagtgtttcttatcctcacacagagtagaaaagcctgtttgctttatttaacttatacataaaagatgacatctgaaatatctgatgtgtattataataccagcttctgctctagaactactttgggtgaaatggtggtaatagcaaatgacctcctttaacaagacactcatctcaaacaatgccatttagttcaggagatctctaagtgtagctgtaaattttggggttaatttggcttatattggaccttttaaaagaaataaagttttttaatgcaat

SEQ ID NO: 9176 - protein, 133 aa, Homo sapiens; identical to SEQ ID NO: 9170

SEQ ID NO: 9177 - DNA, 6075 bp, Homo sapiens
gactgtgtcttcacaacgttagacctctcttcagctgcattgctggctgcctagagccctagactaatgtaagagctagagttaatgccaaagacagcaaatggttgacacctttacacagagcagttgcatcttgtagtgaggaagcagttcaggtacttttgaagcattctgcagatgttaatgctcgagacaaaaattggcaaacccctttacatatagctgctgctaataaagctgtaaagtgtgctgaagctttggtacctcttctgagtaatgtaaacgtatctgatcgagcagggaggactgcattacatcatgcagctttcagtggacatggtgagatggtcaaactactcttgtctagaggtgccaatattaatgcttttgacaagaaagataggcgtgctatccattgggcagcatatatgggtcacattgaagtagtgaaattgcttgtgtcgcatggagctgaagtgacatgcaaggataaaaagtcttatacacctcttcatgcagcagcctctagtggaatgatcagcgtagtcaagtaccttctagatcttggagttgatatgaatgaaccaaatgcctatggaaatacacctcttcatgtagcctgctataatggacaagatgttgtagtgaatgaacttatagactgtggtgctattgtgaatcaaaagaatgaaaaaggatttactcctttgcactttgctgctgcatcaacacatggagcattgtgtttagagcttctagttggcaatggggccgatgtcaatatgaagagtaaagatgggaaaaccccactacacatgactgctctccacggtagattctcccgatcacaaaccattatccagagtggagctgtaatcgactgtgaggataagaatggaaatacccctttgcacatagcagcacggtatggccatgagctgctgatcaacactcttattacaagtggtgctgacactgcaaagcgtggcatacatggaatgttccccctccatttggcagccttaagcggcttttcagattgctgcagaaaacttctttcttcaggatttgatatagataccccagatgattttggcaggacttgtctacatgcagctgcagctggagggaatttggagtgcctaaaccttctgctgaatactggtgcagactttaataaaaaggacaaatttgggagatctccactgcactacgctgctgccaactgcaattaccagtgcctgtttgctcttgtgggatcaggagcaagtgtgaatgaccttgatgaaagaggctgcacacccctgcactatgcagctacatcagacacagatggcaagtgcctggaatacttattaagaaacgatgcaaatccagggatccgtgataagcaaggatacaacgcagttcattattcagctgcttatggtcaccgtctatgtcttcagctgattgcaagtgaaactcctctagatgttttaatggaaacctcaggaacagacatgctgagtgattcagataatagagcaacaataagccctttacacttggctgcctatcatggtcaccatcaagcactggaagtgttggtacagtctttgttagatcttgatgtcagaaatagtagtggaagaacacccctagatcttgcagcttttaagggccatgttgaatgtgtggatgtactcattaatcagggagcctcaatcttagtaaaagattacattttgaagaggacacctattcatgcagcagcaacaaatggtcattcagaatgcttacggctattaataggaaatgcagaaccacagaatgcagtggatattcaagatggaaatggacagacgcctctgatgctatctgttctcaacgggcacacagactgtgtttactcattgctgaacaaaggagcaaatgtagatgccaaagataagtggggaaggacagcgttgcatagaggggcagttacaggccatgaagaatgtgtagatgcattacttcaacatggtgctaagtgcttacttcgggatagcaggggccggacgcctatacacctgtctgctgcctgtggacacattggtgttcttggagcccttttgcagtcagcagcatctatggatgcaaatccagccacagcagacaatcatggatatacggcacttcactgggcttgctacaatggtcacgagacatgtgtagaactgcttttagaacaggaagttttccagaaaacggaaggaaatgcttttagtccattgcattgtgccgtgataaatgacaacgaaggtgctgctgagatgttaattgatacattaggtgccagcattgtgaacgccacagattcaaaaggaagaactcctctccatgcagccgccttcacagaccatgtagagtgtttacagctgctgctcagccataatgctcaagtcaattctgtggactctacagggaaaacacctcttatgatggctgcagaaaatggacaaacaaatacagttgagatgctggttagcagtgctagtgcagaactgactttacaagataacagtaaaaatactgccctccatttggcttgtagcaagggtcatgaaactagtgccttgttaatactggaaaagataacagatagaaacctcatcaatgcaaccaacgcagccttgcaaacacctctgcatgttgctgcccgaaatgggctaacaatggtggttcaggaacttttgggaaaaggagcaagtgtgcttgcagtagatgaaaatggctataccccagctttggcctgtgctcccaataaggatgtggctgattgcctggctctcattttggccaccatgatgcctgtctcatcaagtagtcctttatcatccttaacattcaatgccattaaccgttataccaacacctcaaaaacagtcagctttgaagctttgcccatcatgaggaatgaacctagctcctattgcagtttcaataacattggaggggaacaggagtacttatacactgacgtggatgagctcaacgactccgattctgagacctactgagaggctgaggaggagggagttctcacagtaaagcttcaaactgtgctttttcaggaaaaaggcactttgatattcacgtagaaattcaacctaagaggaaagatcccacagtgagccaatgttaagagatctgatggcattaggaggaagagttttaaaggcaagttttacaaaaggaacttctagaatcttgaaatagacctgactgaggaaaacacattgatgtcagaattctttgtggaattgtttaatttggttttgcagtgccaggaacaattggggacactgtgcactctaacctgcttacacaagcaacactattgtaacagaagaaataaagacactagatttaaattttatcaataaaattacaactaaatttaaaggcaataaaagtttggtacagtaggcattatgtgcacagcaaattgcaaaaggaccaaataactgaaaggtttttttaataaaatgccattttgtggaaactggagtagattaaatgaaacattacctaaaccaaactgcaatatttctggaaatgaagctgagatttggttttaaatgttgagtttttttgggttttgttttttttttaagaaaacatctgaaagccttccaatgctgtattaaaccatgagagaaagcagatgtatttttacatttttttcttttacagaactatttcaaatttccaatttttatactattagaattaaaaaccagctgactgggtgcaatacgggtgaaaatacttgtgacatagacattgagatggattggggtcaggctgttgccctgttttgaatggtttgggtttaaaatagtactatttttgtttgaaaatgtaaagaatttcctagaaaaaaattcatgaaatcaaaaagtagactatttcaccctattgcagctaagtggtcctggggcatggagtcttcaacctctctatgaatggcacaccttagtcacttatgttacttttgtgtccccaccatgggttgggggattttttgtttattctgatctatgagttttgaaaaagtgaataatcaaaaggaaaataattccttgttgttcataaattaagcatcactaaagtctcttgaaaggcatttctgtattgggcaagatttaaaatactaaagccttaggtcctattcatatttaaagtagcatgtttgtaacctgttactatttggagagagaagcagttgcctgccaaattgaagactacctttcaaatagcaaaagagagagagaaggctgatatttcggcttttaaataaagatttgtgtggttctgcttttactgtaactgtcactttcccagtgaaaatgatttcatatacattgagggtcttacaggtatgggtaaagttctataaattgcaacaaaatgatacccaatttcattttatcctttttgtattgtgaaactggaaactttatgacattgtaaattatcagctggtttttctgaatataaagtgtgaaaacacagaacagtattttgatctatttgataattttgtgggttttttgaagaattaatgagcatgtacatagaaatagtgactgcttgaatactgtatttacttgcactctttcagtacatcaagattcctgtatattttagagtataataaaacacagatgtgagttgtatttaatgaataatgtatttgtatctgtgcatattatctacaaatctataaagtttctagggcattgactactagattttaagcattttttctaaaatatttacagaaattataaatctaatcccccatcttttctttataatataaagaagtcataatgaacccttcctaattattagtagtaggaaggtgaatatgcattttaatgacagtggactacattttctattgtaccttttgaaaaaaaaaaaaatcaagcagattctaaaagtatacatatgtgtgctttctctttccttttaggaattctcttctgaattccctgagggaattttctagaatctcagaattgaaagagacctgaggttcatccagtctctaacctcttaacaaatgcaggagtcccttctacaagggtgatctttccaccttgaacacttccaagtgactctacctcaccaagcagtccattcagttgttgagcagctctaactgttagaaaggtcttccttagatggagttgaagcctccctcccggtaacttctgtctttgggcctgggtctgtcctccaagagaaccctgagaatgttggaaggatgaatctcgcacattctgccatgtcttctcttttacaggctgtttgacttctctgctgaagtgatttccagaaggactcatttgacacactattagatttaccacatctaatgaaatccaaggtgtagctataaagtgacaagctgtttttaatttatcacatacaccagaacttctatcctgcatcacttatatgtaaatgatgctgttaccaaaaacattaaggtagttcttgcgaatgccaccccactaagaaaactatttcattacttttgtaatccatctgtgagagtctgccccccagcttaaccacttcctttggtctgcacccaatgaagggaaaccccaaagtactgtctcaaatggtatttgaactacgccagtattgttggaataagtacattaattacttgaatgaatgaacacagcaccgtagaaatttcctttatggttacaccttgtatgtctaaagcattcaggccctgttctgtagtgtttcttatcctcacacagagtagaaaagcctgtttgctttatttaacttatacataaaagatgacatctgaaatatctgatgtgtattataataccagcttctgctctagaactactttgggtgaaatggtggtaatagcaaatgacctcctttaacaagacactcatctcaaacaatgccatttagttcaggagatctctaagtgtagctgtaaattttggggttaatttggcttatattggaccttttaaaagaaataaagttttttaatgcaat

SEQ ID NO: 9178 - protein, 899 aa, Homo sapiens; identical to SEQ ID NO: 9172

SEQ ID NO: 9179 - DNA, 4753 bp, Homo sapiens
ccgcgggggctgccagggtatttcgggaagggggcgtgaggaggcggcggcggcagcggcgggtagggcaggcagcagagggaaggagaaagaaaggaaggaagagggcggggagtcctcagaggaggaggcgggaccggccgggcacctcacctctcggcggcggcggcggcggcggcggcggcgggcggccggggaggcggcgccgccccctgcccgcaggtcttctcagcgcagtcggccgcggacccgctggtcccgggcagcggccaaggctactggggcgggagcagtgggccggtcggcggcggcagcggcagcggcggaggaggaggaggctggagtgggcgcggaggcgaccgccatggcgttcctcaaactccgtgaccagccatcactggtgcaagctatatttaacggagatcctgatgaagttcgagcactaatatttaagaaagaagatgttaactttcaggacaatgaaaagcgaaccccattgcacgccgcagcttaccttggagatgcagaaatcattgaacttcttattttatctggagctagagttaatgccaaagacagcaaatggttgacacctttacacagagcagttgcatcttgtagtgaggaagcagttcaggtacttttgaagcattctgcagatgttaatgctcgagacaaaaattggcaaacccctttacatatagctgctgctaataaagctgtaaagtgtgctgaagctttggtacctcttctgagtaatgtaaacgtatctgatcgagcagggaggactgcattacatcatgcagctttcagtggacatggtgagatggtcaaactactcttgtctagaggtgccaatattaatgcttttgacaagaaagataggcgtgctatccattgggcagcatatatgggtcacattgaagtagtgaaattgcttgtgtcgcatggagctgaagtgacatgcaaggataaaaagtcttatacacctcttcatgcagcagcctctagtggaatgatcagcgtagtcaagtaccttctagatcttggagttgatatgaatgaaccaaatgcctatggaaatacacctcttcatgtagcctgctataatggacaagatgttgtagtgaatgaacttatagactgtggtgctattgtgaatcaaaagaatgaaaaaggatttactcctttgcactttgctgctgcatcaacacatggagcattgtgtttagagcttctagttggcaatggggccgatgtcaatatgaagagtaaagatgggaaaaccccactacacatgactgctctccacggtagattctcccgatcacaaaccattatccagagtggagctgtaatcgactgtgaggataagaatggaaatacccctttgcacatagcagcacggtatggccatgagctgctgatcaacactcttattacaagtggtgctgacactgcaaagcgtggcatacatggaatgttccccctccatttggcagccttaagcggcttttcagattgctgcagaaaacttctttcttcaggatttgatatagataccccagatgattttggcaggacttgtctacatgcagctgcagctggagggaatttggagtgcctaaaccttctgctgaatactggtgcagactttaataaaaaggacaaatttgggagatctccactgcactacgctgctgccaactgcaattaccagtgcctgtttgctcttgtgggatcaggagcaagtgtgaatgaccttgatgaaagaggctgcacacccctgcactatgcagctacatcagacacagatggcaagtgcctggaatacttattaagaaacgatgcaaatccagggatccgtgataagcaaggatacaacgcagttcattattcagctgcttatggtcaccgtctatgtcttcagctgattgcaagtgaaactcctctagatgttttaatggaaacctcaggaacagacatgctgagtgattcagataatagagcaacaataagccctttacacttggctgcctatcatggtcaccatcaagcactggaagtgttggtacagtctttgttagatcttgatgtcagaaatagtagtggaagaacacccctagatcttgcagcttttaagggccatgttgaatgtgtggatgtactcattaatcagggagcctcaatcttagtaaaagattacattttgaagaggacacctattcatgcagcagcaacaaatggtcattcagaatgcttacggctattaataggaaatgcagaaccacagaatgcagtggatattcaagatggaaatggacagacgcctctgatgctatctgttctcaacgggcacacagactgtgtttactcattgctgaacaaaggagcaaatgtagatgccaaagataagtggggaaggacagcgttgcatagaggggcagttacaggccatgaagaatgtgtagatgcattacttcaacatggtgctaagtgcttacttcgggatagcaggggccggacgcctatacacctgtctgctgcctgtggacacattggtgttcttggagcccttttgcagtcagcagcatctatggatgcaaatccagccacagcagacaatcatggatatacggcacttcactgggcttgctacaatggtcacgagacatgtgtagaactgcttttagaacaggaagttttccagaaaacggaaggaaatgcttttagtccattgcattgtgccgtgataaatgacaacgaaggtgctgctgagatgttaattgatacattaggtgccagcattgtgaacgccacagattcaaaaggaagaactcctctccatgcagccgccttcacagaccatgtagagtgtttacagctgctgctcagccataatgctcaagtcaattctgtggactctacagggaaaacacctcttatgatggctgcagaaaatggacaaacaaatacagttgagatgctggttagcagtgctagtgcagaactgactttacaagataacagtaaaaatactgccctccatttggcttgtagcaagggtcatgaaactagtgccttgttaatactggaaaagataacagatagaaacctcatcaatgcaaccaacgcagccttgcaaacacctctgcatgttgctgcccgaaatgggctaacaatggtggttcaggaacttttgggaaaaggagcaagtgtgcttgcagtagatgaaaatggctataccccagctttggcctgtgctcccaataaggatgtggctgattgcctggctctcattttggccaccatgatgcctgtctcatcaagtagtcctttatcatccttaacattcaatgccattaaccgttataccaacacctcaaaaacagtcagctttgaagctttgcccatcatgaggaatgaacctagctcctattgcagtttcaataacattggaggggaacaggagtacttatacactgacgtggatgagctcaacgactccgattctgagacctactgagaggctgaggaggagggagttctcacagtaaagcttcaaactgtgctttttcaggaaaaaggcactttgatattcacgtagaaattcaacctaagaggaaagatcccacagtgagccaatgttaagagatctgatggcattaggaggaagagttttaaaggaattctcttctgaattccctgagggaattttctagaatctcagaattgaaagagacctgaggttcatccagtctctaacctcttaacaaatgcaggagtcccttctacaagggtgatctttccaccttgaacacttccaagtgactctacctcaccaagcagtccattcagttgttgagcagctctaactgttagaaaggtcttccttagatggagttgaagcctccctcccggtaacttctgtctttgggcctgggtctgtcctccaagagaaccctgagaatgttggaaggatgaatctcgcacattctgccatgtcttctcttttacaggctgtttgacttctctgctgaagtgatttccagaaggactcatttgacacactattagatttaccacatctaatgaaatccaaggtgtagctataaagtgacaagctgtttttaatttatcacatacaccagaacttctatcctgcatcacttatatgtaaatgatgctgttaccaaaaacattaaggtagttcttgcgaatgccaccccactaagaaaactatttcattacttttgtaatccatctgtgagagtctgccccccagcttaaccacttcctttggtctgcacccaatgaagggaaaccccaaagtactgtctcaaatggtatttgaactacgccagtattgttggaataagtacattaattacttgaatgaatgaacacagcaccgtagaaatttcctttatggttacaccttgtatgtctaaagcattcaggccctgttctgtagtgtttcttatcctcacacagagtagaaaagcctgtttgctttatttaacttatacataaaagatgacatctgaaatatctgatgtgtattataataccagcttctgctctagaactactttgggtgaaatggtggtaatagcaaatgacctcctttaacaagacactcatctcaaacaatgccatttagttcaggagatctctaagtgtagctgtaaattttggggttaatttggcttatattggaccttttaaaagaaataaagttttttaatgcaat

SEQ ID NO: 9180 - protein, 1053 aa, Homo sapiens; identical to SEQ ID NO: 758

SEQ ID NO: 9181 - DNA, 3001 bp, Homo sapiens
gtgacctataattataaaaatgataaatggatttttttaaacatgtgactattggaataggtttcattagtcatagaagcaattttaatagttttacaactgtcaaaactcatttctaaaatgatcacaactaaaagccatattatttaaaatgcttttgaactgaaattttattataacattgacaataatgtatttttttccttaatccacctacctaattttctgaaggaaagtagtactattttgtgtattctgtggaaatcaactgtaataatatgttacttgaaactaacaataaatgaggtaagaagctttatgtgtgtctgtaagccaataaggtttcttaaagaatcaaaatttttaataatgtgagcagccaacctccagatagactgacagagatcttacatcagtgtctctcattgtcccttgctattccattttgaggtttagtaaagataaaaatcttagaatattgttgcccgttctgggattagtcagatcccttgaaggtccaaaaattagtcatgatgcttgtaagctgttttcaaagcctattagaatttatgctactgcagtttacagtttttaatgtatagtctgtatctttaccagcctcattccttaacaacggaggaatgcaatttcaatggtaaaatgtttttaaacattgaaaagaaaagtaacaaaaggattgggtgaaggtagggacctgtcgatgggacctatggctgagcttgatgccgagctacacgttgacaaggtgtgacagtgcactgcacagaggttctgctctccctgcccccatctttgttattaggactaggtttctcgagtttgtacctcttggtcttcacaagttgacaaaaatgctctttgacagccaggtgtgtatgtgtatgtgcatgcacatgcacatatgtgtacatgtatcatgttttttcccctagacctctgcatgttgctgcccgaaatgggctaacaatggtggttcaggaacttttgggaaaaggagcaagtgtgcttgcagtagatgaaaatggctataccccagctttggcctgtgctcccaataaggatgtggctgattgcctggctctcattttggccaccatgatgcctgtctcatcaagtagtcctttatcatccttaacattcaatgccattaaccgttataccaacacctcaaaaacagtcagctttgaagctttgcccatcatgaggaatgaacctagctcctattgcagtttcaataacattggaggggaacaggagtacttatacactgacgtggatgagctcaacgactccgattctgagacctactgagaggctgaggaggagggagttctcacagtaaagcttcaaactgtgctttttcaggaaaaaggcactttgatattcacgtagaaattcaacctaagaggaaagatcccacagtgagccaatgttaagagatctgatggcattaggaggaagagttttaaaggcaagttttacaaaaggaacttctagaatcttgaaatagacctgactgaggaaaacacattgatgtcagaattctttgtggaattgtttaatttggttttgcagtgccaggaacaattggggacactgtgcactctaacctgcttacacaagcaacactattgtaacagaagaaataaagacactagatttaaattttatcaataaaattacaactaaatttaaaggcaataaaagtttggtacagtaggcattatgtgcacagcaaattgcaaaaggaccaaataactgaaaggtttttttaataaaatgccattttgtggaaactggagtagattaaatgaaacattacctaaaccaaactgcaatatttctggaaatgaagctgagatttggttttaaatgttgagtttttttgggttttgttttttttttaagaaaacatctgaaagccttccaatgctgtattaaaccatgagagaaagcagatgtatttttacatttttttcttttacagaactatttcaaatttccaatttttatactattagaattaaaaaccagctgactgggtgcaatacgggtgaaaatacttgtgacatagacattgagatggattggggtcaggctgttgccctgttttgaatggtttgggtttaaaatagtactatttttgtttgaaaatgtaaagaatttcctagaaaaaaattcatgaaatcaaaaagtagactatttcaccctattgcagctaagtggtcctggggcatggagtcttcaacctctctatgaatggcacaccttagtcacttatgttacttttgtgtccccaccatgggttgggggattttttgtttattctgatctatgagttttgaaaaagtgaataatcaaaaggaaaataattccttgttgttcataaattaagcatcactaaagtctcttgaaaggcatttctgtattgggcaagatttaaaatactaaagccttaggtcctattcatatttaaagtagcatgtttgtaacctgttactatttggagagagaagcagttgcctgccaaattgaagactacctttcaaatagcaaaagagagagagaaggctgatatttcggcttttaaataaagatttgtgtggttctgcttttactgtaactgtcactttcccagtgaaaatgatttcatatacattgagggtcttacaggtatgggtaaagttctataaattgcaacaaaatgatacccaatttcattttatcctttttgtattgtgaaactggaaactttatgacattgtaaattatcagctggtttttctgaatataaagtgtgaaaacacagaacagtattttgatctatttgataattttgtgggttttttgaagaattaatgagcatgtacatagaaatagtgactgcttgaatactgtatttacttgcactctttcagtacatcaagattcctgtatattttagagtataataaaacacagatgtgagttgtatttaatg

SEQ ID NO: 9182 - protein, 133 aa, Homo sapiens; identical to SEQ ID NO: 9170

SEQ ID NO: 9183 - DNA, 4713 bp, Homo sapiens
gactgtgtcttcacaacgttagacctctcttcagctgcattgctggctgcctagagccctagactaatgtaagagctagagttaatgccaaagacagcaaatggttgacacctttacacagagcagttgcatcttgtagtgaggaagcagttcaggtacttttgaagcattctgcagatgttaatgctcgagacaaaaattggcaaacccctttacatatagctgctgctaataaagctgtaaagtgtgctgaagctttggtacctcttctgagtaatgtaaacgtatctgatcgagcagggaggactgcattacatcatgcagctttcagtggacatggtgagatggtcaaactactcttgtctagaggtgccaatattaatgcttttgacaagaaagataggcgtgctatccattgggcagcatatatgggtcacattgaagtagtgaaattgcttgtgtcgcatggagctgaagtgacatgcaaggataaaaagtcttatacacctcttcatgcagcagcctctagtggaatgatcagcgtagtcaagtaccttctagatcttggagttgatatgaatgaaccaaatgcctatggaaatacacctcttcatgtagcctgctataatggacaagatgttgtagtgaatgaacttatagactgtggtgctattgtgaatcaaaagaatgaaaaaggatttactcctttgcactttgctgctgcatcaacacatggagcattgtgtttagagcttctagttggcaatggggccgatgtcaatatgaagagtaaagatgggaaaaccccactacacatgactgctctccacggtagattctcccgatcacaaaccattatccagagtggagctgtaatcgactgtgaggataagaatggaaatacccctttgcacatagcagcacggtatggccatgagctgctgatcaacactcttattacaagtggtgctgacactgcaaagcgtggcatacatggaatgttccccctccatttggcagccttaagcggcttttcagattgctgcagaaaacttctttcttcaggatttgatatagataccccagatgattttggcaggacttgtctacatgcagctgcagctggagggaatttggagtgcctaaaccttctgctgaatactggtgcagactttaataaaaaggacaaatttgggagatctccactgcactacgctgctgccaactgcaattaccagtgcctgtttgctcttgtgggatcaggagcaagtgtgaatgaccttgatgaaagaggctgcacacccctgcactatgcagctacatcagacacagatggcaagtgcctggaatacttattaagaaacgatgcaaatccagggatccgtgataagcaaggatacaacgcagttcattattcagctgcttatggtcaccgtctatgtcttcagctgattgcaagtgaaactcctctagatgttttaatggaaacctcaggaacagacatgctgagtgattcagataatagagcaacaataagccctttacacttggctgcctatcatggtcaccatcaagcactggaagtgttggtacagtctttgttagatcttgatgtcagaaatagtagtggaagaacacccctagatcttgcagcttttaagggccatgttgaatgtgtggatgtactcattaatcagggagcctcaatcttagtaaaagattacattttgaagaggacacctattcatgcagcagcaacaaatggtcattcagaatgcttacggctattaataggaaatgcagaaccacagaatgcagtggatattcaagatggaaatggacagacgcctctgatgctatctgttctcaacgggcacacagactgtgtttactcattgctgaacaaaggagcaaatgtagatgccaaagataagtggggaaggacagcgttgcatagaggggcagttacaggccatgaagaatgtgtagatgcattacttcaacatggtgctaagtgcttacttcgggatagcaggggccggacgcctatacacctgtctgctgcctgtggacacattggtgttcttggagcccttttgcagtcagcagcatctatggatgcaaatccagccacagcagacaatcatggatatacggcacttcactgggcttgctacaatggtcacgagacatgtgtagaactgcttttagaacaggaagttttccagaaaacggaaggaaatgcttttagtccattgcattgtgccgtgataaatgacaacgaaggtgctgctgagatgttaattgatacattaggtgccagcattgtgaacgccacagattcaaaaggaagaactcctctccatgcagccgccttcacagaccatgtagagtgtttacagctgctgctcagccataatgctcaagtcaattctgtggactctacagggaaaacacctcttatgatggctgcagaaaatggacaaacaaatacagttgagatgctggttagcagtgctagtgcagaactgactttacaagataacagtaaaaatactgccctccatttggcttgtagcaagggtcatgaaactagtgccttgttaatactggaaaagataacagatagaaacctcatcaatgcaaccaacgcagccttgcaaacacctctgcatgttgctgcccgaaatgggctaacaatggtggttcaggaacttttgggaaaaggagcaagtgtgcttgcagtagatgaaaatggctataccccagctttggcctgtgctcccaataaggatgtggctgattgcctggctctcattttggccaccatgatgcctgtctcatcaagtagtcctttatcatccttaacattcaatgccattaaccgttataccaacacctcaaaaacagtcagctttgaagctttgcccatcatgaggaatgaacctagctcctattgcagtttcaataacattggaggggaacaggagtacttatacactgacgtggatgagctcaacgactccgattctgagacctactgagaggctgaggaggagggagttctcacagtaaagcttcaaactgtgctttttcaggaaaaaggcactttgatattcacgtagaaattcaacctaagaggaaagatcccacagtgagccaatgttaagagatctgatggcattaggaggaagagttttaaaggcaagttttacaaaaggaacttctagaatcttgaaatagacctgactgaggaaaacacattgatgtcagaattctttgtggaattgtttaatttggttttgcagtgccaggaacaattggggacactgtgcactctaacctgcttacacaagcaacactattgtaacagaagaaataaagacactagatttaaattttatcaataaaattacaactaaatttaaaggcaataaaagtttggtacagtaggcattatgtgcacagcaaattgcaaaaggaccaaataactgaaaggtttttttaataaaatgccattttgtggaaactggagtagattaaatgaaacattacctaaaccaaactgcaatatttctggaaatgaagctgagatttggttttaaatgttgagtttttttgggttttgttttttttttaagaaaacatctgaaagccttccaatgctgtattaaaccatgagagaaagcagatgtatttttacatttttttcttttacagaactatttcaaatttccaatttttatactattagaattaaaaaccagctgactgggtgcaatacgggtgaaaatacttgtgacatagacattgagatggattggggtcaggctgttgccctgttttgaatggtttgggtttaaaatagtactatttttgtttgaaaatgtaaagaatttcctagaaaaaaattcatgaaatcaaaaagtagactatttcaccctattgcagctaagtggtcctggggcatggagtcttcaacctctctatgaatggcacaccttagtcacttatgttacttttgtgtccccaccatgggttgggggattttttgtttattctgatctatgagttttgaaaaagtgaataatcaaaaggaaaataattccttgttgttcataaattaagcatcactaaagtctcttgaaaggcatttctgtattgggcaagatttaaaatactaaagccttaggtcctattcatatttaaagtagcatgtttgtaacctgttactatttggagagagaagcagttgcctgccaaattgaagactacctttcaaatagcaaaagagagagagaaggctgatatttcggcttttaaataaagatttgtgtggttctgcttttactgtaactgtcactttcccagtgaaaatgatttcatatacattgagggtcttacaggtatgggtaaagttctataaattgcaacaaaatgatacccaatttcattttatcctttttgtattgtgaaactggaaactttatgacattgtaaattatcagctggtttttctgaatataaagtgtgaaaacacagaacagtattttgatctatttgataattttgtgggttttttgaagaattaatgagcatgtacatagaaatagtgactgcttgaatactgtatttacttgcactctttcagtacatcaagattcctgtatattttagagtataataaaacacagatgtgagttgtatttaatg

SEQ ID NO: 9184 - protein, 899 aa, Homo sapiens; identical to SEQ ID NO: 9172

SEQ ID NO: 9185 - DNA, 646 bp, Homo sapiens
gaaaataaaacctttttggggggtagggcccagacgggatctcactctgtcacccaggctggaatgcagtggtgcaatcatagctcactgttgcctcaaactcctgggctcaagtgatcctcctgcctcagcctcctgaacagctgggatcacaggcatgcatcatcatgcactttttttttttttggtagagatgcaggtcttgctatgttgaccaggctggtcttaaactcctggcttcaagtcatcctcccacttcagcctcccagattgttaggattataggcatgagccactgtgcctggctaaaactatttaatacatagttgaattcctaccttccttttgaatctgtggcgttcacaatgctggcacctaatgtatcaattaacatctcagcagcaccttcgttgtcatttatcctgtgtaaggtaacaaggtgatcattctcacagcaatggtgtatttcttaaaacactcaaaccaaatctgattcattctggctttacttacacggcacaatgcaatggactaaaagcatttccttccgttttctggaaaattacaacttaattcaatgtaaatgctatataaatagttgttgtattgtttagggaataatgacaaaaaaaaagtctgtacatgt

SEQ ID NO: 9186 - protein, 30 aa, Homo sapiens
MQWTKSISFRFLENYNLIQCKCYINSCCIV

SEQ ID NO: 9187 - DNA, 4928 bp, Homo sapiens
ccatttctgcctggtgcctgtgcccttttgctggagcagccacagacaactgcctgatggagaaagaatgaacgctctgccttgcttatgctatcgatgggaataaagctaactgtgtttcttctattatatgggaaacctggattaatcaagctgtattctagtaccaagagtcgtattgtctcttgtggtctgactcatcacatgtaaacgtactgcagctttgctattaatgcagagtggtttttttttttttgtttttgttttttgcccctttcccaaacactgaaagaattgttaacctctgagcttcattttcaggatttgtgctgagctctagatcttttttctgtgaatagtatctgcattaaaccagtgatgaagaaatgaagacaaattagaagtggaaacagaatagtgagattttattttttattttcaattataagcaaaacagctactggtaactatatgaccttgcaggcaagagtgggtatcgctgtgatcatctctgtcacagcagttgtttctcatttcattctatattgtgtggtgttgtgtcaccaaaaacaatgattgttttgtgcaagtaaatttcagagatagagcaataagactattttggtagaggaaaaatatttttaaatgagcttggactcagttttagttattgacatgttggtgtgaaatttcttcttaagtattgcagtaatccaacagaaataatagaatttcgttatatttaggaagttacaaattatgtagtcataattttaaacttgtttttccagtagtacttattaactttaaaaaaaaaaaaaacccagctgtgctgttcagagaatgtttgtaagtgttgtacagaagaggaggaaaaactacttgtgctcttccaactgtgacttttatcacatagcttggaatttagtgttttaaaagatcgaatgagtcgagtgtgtattgttgttttggaggaggtagaagatgaatctcctgcattcatttctaaattgccacaggaaaataaatccctacattctccaccttctggaaatgtattggtaagatatccatcactggtgcaagctatatttaacggagatcctgatgaagttcgagcactaatatttaagaaagaagatgttaactttcaggacaatgaaaagcgaaccccattgcacgccgcagcttaccttggagatgcagaaatcattgaacttcttattttatctggagctagagttaatgccaaagacagcaaatggttgacacctttacacagagcagttgcatcttgtagtgaggaagcagttcaggtacttttgaagcattctgcagatgttaatgctcgagacaaaaattggcaaacccctttacatatagctgctgctaataaagctgtaaagtgtgctgaagctttggtacctcttctgagtaatgtaaacgtatctgatcgagcagggaggactgcattacatcatgcagctttcagtggacatggtgagatggtcaaactactcttgtctagaggtgccaatattaatgcttttgacaagaaagataggcgtgctatccattgggcagcatatatgggtcacattgaagtagtgaaattgcttgtgtcgcatggagctgaagtgacatgcaaggataaaaagtcttatacacctcttcatgcagcagcctctagtggaatgatcagcgtagtcaagtaccttctagatcttggagttgatatgaatgaaccaaatgcctatggaaatacacctcttcatgtagcctgctataatggacaagatgttgtagtgaatgaacttatagactgtggtgctattgtgaatcaaaagaatgaaaaaggatttactcctttgcactttgctgctgcatcaacacatggagcattgtgtttagagcttctagttggcaatggggccgatgtcaatatgaagagtaaagatgggaaaaccccactacacatgactgctctccacggtagattctcccgatcacaaaccattatccagagtggagctgtaatcgactgtgaggataagaatggaaatacccctttgcacatagcagcacggtatggccatgagctgctgatcaacactcttattacaagtggtgctgacactgcaaagcgtggcatacatggaatgttccccctccatttggcagccttaagcggcttttcagattgctgcagaaaacttctttcttcaggatttgatatagataccccagatgattttggcaggacttgtctacatgcagctgcagctggagggaatttggagtgcctaaaccttctgctgaatactggtgcagactttaataaaaaggacaaatttgggagatctccactgcactacgctgctgccaactgcaattaccagtgcctgtttgctcttgtgggatcaggagcaagtgtgaatgaccttgatgaaagaggctgcacacccctgcactatgcagctacatcagacacagatggcaagtgcctggaatacttattaagaaacgatgcaaatccagggatccgtgataagcaaggatacaacgcagttcattattcagctgcttatggtcaccgtctatgtcttcagctgattgcaagtgaaactcctctagatgttttaatggaaacctcaggaacagacatgctgagtgattcagataatagagcaacaataagccctttacacttggctgcctatcatggtcaccatcaagcactggaagtgttggtacagtctttgttagatcttgatgtcagaaatagtagtggaagaacacccctagatcttgcagcttttaagggccatgttgaatgtgtggatgtactcattaatcagggagcctcaatcttagtaaaagattacattttgaagaggacacctattcatgcagcagcaacaaatggtcattcagaatgcttacggctattaataggaaatgcagaaccacagaatgcagtggatattcaagatggaaatggacagtaagtttcgataaataattgttgcatcacagaagggcgtatttcgaaaaccagagtacagtcttaagtgacagcactgaacctattcctgttgttgctcaggacgcctctgatgctatctgttctcaacgggcacacagactgtgtttactcattgctgaacaaaggagcaaatgtagatgccaaagataagtggggaaggacagcgttgcatagaggggcagttacaggccatgaagaatgtgtagatgcattacttcaacatggtgctaagtgcttacttcgggatagcaggggccggacgcctatacacctgtctgctgcctgtggacacattggtgttcttggagcccttttgcagtcagcagcatctatggatgcaaatccagccacagcagacaatcatggatatacggcacttcactgggcttgctacaatggttaagtatacaaacacaaatgcatatcattgtgtagtgaacagagataaaagaatgacatatttataaggcaaattttaagtttaaaattagcaaaaaccttgggaataatctactgtataggctcacgtactaataatacttagtacgtaggctcactcctgtcctttgtcatgctaaagccaagacactagttgtcaaaggtgttctgagataagccatgaagtatttttgaggtttttcttttcttttcttttcttttttagttttggtaggatcttgctatgttgcccaggctggtcttgaactcctggcatcaagtgatcctcccacctcagcctcccaaagtgttgggattacaggcatgagccaccatgtagcctgaagtttttcttagatccttatttccacaaatattttgcatttttaggaggtttttagaatgtttccattgcttttatatagtgtgcttgtattttgattgtgttcttttactatttttttttttttaagagtcccactatgttgcccaggctggtcttgaacaactgggcttaagcaatcctcccacatcagactccccaagtgctaggattacaggcatgagccattgcacccagccatgttcttttactttctaaatacaatcatattaggggaaaaataaccaaaagtaggagaaacagtgagatgtatcacattctaaactgaaatctatgtatgttttctgagcacattgcaagataacattcttatattaccagtaatatccatgttcaatgttttaaaggaataaatccctagcaggtcttagaattagaaactttgatgggttaactctgctacatggttaaaagagattttctttggcctcctacaggctcacagtcacagtcatcgcttttataggtagactcataaaaggtcacgtagggaagcataaagctactttgaagttatagatgttaaaaatgcagtttggcttatgaaatgccactaattaaaataatttatgcaatgaagcatgttgagatatttttagatttgatcatcttagaaaactcaagtacattatatacagtgcaagcatcagtgttgtcaaagttcaagcttcaggctttagtagagaaattagaggtttttaaaatttgttttcaatttcagtgtagcttcaagattaatgttaattatgacagcagatctacaaagctgtagttcacaattctaataaccttccctcaaaatgcagagaaaatataagttgtctctttatataaatacccatttgctaaaaataaataagtataatatctgttgtaaaatcagactgccttaccaggaagttgagatttcctatctttctataatatgctgtttcatagttctttcactgggagctgttctgacaaagttatcaagttaaagcaaaagaggaaaaagctgaatcttgtaaaattataacttcattaaatgtttccacaagt

SEQ ID NO: 9188 - protein, 687 aa, Homo sapiens
MSRVCIVVLEEVEDESPAFISKLPQENKSLHSPPSGNVLVRYPSLVQAIFNGDPDEVRALIFKKEDVNFQDNEKRTPLHAAAYLGDAEIIELLILSGARVNAKDSKWLTPLHRAVASCSEEAVQVLLKHSADVNARDKNWQTPLHIAAANKAVKCAEALVPLLSNVNVSDRAGRTALHHAAFSGHGEMVKLLLSRGANINAFDKKDRRAIHWAAYMGHIEVVKLLVSHGAEVTCKDKKSYTPLHAAASSGMISVVKYLLDLGVDMNEPNAYGNTPLHVACYNGQDVVVNELIDCGAIVNQKNEKGFTPLHFAAASTHGALCLELLVGNGADVNMKSKDGKTPLHMTALHGRFSRSQTIIQSGAVIDCEDKNGNTPLHIAARYGHELLINTLITSGADTAKRGIHGMFPLHLAALSGFSDCCRKLLSSGFDIDTPDDFGRTCLHAAAAGGNLECLNLLLNTGADFNKKDKFGRSPLHYAAANCNYQCLFALVGSGASVNDLDERGCTPLHYAATSDTDGKCLEYLLRNDANPGIRDKQGYNAVHYSAAYGHRLCLQLIASETPLDVLMETSGTDMLSDSDNRATISPLHLAAYHGHHQALEVLVQSLLDLDVRNSSGRTPLDLAAFKGHVECVDVLINQGASILVKDYILKRTPIHAAATNGHSECLRLLIGNAEPQNAVDIQDGNGQ

SEQ ID NO: 9189 - DNA, 4078 bp, Homo sapiens
ggggacagggaagactgaaaacggacatgagggaacttgctgggagaattgttttcttccttgctcctaaatcacagaggagatagtccataaccagtgagctgggccagaagctaagtacttttatccctcttcccaaactggaaataatgcttttctttggctacctaacagtgcagtggcaaaaggttcagattcggttttcaggctcagagtagaatgagcaaaaaccaatgacatttccacttttccaactataatgctgaaaaaaatagctgctgcactgtatcttttaagagtgttgtggataccagctattgtgggtttgttcaactcccaacccctggcaactcagaatatgactttaactggagatagactctttacagaggtaattaaaatgaggtcattagggtgggccctaatacagtatgactggtgtccttacaagaagaaatttgcaaaaagacatggacagagggaaaataaagggagaagacagcgattttgcaagccagagagagataccctgaacagatccttccctctcagccttccaaaggaatcaatcctgacggcaccttgatctcagacttacagcctccagaactttgagtaaataaatttctattgtttaagccgcccagtttgtagtactttgttacagcagccccaccaaactaatgtaccagcactgaagtaaaaagaagagacacatactttaggtttcattcttaatgccagaaacatcagaacggtgttttctagtaaggagagtattttttataaaaggccaatcgaatgaatttttgacaaatgccttccacaatgcagtcatttaaggacttaatacttactggaggcagtctaaggtctgaggtactgctaaccatatagttttgaatgcaagcattaagtgaataagctcccaaacaaaatatctatacctcagtggccagcaaatagtctttaaaagttcttcaataaaagtgacttcacatgtaaattttactaaaagctaaataggtggttgggggaggagggtggaaattatggtgggaagaaaaaaggaagattctgattacggcaggattaagaacacggattctgtagtcaaactgcctggatctgaattctgcctctagcttttactagcagtataaaaactttgaaagtttaaaagctaaatgtcttagtttccttatataataccttcacaaatttaggctaaaatgagattagtgaaatggctaaatttaacagtatttaaaatgtaataagctcactgtttgctattatttcaccccattccataataattattaacattaattccagtggactctagtattactatagattctatggatgtattcacttgtttgattacaggtgccacgccaaaaattatacctctcatccacaaatcttagagttgcatcatgtacaaatacttggtttctgaagaattctggactgcaagttaaagaaagtgagtagttttactctaaaacaagtcaccaaaatataaaagagaatgagaagagataccatcttcaatacaataaggaaacagttacaaccacaaaccaaactatgaattatttctatcaataacagtgaaatgtgtaccaaactgaaggacactgagtcaagcgaagcttcttcagatcttgggaaggttaccgagtcctctaaaaagtcatgtttgcatgtgtgtcccatttgctcctttctctctgctgtgtcctaaaatccctaaaaatctttcagacgatctagagctgtctgggtaattcacaggaaaagcacctacagaactcttaacctcacactgcataagaataaagtggggcagtgctaaaaaagagaccaagaaggcatctttattaattttttacccagctggagatgagggagagtaacagccaatcaccagcagattactatctaagaactcattgatctaagaagctgctgagccagcccaactacctgtggtatatcaacaaaaaaaggaaactaaatgatgagaacatatggacacacagagggacacaacacacactggggcctatcagagggtggacgataagaggagagagaggttcaggaaaaataatgggaactaggcttaatatatggatgatgaaataatctgtacaacaaacccacatgacttaactttacctatataacacacctgcgcatgtactcctgaacttaaaatttggttacttaagtttacctatataacacacctgtgcatgtactcctgaacttaaaatttggtttgagagttatttgaagaaacaaacctaacagatgttcactttttgccccttcctttctgttctgcaaagaggcatattcctcgaagatacgtaagaatctgaaagcatccagcacaggactaggataaaaatatacagagtagagtaaactaggagaaatgcagttggaaaaaaccatcccagaaaataagatgaattcatgagctactctatatactcaacttcactgaatttaagttctgaagaggagacctcaaagaaaagttacaagaaagagataagacaatgtagagagactatgagagctagctgagtttggggaaaaaaggaaaactattaaagataaaaacctagaaataacaaaaagtaggataaacatgacttaaaatggtcaagaatttgaagccaaagccagagaatcaatctttaaaaacataagtcagagcatgttattccactccaaacagaactctccattggttttccacatcacttaaagggccaaggcaacacaaaagagtgaaaccaattggagaaaatataaatatccttatttcctaatttttaatcacaagtcagacataataaaaacctgaaatatgaacacagaaggaaatgactctaaaataatctcaatctttctatttttttatgttagagaaatatatttagagaatatagaactcttgctatggatatcgcagtagtttttaaaatacaaaattacagtaactgactattgtatgttcttatgaaaacatatgactttaatgcaatcttacacgacttttatacaaataagcattatttcatattgcttaatttacttaagattatacctacctgctactaaaatgtggtgttggtaattaacatgaagtgtaaacacctacactaaattttcattactaactataaacaaattagcctaattttgttgcctatatttctcttcatgtatttttttctcatctttacctagagaattgatcagatcaaatatctagtttcaattctaatttataactcaacttaccataattcattaaaaggctgttttgatggatccagaatttaaaattagggttatagaaatcagtcagtttaacttgggcctcagcaaccatggcattcaaaccaaatttaagcagaactcctggagcatctatacagaaccttatgagtctatatactatatattgtctgaagactattcttctgatatttattctgaactaaaatttggatacgattagtcttttactaccctgctattctggaaatctatttccaatataaaagtaagaattcactggttagcttatacttgacttctaaaatgtgtagtatatcttctgtaaaactgtcctaatcaactttcaatttaaagagttaataggaatttaaaatggatataacatgaatgaactgaagaaatatccaccaatcaaaattccttcctgatcaggtttctggttcagatttcaaaatctctcctgggctgggcatggtggctcacagctgtaatcccagcactttgggaggccgtggtgggtggatcacctggggtcaggagttcgagaccagcctggccaacatggtgaaaccccatctctactaaaaatacaaaaattagttgggcctggtgatgcatgcctgtaatcccagctactcaggaggctgaggcaggagaatcatttgaacctggtaggtggaggttgcagtaaaccgagagatggtgccactgccctccagcctgggtaacagagcaagactatgtcttt

SEQ ID NO: 9190 - protein, 108 aa, Homo sapiens [sequence omitted]

SEQ ID NO: 9191 - DNA, 684 bp, Homo sapiens
acgtatctctcctgctccagtgttccttccactaacccatgactgtgtcttcacaacgttagacctctcttcagctgcattgctggctgcctagagccctagactaatgtaagagctagagttaatgccaaagacagcaaatggttgacacctttacacagagcagttgcatcttgtagtgagtctaaaaattacaaggcagatgactaaacagaaacacaaccaagaaccctcagagtccgcttcactcccctgctacctccactggagcaggtgctagtatccacagctgaaggacctgaagacagatcacatcacaggactctttacagacattccccagtaccatcccggagcctagtagctccactgggttactagacccagaagagcaaaaacaatcactacagtttggctctcaggaatacccattcctaggggaagtgggagaacaccacatcaagggaacacccagtgggacaaaataatttaaacagtagtccttgaatcccagatcttccctctgacatagcctacccaaatgagaaagaaccagaaaaacaattctggtaatatgacaaaacaaggttatttaacacccccaaaatataccagctcaccagcaatggatgcaaaccaagatgaagtctatgaattgccaggaaaagaagtcagaagattgat

SEQ ID NO: 9192 - protein, 46 aa, Homo sapiens
MRKNQKNNSGNMTKQGYLTPPKYTSSPAMDANQDEVYELPGKEVRR

SEQ ID NO: 9193 - DNA, 693 bp, Homo sapiens
caggtgccacgccaaaaattatacctctcatccacaaatcttagagttgcatcatgtacaaatacttggtttctgaagaattctggactgcaagttaaagaaaatgaggaagttgaggctcagagagcaaataaacttcaaaagatcatggaggtgctaagagaggttaccataccagataaaataagaagttcaatgatttctgcatctccaaggaaaagaagctacctctaatgcatgcttcatggacctcctaccagaaaacaacagtgctctccagttcaagatgcaagattttagagtaatgtcacattcagggatttttaattcatagataccctatctaaagttacaacagagtattactgacttggctgcatttgaaaaaaactattcagaaatactcacattgaaacttacatccctcatttttgataaaggcttttgtgacagatagttagttgttttccactatgttcttccttttgtccacaggaataaaattttagctggtcacttagccacccagtgagagaatacattcctggcctcccttgaagttgttgcttggtgtggaccaatggtatgtgagtggaaattaataatgggcacaacttccaggtcatcttcaacttaaaagacaactactctaggctgggcacagtggctcacgcctgtaatcccagcactttg

SEQ ID NO: 9194 - protein, 40 aa, Homo sapiens
IPYLKLQQSITDLAAFEKNYSEILTLKLTSLIFDKGFCDR

SEQ ID NO: 9195 - DNA, 452 bp, Homo sapiens
cacgccaaaaattatacctctcatccacaaatcttagagttgcatcatgtacaaatacttggtttctgaagaattctggactgcaagttaaagaaaaggttaccataccagataaaataagaagttcaatgatttctgcatctccaaggaaaagaagctacctctaatgcatgcttcatggacctcctaccagaaaacaacagtgctctccagttcaagatgcaagattttagagtaatgtcacattcagggatttttaattcatagataccctatctaaagttacaacagagtattactgacttggctgcatttgaaaaaaactattcagaaatactcacattgaaacttacatccctcatttttgataaaggcttttgtgacagatagttagttgttttccactatgttcttccttttgtccacaggaataaaattttagctggtcactt

SEQ ID NO: 9196 - protein, 40 aa, Homo sapiens; identical to SEQ ID NO: 9194

SEQ ID NO: 9197 - DNA, 1375 bp, Homo sapiens
ccatttctgcctggtgcctgtgcccttttgctggagcagccacagacaactgcctgatggagaaagaatgaacgctctgccttgcttatgctatcgatgggaataaagctaactgtgtttcttctattatatgggaaacctggattaatcaagctgtattctagtaccaagagtcgtattgtctcttgtggtctgactcatcacatgtaaacgtactgcagctttgctattaatgcagagtggtttttttttttttgtttttgttttttgcccctttcccaaacactgaaagaattgttaacctctgagcttcattttcaggatttgtgctgagctctagatcttttttctgtgaatagtatctgcattaaaccagtgatgaagaaatgaagacaaattagaagtggaaacagaatagtgagattttattttttattttcaattataagcaaaacagctactggtaactatatgaccttgcaggcaagagtgggtatcgctgtgatcatctctgtcacagcagttgtttctcatttcattctatattgtgtggtgttgtgtcaccaaaaacaatgattgttttgtgcaagtaaatttcagagatagagcaataagactattttggtagaggaaaaatatttttaaatgagcttggactcagttttagttattgacatgttggtgtgaaatttcttcttaagtattgcagtaatccaacagaaataatagaatttcgttatatttaggaagttacaaattatgtagtcataattttaaacttgtttttccagtagtacttattaactttaaaaaaaaaaaaaacccagctgtgctgttcagagaatgtttgtaagtgttgtacagaagaggaggaaaaactacttgtgctcttccaactgtgacttttatcacatagcttggaatttagtgttttaaaagatcgaatgagtcgagtgtgtattgttgttttggaggaggtagaagatgaatctcctgcattcatttctaaattgccacaggaaaataaatccctacattctccaccttctggaaatgtattggtaagatatccatcactggtgcaagctatatttaacggagatcctgatgaagttcgagcactaatatttaagaaagaagatgttaactttcagcagtacttctggaatagaaattctaaacattagcctgccgaacaactggattgcatttgatgattacaattgtccagtcacagatggcatcacctctactttttattattaatattagttttaattgccaaatcataattgtatatatttgtagagtacaatgtaatattttggtatatgtatacaatgtgggatgattaaatcaagctaatatatccatc

SEQ ID NO: 9198 - protein, 80 aa, Homo sapiens
MSRVCIVVLEEVEDESPAFISKLPQENKSLHSPPSGNVLVRYPSLVQAIFNGDPDEVRALIFKKEDVNFQQYFWNRNSKH

SEQ ID NO: 9199 - DNA, 390 bp, Homo sapiens
gaattttttagtttgatttggattagtcacagaactggcatgaaccttctaattgtgaaggctgtccaaatgcactatttttttctcctgctagaggaagttacatcccgagaagtagctcagatctctggtaagtccctacattctccaccttctggaaatgtattggtaagatatccatcactggtgcaagctatatttaacggagatcctgatgaagttcgagcactaatatttaagaaagaagatgttaactttcagcagtacttctggaatagaaattctaaacattagcctgccgaacaactggattgcatttgatgattacaattgtccagtcacagatggcatcacctctactttttattattaatattagttttaattgcc

SEQ ID NO: 9200 - protein, 84 aa, Homo sapiens
MNLLIVKAVQMHYFFLLLEEVTSREVAQISGKSLHSPPSGNVLVRYPSLVQAIFNGDPDEVRALIFKKEDVNFQQYFWNRNSKH

SEQ ID NO: 9201 - DNA, 167 bp, Homo sapiens
tacagagttctgtcctcagatgtgaggaaaggacttttcaaagatgagttctaaatgtttgtttagagatggcagcaacaagccacaggctgtaagaggaacgtgaatctacctttttttgttgttgttttttttgatacagagtcttgctcttttgcccaggctgg

SEQ ID NO: 9202 - protein, 32 aa, Homo sapiens
RWQQQATGCKRNVNLPFFVVVFFDTESCSFAQ

SEQ ID NO: 9203 - DNA, 378 bp, Homo sapiens
tagtatttttggtaacaggaaataaatgtaattctcatctataacaactcttattctaagtttctgaatttctctactcaattgcctttttaaagtattttaactgtcttgtgctagatgttttaatattatctttggacttaaatcctgaggaatagaaaatacatatctttaaatttataaatagataaatctagacgagtaaacccttaccaataagaatgtcaacttacgccgggcatggtggctcacgcctgtagtcccagctactagggaggctgaggcaggagaattgcttgaactagggaggcagaggttgcaatgcgccaagatcgtgccgctgcactccagcctggtgacagagcaagactccgtctc

SEQ ID NO: 9204 - protein, 56 aa, Homo sapiens
TLTNKNVNLRRAWWLTPVVPATREAEAGELLELGRQRLQCAKIVPLHSSLVTEQDS

SEQ ID NO: 9205 - DNA, 4208 bp, Homo sapiens
aaattctaagttgctacaagctgcagcaagtgtgtgtcagtgggaggtgagaaaggcaaacagagggctgaaaactgagccaggaacctgcctagtggataatcaaaactcgactataaataactaatggaacgacgaacgtgtttagtgaagttattttctaaagcagcgtacaggcaaaatgagtgctttcctggagcaaatcctcaagctgttccagaaggatattgccaaatatcagatcataaaggacaggaattctgaagaggataaaatcgtagacagaccattaccaaaggagttggacttggagggagtgctgctggcagatggcccttacttgcaactctcttctggaatctcttttttatgcatgcagctgtctatcccaagctcataccagcttcctggggcaaccaatgagtggtctacacagaagtatactctgtcatttcactccaattcagaagaactctgaagggccatcccaacttcagagcttcccaggaggcgaacagtcagcttcaacaagcagcaggtttgatcaaccattcttctcagagcaagaaacctaccatactggtgtctgcagcagcaccctcaggacagcctgcccacagccagcgtcatcctctgtttccatgatgaggcctggtccactctcctgcggactgtacacagcatcctcgacacagtgcccagggccttcctgaaggagatcatcctcgtggacgacctcagccagcaaggacaactcaagtctgctctcagcgaatatgtggccaggctggagggggtgaagttactcaggagcaacaagaggctgggtgccatcagggcccggatgctgggggccaccagagccaccggggatgtgctcgtcttcatggatgcccactgcgagtgccacccaggctggctggagcccctcctcagcagaatagctggtgacaggagccgagtggtatctccggtgatagatgtgattgactggaagactttccagtattacccctcaaaggacctgcagcgtggggtgttggactggaagctggatttccactgggaacctttgccagagcatgtgaggaaggccctccagtcccccataagccccatcaggagccctgtggtgcccggagaggtggtggccatggacagacattacttccaaaacactggagcgtatgactctcttatgtcgctgcgaggtggtgaaaacctcgaactgtctttcaaggcctggctctgtggtggctctgttgaaatccttccctgctctcgggtaggacacatctaccaaaatcaggattcccattcccccctcgaccaggaggccaccctgaggaacagggttcgcattgctgagacctggctggggtcattcaaagaaaccttctacaagcatagcccagaggccttctccttgagcaaggctgagaagccagactgcatggaacgcttgcagctgcaaaggagactgggttgtcggacattccactggtttctggctaatgtctaccctgagctgtacccatctgaacccaggcccagtttctctggaaagctccacaacactggacttgggctctgtgcagactgccaggcagaaggggacatcctgggctgtcccatggtgttggctccttgcagtgacagccggcagcaacagtacctgcagcacaccagcaggaaggagattcactttggcagcccacagcacctgtgctttgctgtcaggcaggagcaggtgattcttcagaactgcacggaggaaggcctggccatccaccagcagcactgggacttccaggagaatgggatgattgtccacattctttctgggaaatgcatggaagctgtggtgcaagaaaacaataaagatttgtacctgcgtccgtgtgatggaaaagcccgccagcagtggcgttttgaccagatcaatgctgtggatgaacgatgaatgtcaatgtcagaaggaaaagagaattttggccatcaaaatccagctccaagtgaacttaaagagcttatatatttcatgaagctgatccttttgtgtgtgtgctcctggtgttaggagagaaaaaagctctatgaaagaatataggaagtttctccttttcacaccttatttcattgactgctggctgctttaaaaaaaaaaaaaaaggatccattgtaccgttgtcttcatcactgggaaatgattattacatagtacagaagattctttgtttttctccactgagcacttaacaattgctttctctctggcctggacattctctggcagcacctccaggatacataaattcaatggatcaatttatttgtcttcaaatggccttaacttggattgtctgtttggccaaccatgaaaattaaagagtgaagcagatgtaatggcctgacattccaaaaactctgaattgggtttattagcacaaatgttgtgttcatttgttgagccatatctcagaagaaggaaagggagctacagaaaggaggtttaggattgcagagaagatgcaagagcactttggcccaattctccagctcaacccagcagctgaaaagcttcaagagatctaggaaaagacattttcatgttaatgagaatttccaccattgtagagaatttccttcctactgagaatctacctctattccccctgccctagctcttctctaacttggttaaccataaccataaccagattcccttgcaatcgatttctctttagtcgttggtgttagaagtaccagcacaatttgagcattcccattaacaaaggtgttcacagttgagaaactctcctgccgggcgcggtggctcatgcctgtaattccagcactttgggaggcagagttgggaggatcacctgatgtcaggggtttgagaccagcctggtcaacattgcaaaaccttgtctctactaaaaatacaaaaattagctgggcatggtggcgcatacctgtaatcccagctacttgggaggctgaggcaagagaatcgcttgaacccaggaggcagaggttgcagtgagctgagatcatgccattgcactccaacctgggtgacagagtgagactccatctcaaaaaaaaaaaaaaagagagaaactctcctgatgccctgttacagggtttgcactgactggagcagaaacagcaacctttctaaaaaagcaaacctttttcctgggaggaaaatgccagagcctgagccaaaattcttatgacaggtaacatttgggtgttaatgtccatgagagctgacagggccatctctgagcccatataactgtctggaacccccaaatgtgtccacaggttgaatgtccatgagtgtgggaagaacacggctcatctggagcacagctgaggctagtaagagctaaatgactttccttgctatgacttggcttacctgaattagctgtaagagttgccgaatgggatgggttctgctatttaataaacagcattcatattcatttttccccagatggagttacctacctttccacatggtcagcttagaaatcttcccctaaagatgctaatctcctttgggctgtctcagaacacagtatccttcaaataagaaaaactgagtgggaagtgcagtgtttccaaacaatacctatcataactacgtattcattgtctacctgctaagtcaagggttcactgcatttctccttcctcagaatacactctggacctgtgctgtctaatatggtagccactaacaaaatgtggccattttgatggaaatccattaaaatcaaagaaaatttaaaactcaattcctcaattgggctggccacatttcaaatgctcactacccacctgtggctagggtctacttctactgtattggcgagcatggatatagaacatttcatcacagttctgttggaccaatctagatagattcattatcccatctagagaagagactttagtcactgtcttcttgcttcagacccatctatatttaaaacaaatttccctaaatcctgagactgagacggagctacaaattctcagatggcgaccgtgtaaatggtattagcggctgaagaaaaaaaatttttcaagacctctgttttttaactgaactttatcattggcattgtgggtctttgaagttgctgggataaattaatataattaaataaaagactgaatttaattgc

SEQ ID NO: 9206 - protein, 372 aa, Homo sapiens
MLGATRATGDVLVFMDAHCECHPGWLEPLLSRIAGDRSRVVSPVIDVIDWKTFQYYPSKDLQRGVLDWKLDFHWEPLPEHVRKALQSPISPIRSPVVPGEVVAMDRHYFQNTGAYDSLMSLRGGENLELSFKAWLCGGSVEILPCSRVGHIYQNQDSHSPLDQEATLRNRVRIAETWLGSFKETFYKHSPEAFSLSKAEKPDCMERLQLQRRLGCRTFHWFLANVYPELYPSEPRPSFSGKLHNTGLGLCADCQAEGDILGCPMVLAPCSDSRQQQYLQHTSRKEIHFGSPQHLCFAVRQEQVILQNCTEEGLAIHQQHWDFQENGMIVHILSGKCMEAVVQENNKDLYLRPCDGKARQQWRFDQINAVDER

SEQ ID NO: 9207 - DNA, 5043 bp, Homo sapiens
aaattctaagttgctacaagctgcagcaagtgtgtgtcagtgggaggtgagaaaggcaaacagagggctgaaaactgagccaggaacctgcctagtggataatcaaaactcgactataaataactaatggaacgacgaacgtgtttagtgaagttattttctaaagcagcgtacaggcaaaatgagtgctttcctggagcaaatcctcaagctgttccagaaggatattgccaaatatcagatcataaaggacaggaattctgaagaggataaaatcgtagacagaccattaccaaaggagttggacttggagggagtgctgctggcagatggcccttacttgcaactctcttctggaatctcttttttatgcatgcagctgtctatcccaagctcataccagcttcctggggcaaccaatgagtggtctacacagaagtatactctgtcatttcactccaattcagaagaactctgaagggccatcccaacttcagagcttcccaggaggcgaacagtcagcttcaacaagcagcaggtttgatcaaccattcttctcagagcaagaaacctaccatactggtgtctgcagcagcaccctcaggacagcctgcccacagccagcgtcatcctctgtttccatgatgaggcctggtccactctcctgcggactgtacacagcatcctcgacacagtgcccagggccttcctgaaggagatcatcctcgtggacgacctcagccagcaaggacaactcaagtctgctctcagcgaatatgtggccaggctggagggggtgaagttactcaggagcaacaagaggctgggtgccatcagggcccggatgctgggggccaccagagccaccggggatgtgctcgtcttcatggatgcccactgcgagtgccacccaggctggctggagcccctcctcagcagaatagctggtgacaggagccgagtggtatctccggtgatagatgtgattgactggaagactttccagtattacccctcaaaggacctgcagcgtggggtgttggactggaagctggatttccactgggaacctttgccagagcatgtgaggaaggccctccagtcccccataagccccatcaggagccctgtggtgcccggagaggtggtggccatggacagacattacttccaaaacactggagcgtatgactctcttatgtcgctgcgaggtggtgaaaacctcgaactgtctttcaaggcctggctctgtggtggctctgttgaaatccttccctgctctcgggtaggacacatctaccaaaatcaggattcccattcccccctcgaccaggaggccaccctgaggaacagggttcgcattgctgagacctggctggggtcattcaaagaaaccttctacaagcatagcccagaggccttctccttgagcaaggctgagaagccagactgcatggaacgcttgcagctgcaaaggagactgggttgtcggacattccactggtttctggctaatgtctaccctgagctgtacccatctgaacccaggcccagtttctctggaaagctccacaacactggacttgggctctgtgcagactgccaggcagaaggggacatcctgggctgtcccatggtgttggctccttgcagtgacagccggcagcaacagtacctgcagcacaccagcaggaaggagattcactttggcagcccacagcacctgtgctttgctgtcaggcaggagcaggtgattcttcagaactgcacggaggaaggcctggccatccaccagcagcactgggacttccaggagaatgggatgattgtccacattctttctgggaaatgcatggaagctgtggtgcaagaaaacaataaagatttgtacctgcgtccgtgtgatggaaaagcccgccagcagtggcgttttgaccagatcaatgctgtggatgaacgatgaatgtcaatgtcagaaggaaaagagaattttggccatcaaaatccagctccaagtgaacttaaagagcttatatatttcatgaagctgatccttttgtgtgtgtgctcctggtgttaggagagaaaaaagctctatgaaagaatataggaagtttctccttttcacaccttatttcattgactgctggctgctttaaaaaaaaaaaaaaaggatccattgtaccgttgtcttcatcactgggaaatgattattacatagtacagaagattctttgtttttctccactgagcacttaacaattgctttctctctggcctggacattctctggcagcacctccaggatacataaattcaatggatcaatttatttgtcttcaaatggccttaacttggattgtctgtttggccaaccatgaaaattaaagagtgaagcagatgtaatggcctgacattccaaaaactctgaattgggtttattagcacaaatgttgtgttcatttgttgagccatatctcagaagaaggaaagggagctacagaaaggaggtttaggattgcagagaagatgcaagagcactttggcccaattctccagctcaacccagcagctgaaaagcttcaagagatctaggaaaagacattttcatgttaatgagaatttccaccattgtagagaatttccttcctactgagaatctacctctattccccctgccctagctcttctctaacttggttaaccataaccataaccagattcccttgcaatcgatttctctttagtcgttggtgttagaagtaccagcacaatttgagcattcccattaacaaaggtgttcacagttgagaaactctcctgccgggcgcggtggctcatgcctgtaattccagcactttgggaggcagagttgggaggatcacctgatgtcaggggtttgagaccagcctggtcaacattgcaaaaccttgtctctactaaaaatacaaaaattagctgggcatggtggcgcatacctgtaatcccagctacttgggaggctgaggcaagagaatcgcttgaacccaggaggcagaggttgcagtgagctgagatcatgccattgcactccaacctgggtgacagagtgagactccatctcaaaaaaaaaaaaaaagagagaaactctcctgatgccctgttacagggtttgcactgactggagcagaaacagcaacctttctaaaaaagcaaacctttttcctgggaggaaaatgccagagcctgagccaaaattcttatgacaggtaacatttgggtgttaatgtccatgagagctgacagggccatctctgagcccatataactgtctggaacccccaaatgtgtccacaggttgaatgtccatgagtgtgggaagaacacggctcatctggagcacagctgaggctagtaagagctaaatgactttccttgctatgacttggcttacctgaattagctgtaagagttgccgaatgggatgggttctgctatttaataaacagcattcatattcatttttccccagatggagttacctacctttccacatggtcagcttagaaatcttcccctaaagatgctaatctcctttgggctgtctcagaacacagtatccttcaaataagaaaaactgagtgggaagtgcagtgtttccaaacaatacctatcataactacgtattcattgtctacctgctaagtcaagggttcactgcatttctccttcctcagaatacactctggacctgtgctgtctaatatggtagccactaacaaaatgtggccattttgatggaaatccattaaaatcaaagaaaatttaaaactcaattcctcaattgggctggccacatttcaaatgctcactacccacctgtggctagggtctacttctactgtattggcgagcatggatatagaacatttcatcacagttctgttggaccaatctagatagattcattatcccatctagagaagagactttagtcactgtcttcttgcttcagacccatctatatttaaaacaaatttccctaaatcctgagactgagacggagctacaaattctcagatggcgaccgtgtaaatggtattagcggctgaagaaaaaaaatttttcaagacctctgttttttaactgaactttatcattggcattgtgggtctttgaagttgctgggataaattaatataattaaataaaagactgaatttaattgcataaattgtattaggtggcaattaacaaaaggacccagatggcttattgcctaattgggtgaacaaagcaagaatatggtgtttcttgcttccttaaccagctccatgatttattactttattgcagaagtggctgtcaactcagtccctggctggtatttacagacccttaatttaagtaaaacagatgcctccatttagttctagaaggaccttctcctttagtgtaaccaagtgttcaaattcccttcttctctatgaactcagcattcattttatccataatgatcaatttaaaagtagagaaacttgtcagttgagagatctgattcccaagagattggtttcacttgtctacctgaattttgtgattggattttgttgttcgttttttaagattgaattttgttaccacccccaccaagttcatcatcattattaactataccactggggagaacagagagaagtgtccggccagcagtctagagtcccacactcttcatgctgtattacaacagtaagagcagatatccttcctggagagtgcctgacctgtttcctctttggttttaatgccatagatcccactggaaaattcagaattccaactaacaaagacatggtggttgaaaagtcctcagtgacaataatgatggcaccactgcagcagaacttgacattttagaggtcatgttattgtgcttaatgtgagggggttctattctctactgaaaggctatgaaaaagccagttggacaccaagtgatctgtgaccagtcaccaaatttggacaaacaaaatgcaaacaagttgcatttttaaaaagcattca

SEQ ID NO: 9208 - protein, 372 aa, Homo sapiens; identical to SEQ ID NO: 9206

SEQ ID NO: 9209 - DNA, 4615 bp, Homo sapiens
atgcgcagccaggccccagcctgttggccagggcgggatcaaccacaggaaggaaccagctgcagctgggcgtgggtgccttccccgtggaaagccgctggcagggagtctacagccccttccgggactttgtgtgtgctggctgccccagggacctgcaggaggccctgctgggcttcgacgtgcagagctccagggagctgcgtaggtctcaggattacctgtcctgcgagaggtgaggccggctgtgtgagcatgcacaggttagggtgggctggggagggcttcctggggggagggggctgggccgaggtgtgggtgagggatgctgtgtgtggtgcccaggacccaccctgaggacagtgtgggcagtatggaagacatcctggaggagctgctgcagcaccgggagcccaaggccctgcagctgtacctcaggaaggctctgagcaactcactgcaccccctgggaaagctgctccggacactgatgctgaccttccaggctacctacgcaggtgtcggggccaacaagcacctgcaggagctggcccaggaggaggtgaagcagcatgcccaggaactctgggctgcctacaggctgagcttggccctggactcggaacacacctgcagtcccaggctgggctgtgaccccatgaaacactgcaaatagaagccttagatgctatagttccttctgctgctggattctcaggctaacatcctggagctccaaccttctaacttctgtggtttgagaggatgaaccctgcaggccatgtccacagttctgagaggccacctgcttttgcctttgttgactggtggtagaactccagttctgtggcaaggggcagccacaccatttctctctcattgactcacaggggtctgctgcgagttgccttagagcgcaagggccaggccctggaggaggatgaagacacagagacaaggtgactggcgcaggtctccttggggcctgccgtgtccagggaggcctcatgcgtctgctcctaggacctcccttggggaaagaggtgcttctggggaagtgctgggcattcactctattgaccaaacattgtgcattgatcgtttgtggattagaatgacccatgacctctgttctgtgaggaaccagggagggggcactgctacaatgcattgaatgcatctttgttctaaatgtatgatcccaatctcatctttcgcatgcagaaggtgagtagctccccgaggcaccctcctctccctgcacacagatggggaaaccgagggctggtagggatgagcctgaggttatacaggagttaggtgggcatgaaatttgtttcccccagtccctggagcaaaccttacaatttgcctttagattctagacctgaaagtgttcctgatcagagaggccttcctgtcactgccttgcaggaggcaagggaaatggggttagacattagggaggattccccgcccggagtcctagcacagcaaaccaggaggtggaactgaatcagcctggaatggctgctgagagctcagctgcaagttgctggtccatctggggccctggttttgctttcagtcaaatggggatccaactcctgccccacctgccatcttggttgtcaaagtcaaaggagggaatgaagttatgaattgaattgggcaaatgatgactgagaacaggcttggaaaaggttttctggggaggaggaggctggaggccaggacactgtttgttgtggaactaggagctctttgagacgagactccaagtagtaatcccagaccccaccttgctcatcccaacctgttccggtctccccatcagggacctccaggtgcatggattggtgctgcccctcatgctgcccagcttctactcagagctcttcacgctctacctgctgcttcatgagcgggaggacagcttctacagccagggcattgccaacttgagcctctttcctgatacccaactgctcgagttcctggatgtgcagaagcacttgtggcccctcaaggacctcacgctgacgagcaatcagaggtactccctggtcagggacaagtgtttcctgtcagccaccgagtgcctgcagaagatcatgaccacggtggacccacgggagaagctggaggtgctggagaggacatacggggaaattgagggcacggtgtcgagggtattgggccgggagtacaagctgcccatggacgacctgctgccacttctcatctacgtggtgtcgcgcgcccgatggggaagccaaggcccagaaaagggagggtcccagccagggtgctggggtgctagaggtagagtgaggaccacaccccaggtgtccagccatccaggccagcgctccttccccagctgcctgtccgcgacaggcctcttctccttgtctccctcgctctcttggtggggcggtgttctccagaattcagcacctgggagccgagatccacctgatccgtgacatgatggaccccaaccacacaggaggcctgtatgacttcctgctcacagccctggagtcctgttacgagcacatccagaaagaagacatgaggctgcaccgcttacctggccactggcactccagggagctctggtagcctggcctttcctggacagactgaagagctgagcagggcactgccagcctgtccctcattacccaaggcaaggggcaggacaggccctcagaagcagctcttggaggagatgagcattttgttttgcacaggaagatgctgctgctgccctgactgggatgagggtgaggggtgacgggtgtggccctggatgtggtggttttcccttggccactagcccatcttcaatgaccccttaatctgcagcagctcacaggctgggggtgaggagtccctggcttctcttagcctgagcctttctcccaagttccagagcctctccgggcctcagtgctgccatctgtacaatggtggagtgagtacgctgtaaaggaccttccattcattttgctgaattccagagtccttttggaaaactgactttagtctgctgggctgtattgacctctggcaggctcgaagcctcactgggtatgcagtcaacaggatgggcctggagatccgtgaactgcaggccacgtacccatgacgtaaacggcggcactggagcaagctggggcggggggtgggtaaaccctcactgccagcaggccccaagtggcttgtaaatcattctcctgtgatgtctgtgggcctgcgtggggacaacaggggcacatgacatctgcctgggccctgaccaataaaccctcagacccaggacccaggaccctgctgtagttggggagcaggagtacctttgggaggggaggactttatttaaacagtggttctagtgtgggaccaagagaggcaggagctgggtcttggggcagctttattcctgttgggcctcagtttctcttccccacacagtttatcttccgtcacattgtgccgggtgacgtgcacggtctccctctgccctagccggagatgcatgatgacaggcagtgtgatgtgttctgaaagtgtccagggcaaagcgtagggagagggtggatttgtgcagggtgcagctctggagaagaagctggatcactcttggtcccattccctaggccctgagcaagtcaggctcctggctctgggtgtggctcccccaaacgaagtactgacttcagcctgtgaggggagggttgagggaggctctggaaagcccagccacacctgagtccctggcagtagccttggggcagagggcacccgcagagtcccagagatgatgtgggcagtgggcagagagagccttggcgcctctgtttgccaccacttccccaggaaggagggacagcatttctctggctggttccactaaatgtgccagcccaaatgcagggcatgggctctggttctgccaggagcctgtgacacccccaggaagggggtggaactgaggaagagcgaggatatgcaggcactcatgcttaccgggactggggcagctcactaggattctatcctttccaatcggcatcagccagctcttgtcccctgataagtgaggacagcctgaccctggcctcaaatgcagccatccctgagttcatgcgatgctgacgggaccccagcacacttccctgcctcctttgagatctgcgagcccttgctgcagttcagattcaacaaggccctctgcccaccctctcactaggcctcacccaacaccagtggaactggagcctctggctgggcacagtggctcactttgggaggctgaggcaggaaggctgctggaaactgagagttcaagaccagcctgggcaacatagtgagaccctgtctctacaaatacaaaataaaataattagctgggtgtgttggtgtgtgcctgtggtcccagctactcgggaggctgaggtgggaagatccctgagcctggagggtcgaggttgcagtgagcggagatcgcacctctgcactcaatcctgggtgacaaaatgaaaccctgcctcaaaaataaaaataaaaataaaaataaaataaataaaaaagagcatctggacag

SEQ ID NO: 9210 - protein, 205 aa, Homo sapiens
MLPSFYSELFTLYLLLHEREDSFYSQGIANLSLFPDTQLLEFLDVQKHLWPLKDLTLTSNQRYSLVRDKCFLSATECLQKIMTTVDPREKLEVLERTYGEIEGTVSRVLGREYKLPMDDLLPLLIYVVSRARWGSQGPEKGGSQPGCWGARGRVRTTPQVSSHPGQRSFPSCLSATGLFSLSPSLSWWGGVLQNSAPGSRDPPDP

SEQ ID NO: 9211 - DNA, 2640 bp, Homo sapiens
atcccagaccccaccttgctcatcccaacctgttccggtctccccatcagggacctccaggtgcatggattggtgctgcccctcatgctgcccagcttctactcagagctcttcacgctctacctgctgcttcatgagcgggaggacagcttctacagccagggcattgccaacttgagcctctttcctgatacccaactgctcgagttcctggatgtgcagaagcacttgtggcccctcaaggacctcacgctgacgagcaatcagaggtactccctggtcagggacaagtgtttcctgtcagccaccgagtgcctgcagaagatcatgaccacggtggacccacgggagaagctggaggtgctggagaggacatacggggaaattgagggcacggtgtcgagggtattgggccgggagtacaagctgcccatggacgacctgctgccacttctcatctacgtggtgtcgcgcgcccgaattcagcacctgggagccgagatccacctgatccgtgacatgatggaccccaaccacacaggaggcctgtatgacttcctgctcacagccctggagtcctgttacgagcacatccagaaagaagacatgaggctgcaccgcttacctggccactggcactccagggagctctggtagcctggcctttcctggacagactgaagagctgagcagggcactgccagcctgtccctcattacccaaggcaaggggcaggacaggccctcagaagcagctcttggaggagatgagcattttgttttgcacaggaagatgctgctgctgccctgactgggatgagggtgaggggtgacgggtgtggccctggatgtggtggttttcccttggccactagcccatcttcaatgaccccttaatctgcagcagctcacaggctgggggtgaggagtccctggcttctcttagcctgagcctttctcccaagttccagagcctctccgggcctcagtgctgccatctgtacaatggtggagtgagtacgctgtaaaggaccttccattcattttgctgaattccagagtccttttggaaaactgactttagtctgctgggctgtattgacctctggcaggctcgaagcctcactgggtatgcagtcaacaggatgggcctggagatccgtgaactgcaggccacgtacccatgacgtaaacggcggcactggagcaagctggggcggggggtgggtaaaccctcactgccagcaggccccaagtggcttgtaaatcattctcctgtgatgtctgtgggcctgcgtggggacaacaggggcacatgacatctgcctgggccctgaccaataaaccctcagacccaggacccaggaccctgctgtagttggggagcaggagtacctttgggaggggaggactttatttaaacagtggttctagtgtgggaccaagagaggcaggagctgggtcttggggcagctttattcctgttgggcctcagtttctcttccccacacagtttatcttccgtcacattgtgccgggtgacgtgcacggtctccctctgccctagccggagatgcatgatgacaggcagtgtgatgtgttctgaaagtgtccagggcaaagcgtagggagagggtggatttgtgcagggtgcagctctggagaagaagctggatcactcttggtcccattccctaggccctgagcaagtcaggctcctggctctgggtgtggctcccccaaacgaagtactgacttcagcctgtgaggggagggttgagggaggctctggaaagcccagccacacctgagtccctggcagtagccttggggcagagggcacccgcagagtcccagagatgatgtgggcagtgggcagagagagccttggcgcctctgtttgccaccacttccccaggaaggagggacagcatttctctggctggttccactaaatgtgccagcccaaatgcagggcatgggctctggttctgccaggagcctgtgacacccccaggaagggggtggaactgaggaagagcgaggatatgcaggcactcatgcttaccgggactggggcagctcactaggattctatcctttccaatcggcatcagccagctcttgtcccctgataagtgaggacagcctgaccctggcctcaaatgcagccatccctgagttcatgcgatgctgacgggaccccagcacacttccctgcctcctttgagatctgcgagcccttgctgcagttcagattcaacaaggccctctgcccaccctctcactaggcctcacccaacaccagtggaactggagcctctggctgggcacagtggctcactttgggaggctgaggcaggaaggctgctggaaactgagagttcaagaccagcctgggcaacatagtgagaccctgtctctacaaatacaaaataaaataattagctgggtgtgttggtgtgtgcctgtggtcccagctactcgggaggctgaggtgggaagatccctgagcctggagggtcgaggttgcagtgagcggagatcgcacctctgcactcaatcctgggtgacaaaatgaaaccctgcctcaaaaataaaaataaaaataaaaataaaataaataaaaaagagcatctgg

SEQ ID NO: 9212 - protein, 190 aa, Homo sapiens
MLPSFYSELFTLYLLLHEREDSFYSQGIANLSLFPDTQLLEFLDVQKHLWPLKDLTLTSNQRYSLVRDKCFLSATECLQKIMTTVDPREKLEVLERTYGEIEGTVSRVLGREYKLPMDDLLPLLIYVVSRARIQHLGAEIHLIRDMMDPNHTGGLYDFLLTALESCYEHIQKEDMRLHRLPGHWHSRELW

SEQ ID NO: 9213 - DNA, 3318 bp, Homo sapiens
aggaaggaaccagctgtaagggagggcagagggggatgtcttggaggggaatcccagactttggacactggtctctcttggaccaagaccccctctctggcttggcctccagatctgcccacctttctgtctccgtctttccaggattccatatgcttctgtctgtcttctcgtcgcagggtagattctctgtccctttctctgctgctcttcctcctggagccgtggaggcagctgggcgtgggtgccttccccgtggaaagccgctggcagggagtctacagccccttccgggactttgtgtgtgctggctgccccagggacctgcaggaggccctgctgggcttcgacgtgcagagctccagggagctgcgtaggtctcaggattacctgtcctgcgagaggacccaccctgaggacagtgtgggcagtatggaagacatcctggaggagctgctgcagcaccgggagcccaaggccctgcagctgtacctcaggaaggctctgagcaactcactgcaccccctgggaaagctgctccggacactgatgctgaccttccaggctacctacgcaggtgtcggggccaacaagcacctgcaggagctggcccaggaggaggtgaagcagcatgcccaggaactctgggctgcctacaggggtctgctgcgagttgccttagagcgcaagggccaggccctggaggaggatgaagacacagagacaagggacctccaggtgcatggattggtgctgcccctcatgctgcccagcttctactcagagctcttcacgctctacctgctgcttcatgagcgggaggacagcttctacagccagggcattgccaacttgagcctctttcctgatacccaactgctcgagttcctggatgtgcagaagcacttgtggcccctcaaggacctcacgctgacgagcaatcagaggtactccctggtcagggacaagtgtttcctgtcagccaccgagtgcctgcagaagatcatgaccacggtggacccacgggagaagctggaggtgctggagaggacatacggggaaattgagggcacggtgtcgagggtattgggccgggagtacaagctgcccatggacgacctgctgccacttctcatctacgtggtgtcgcgcgcccgaattcagcacctgggagccgagatccacctgatccgtgacatgatggaccccaaccacacaggaggcctgtatgacttcctgctcacagccctggagtcctgttacgagcacatccagaaagaagacatgaggctgcaccgcttacctggccactggcactccagggagctctggtagcctggcctttcctggacagactgaagagctgagcagggcactgccagcctgtccctcattacccaaggcaaggggcaggacaggccctcagaagcagctcttggaggagatgagcattttgttttgcacaggaagatgctgctgctgccctgactgggatgagggtgaggggtgacgggtgtggccctggatgtggtggttttcccttggccactagcccatcttcaatgaccccttaatctgcagcagctcacaggctgggggtgaggagtccctggcttctcttagcctgagcctttctcccaagttccagagcctctccgggcctcagtgctgccatctgtacaatggtggagtgagtacgctgtaaaggaccttccattcattttgctgaattccagagtccttttggaaaactgactttagtctgctgggctgtattgacctctggcaggctcgaagcctcactgggtatgcagtcaacaggatgggcctggagatccgtgaactgcaggccacgtacccatgacgtaaacggcggcactggagcaagctggggcggggggtgggtaaaccctcactgccagcaggccccaagtggcttgtaaatcattctcctgtgatgtctgtgggcctgcgtggggacaacaggggcacatgacatctgcctgggccctgaccaataaaccctcagacccaggacccaggaccctgctgtagttggggagcaggagtacctttgggaggggaggactttatttaaacagtggttctagtgtgggaccaagagaggcaggagctgggtcttggggcagctttattcctgttgggcctcagtttctcttccccacacagtttatcttccgtcacattgtgccgggtgacgtgcacggtctccctctgccctagccggagatgcatgatgacaggcagtgtgatgtgttctgaaagtgtccagggcaaagcgtagggagagggtggatttgtgcagggtgcagctctggagaagaagctggatcactcttggtcccattccctaggccctgagcaagtcaggctcctggctctgggtgtggctcccccaaacgaagtactgacttcagcctgtgaggggagggttgagggaggctctggaaagcccagccacacctgagtccctggcagtagccttggggcagagggcacccgcagagtcccagagatgatgtgggcagtgggcagagagagccttggcgcctctgtttgccaccacttccccaggaaggagggacagcatttctctggctggttccactaaatgtgccagcccaaatgcagggcatgggctctggttctgccaggagcctgtgacacccccaggaagggggtggaactgaggaagagcgaggatatgcaggcactcatgcttaccgggactggggcagctcactaggattctatcctttccaatcggcatcagccagctcttgtcccctgataagtgaggacagcctgaccctggcctcaaatgcagccatccctgagttcatgcgatgctgacgggaccccagcacacttccctgcctcctttgagatctgcgagcccttgctgcagttcagattcaacaaggccctctgcccaccctctcactaggcctcacccaacaccagtggaactggagcctctggctgggcacagtggctcactttgggaggctgaggcaggaaggctgctggaaactgagagttcaagaccagcctgggcaacatagtgagaccctgtctctacaaatacaaaataaaataattagctgggtgtgttggtgtgtgcctgtggtcccagctactcgggaggctgaggtgggaagatccctgagcctggagggtcgaggttgcagtgagcggagatcgcacctctgcactcaatcctgggtgacaaaatgaaaccctgcctcaaaaataaaaataaaaataaaaataaaataaataaaaaagagcatctgg

SEQ ID NO: 9214 - protein, 300 aa, Homo sapiens; identical to SEQ ID NO: 762

SEQ ID NO: 9215 - DNA, 617 bp, Homo sapiens
atttgtgcagggtgcagctctggagaagaagctggatcatcatgcttaccgggactggggcagctcactaggattctatcctttccaatcggcatcagccagctcttgtcccctgataagtgaggacagcctgaccctggcctcaaatgcagccatccctgagttcatgcgatgctgacgggaccccagcacacttccctgcctcctttgagatctgcgagcccttgctgcagttcagattcaacaaggccctctgcccaccctctcactaggcctcacccaacaccagtggaactggagcctctggctgggcacagtggctcactttgggaggctgaggcaggaaggctgctggaaactgagagttcaagaccagcctgggcaacatagtgagaccctgtctctacaaatacaaaataaaataattagctgggtgtgttggtgtgtgcctgtggtcccagctactcgggaggctgaggtgggaagatccctgagcctggagggtcgaggttgcagtgagcggagatcgcacctctgcactcaatcctgggtgacaaaatgaaaccctgcctcaaaaataaaaataaaaataaaaataaaataaataaaaaagagca

SEQ ID NO: 9216 - protein, 72 aa, Homo sapiens
MLTGPQHTSLPPLRSASPCCSSDSTRPSAHPLTRPHPTPVELEPLAGHSGSLWEAEAGRLLETESSRPAWAT

SEQ ID NO: 9217 - DNA, 2130 bp, Homo sapiens
ggtcccagccagggtgctggggtgctagaggtagagtgaggaccacaccccaggtgtccagccatccaggccagcgctccttccccagctgcctgtccgcgacaggcctcttctccttgtctccctcgctctcttggtggggcggtgttctccagaattcagcacctgggagccgagatccacctgatccgtgacatgatggaccccaaccacacaggaggcctgtatgacttcctgctcacagccctggagtcctgttacgagcacatccagaaagaagacatgaggctgcaccgcttacctggccactggcactccagggagctctggtagcctggcctttcctggacagactgaagagctgagcagggcactgccagcctgtccctcattacccaaggcaaggggcaggacaggccctcagaagcagctcttggaggagatgagcattttgttttgcacaggaagatgctgctgctgccctgactgggatgagggtgaggggtgacgggtgtggccctggatgtggtggttttcccttggccactagcccatcttcaatgaccccttaatctgcagcagctcacaggctgggggtgaggagtccctggcttctcttagcctgagcctttctcccaagttccagagcctctccgggcctcagtgctgccatctgtacaatggtggagtgagtacgctgtaaaggaccttccattcattttgctgaattccagagtccttttggaaaactgactttagtctgctgggctgtattgacctctggcaggctcgaagcctcactgggtatgcagtcaacaggatgggcctggagatccgtgaactgcaggccacgtacccatgacgtaaacggcggcactggagcaagctggggcggggggtgggtaaaccctcactgccagcaggccccaagtggcttgtaaatcattctcctgtgatgtctgtgggcctgcgtggggacaacaggggcacatgacatctgcctgggccctgaccaataaaccctcagacccaggacccaggaccctgctgtagttggggagcaggagtacctttgggaggggaggactttatttaaacagtggttctagtgtgggaccaagagaggcaggagctgggtcttggggcagctttattcctgttgggcctcagtttctcttccccacacagtttatcttccgtcacattgtgccgggtgacgtgcacggtctccctctgccctagccggagatgcatgatgacaggcagtgtgatgtgttctgaaagtgtccagggcaaagcgtagggagagggtggatttgtgcagggtgcagctctggagaagaagctggatcactcttggtcccattccctaggccctgagcaagtcaggctcctggctctgggtgtggctcccccaaacgaagtactgacttcagcctgtgaggggagggttgagggaggctctggaaagcccagccacacctgagtccctggcagtagccttggggcagagggcacccgcagagtcccagagatgatgtgggcagtgggcagagagagccttggcgcctctgtttgccaccacttccccaggaaggagggacagcatttctctggctggttccactaaatgtgccagcccaaatgcagggcatgggctctggttctgccaggagcctgtgacacccccaggaagggggtggaactgaggaagagcgaggatatgcaggcactcatgcttaccgggactggggcagctcactaggattctatcctttccaatcggcatcagccagctcttgtcccctgataagtgaggacagcctgaccctggcctcaaatgcagccatccctgagttcatgcgatgctgacgggaccccagcacacttccctgcctcctttgagatctgcgagcccttgctgcagttcagattcaacaaggccctctgcccaccctctcactaggcctcacccaacaccagtggaactggagcctctggctgggcacagtggctcactttgggaggctgaggcaggaaggctgctggaaactgagagttcaagaccagcctgggcaacatagtgagaccctgtctctacaaatacaaaataaaataattagctgggtg

SEQ ID NO: 9218 - protein, 45 aa, Homo sapiens
MMDPNHTGGLYDFLLTALESCYEHIQKEDMRLHRLPGHWHSRELW

SEQ ID NO: 9219 - DNA, 2454 bp, Homo sapiens
atcccagaccccaccttgctcatcccaacctgttccggtctccccatcagggacctccaggtgcatggattggtgctgcccctcatgctgcccagcttctactcagagctcttcacgctctacctgctgcttcatgagcgggaggacagcttctacagccagggcattgccaacttgagcctctttcctgatacccaactgctcgagttcctggatgtgcagaagcacttgtggcccctcaaggacctcacgctgacgagcaatcagaggtactccctggtcagggacaagtgtttcctgtcagccaccgagtgcctgcagaagatcatgaccacggtggacccacgggagaagctggaggtgctggagaggacatacggggaaattgagggcacggtgtcgagggtattgggccgggagtacaagctgcccatggacgacctgctgccacttctcatctacgtggtgtcgcgcgcccgaattcagcacctgggagccgagatccacctgatccgtgacatgatggaccccaaccacacaggaggcctgtatgacttcctgctcacagccctggagtcctgttacgagcacatccagaaagaagacatgaggctgcaccgcttacctggccactggcactccagggagctctggtagcctggcctttcctggacagactgaagagctgagcagggcactgccagcctgtccctcattacccaaggcaaggggcaggacaggccctcagaagcagctcttggaggagatgagcattttgttttgcacaggaagatgctgctgctgccctgactgggatgagggtgaggggtgacgggtgtggccctggatgtggtggttttcccttggccactagcccatcttcaatgaccccttaatctgcagcagctcacaggctgggggtgaggagtccctggcttctcttagcctgagcctttctcccaagttccagagcctctccgggcctcagtgctgccatctgtacaatggtggagtgagtacgctgtaaaggaccttccattcattttgctgaattccagagtccttttggaaaactgactttagtctgctgggctgtattgacctctggcaggctcgaagcctcactgggtatgcagtcaacaggatgggcctggagatccgtgaactgcaggccacgtacccatgacgtaaacggcggcactggagcaagctggggcggggggtgggtaaaccctcactgccagcaggccccaagtggcttgtaaatcattctcctgtgatgtctgtgggcctgcgtggggacaacaggggcacatgacatctgcctgggccctgaccaataaaccctcagacccaggacccaggaccctgctgtagttggggagcaggagtacctttgggaggggaggactttatttaaacagtggttctagtgtgggaccaagagaggcaggagctgggtcttggggcagctttattcctgttgggcctcagtttctcttccccacacagtttatcttccgtcacattgtgccgggtgacgtgcacggtctccctctgccctagccggagatgcatgatgacaggcagtgtgatgtgttctgaaagtgtccagggcaaagcgtagggagagggtggatttgtgcagggtgcagctctggagaagaagctggatcactcttggtcccattccctaggccctgagcaagtcaggctcctggctctgggtgtggctcccccaaacgaagtactgacttcagcctgtgaggggagggttgagggaggctctggaaagcccagccacacctgagtccctggcagtagccttggggcagagggcacccgcagagtcccagagatgatgtgggcagtgggcagagagagccttggcgcctctgtttgccaccacttccccaggaaggagggacagcatttctctggctggttccactaaatgtgccagcccaaatgcagggcatgggctctggttctgccaggagcctgtgacacccccaggaagggggtggaactgaggaagagcgaggatatgcaggcactcatgcttaccgggactggggcagctcactaggattctatcctttccaatcggcatcagccagctcttgtcccctgataagtgaggacagcctgaccctggcctcaaatgcagccatccctgagttcatgcgatgctgacgggaccccagcacacttccctgcctcctttgagatctgcgagcccttgctgcagttcagattcaacaaggccctctgcccaccctctcactaggcctcacccaacaccagtggaactggagcctctggctgggcacagtggctcactttgggaggctgaggcaggaaggctgctggaaactgagagttcaagaccagcctgggcaacatagtgagaccctgtctctacaaatacaaaataaaataattagctgggtg

SEQ ID NO: 9220 - protein, 190 aa, Homo sapiens; identical to SEQ ID NO: 9212

SEQ ID NO: 9221 - DNA, 3132 bp, Homo sapiens
aggaaggaaccagctgtaagggagggcagagggggatgtcttggaggggaatcccagactttggacactggtctctcttggaccaagaccccctctctggcttggcctccagatctgcccacctttctgtctccgtctttccaggattccatatgcttctgtctgtcttctcgtcgcagggtagattctctgtccctttctctgctgctcttcctcctggagccgtggaggcagctgggcgtgggtgccttccccgtggaaagccgctggcagggagtctacagccccttccgggactttgtgtgtgctggctgccccagggacctgcaggaggccctgctgggcttcgacgtgcagagctccagggagctgcgtaggtctcaggattacctgtcctgcgagaggacccaccctgaggacagtgtgggcagtatggaagacatcctggaggagctgctgcagcaccgggagcccaaggccctgcagctgtacctcaggaaggctctgagcaactcactgcaccccctgggaaagctgctccggacactgatgctgaccttccaggctacctacgcaggtgtcggggccaacaagcacctgcaggagctggcccaggaggaggtgaagcagcatgcccaggaactctgggctgcctacaggggtctgctgcgagttgccttagagcgcaagggccaggccctggaggaggatgaagacacagagacaagggacctccaggtgcatggattggtgctgcccctcatgctgcccagcttctactcagagctcttcacgctctacctgctgcttcatgagcgggaggacagcttctacagccagggcattgccaacttgagcctctttcctgatacccaactgctcgagttcctggatgtgcagaagcacttgtggcccctcaaggacctcacgctgacgagcaatcagaggtactccctggtcagggacaagtgtttcctgtcagccaccgagtgcctgcagaagatcatgaccacggtggacccacgggagaagctggaggtgctggagaggacatacggggaaattgagggcacggtgtcgagggtattgggccgggagtacaagctgcccatggacgacctgctgccacttctcatctacgtggtgtcgcgcgcccgaattcagcacctgggagccgagatccacctgatccgtgacatgatggaccccaaccacacaggaggcctgtatgacttcctgctcacagccctggagtcctgttacgagcacatccagaaagaagacatgaggctgcaccgcttacctggccactggcactccagggagctctggtagcctggcctttcctggacagactgaagagctgagcagggcactgccagcctgtccctcattacccaaggcaaggggcaggacaggccctcagaagcagctcttggaggagatgagcattttgttttgcacaggaagatgctgctgctgccctgactgggatgagggtgaggggtgacgggtgtggccctggatgtggtggttttcccttggccactagcccatcttcaatgaccccttaatctgcagcagctcacaggctgggggtgaggagtccctggcttctcttagcctgagcctttctcccaagttccagagcctctccgggcctcagtgctgccatctgtacaatggtggagtgagtacgctgtaaaggaccttccattcattttgctgaattccagagtccttttggaaaactgactttagtctgctgggctgtattgacctctggcaggctcgaagcctcactgggtatgcagtcaacaggatgggcctggagatccgtgaactgcaggccacgtacccatgacgtaaacggcggcactggagcaagctggggcggggggtgggtaaaccctcactgccagcaggccccaagtggcttgtaaatcattctcctgtgatgtctgtgggcctgcgtggggacaacaggggcacatgacatctgcctgggccctgaccaataaaccctcagacccaggacccaggaccctgctgtagttggggagcaggagtacctttgggaggggaggactttatttaaacagtggttctagtgtgggaccaagagaggcaggagctgggtcttggggcagctttattcctgttgggcctcagtttctcttccccacacagtttatcttccgtcacattgtgccgggtgacgtgcacggtctccctctgccctagccggagatgcatgatgacaggcagtgtgatgtgttctgaaagtgtccagggcaaagcgtagggagagggtggatttgtgcagggtgcagctctggagaagaagctggatcactcttggtcccattccctaggccctgagcaagtcaggctcctggctctgggtgtggctcccccaaacgaagtactgacttcagcctgtgaggggagggttgagggaggctctggaaagcccagccacacctgagtccctggcagtagccttggggcagagggcacccgcagagtcccagagatgatgtgggcagtgggcagagagagccttggcgcctctgtttgccaccacttccccaggaaggagggacagcatttctctggctggttccactaaatgtgccagcccaaatgcagggcatgggctctggttctgccaggagcctgtgacacccccaggaagggggtggaactgaggaagagcgaggatatgcaggcactcatgcttaccgggactggggcagctcactaggattctatcctttccaatcggcatcagccagctcttgtcccctgataagtgaggacagcctgaccctggcctcaaatgcagccatccctgagttcatgcgatgctgacgggaccccagcacacttccctgcctcctttgagatctgcgagcccttgctgcagttcagattcaacaaggccctctgcccaccctctcactaggcctcacccaacaccagtggaactggagcctctggctgggcacagtggctcactttgggaggctgaggcaggaaggctgctggaaactgagagttcaagaccagcctgggcaacatagtgagaccctgtctctacaaatacaaaataaaataattagctgggtg

SEQ ID NO: 9222 - protein, 300 aa, Homo sapiens; identical to SEQ ID NO: 762

SEQ ID NO: 9223 - DNA, 4728 bp, Homo sapiens
gagccgcacaggcagtcccggcgcggggcaaccacagcgctcaggaggccctgagtccggcacctggccatgtgcaaccctgaggaggcagctctgctgcggctggaggaggtcttctcagccaccctcgcccatgtcaacagccttgtcctccagcccctgctcccagccgccccagatccctcggatccctggggcagagagtgcctgcggctcttgcaacagctgcacaagagctcccagcaactctgggaggtgacggaggaaagcctgcactcactgcaggagaggctgcgttacccggactccaccggtctggagtccctgctgctgctgcgaggtgctgaccgtgtactgcaggcccacatagagtacattgagtcctacacaagctgcatggtggtgcaggccttccagaaggcagcaaagaggagaagcgagtactggcggggccagcggaaggcgctgcggcagctgctttcaggtgtgagctcagagggctcggtgggcgcatcgctgggccaggccctccaccagccactcgcccatcacgtgcaacagtacgtgctcctcctgctgagcctcggggacaccattggggagcatcacccaacccgggagctggtggtgaacgcagtcaccctctttgggaacctgcagtccttcatgaagcaggagttggaccaggctgtggccacacaggctctctggcacaccctgagaggccggctgagggatgtgctctgcacccctgctcacagactccttcaggacagccaggacgtacccgtgacggtcgcaccgttgcgggctgagcgtgtgctgctctttgatgatgccctcgtcctgctgcagggccacaatgtccacacctttgatctgaagctggtgtgggtggatcctgggcaggacgggtgcacgtttcacctcctcacgcccgaagaagagttctccttttgtgccaaggactcccagggccaggcagtctggcagtggaaggtgacctgggctgttcaccaggccctgcatgggaagaaggacttccccgtgctgggggctggcctggagccctcccagcctcccgactgccgctgcgcagaatataccttccaggcagagggccggctctgccaggccacctacgagggcgagtggtgcaggggccggccccacggcaagggaaccctgaaatggccggatgggcggaatcacgtggggaatttctgccagggcctggagcatggcttcggcatccgcctgctgccccaggcctctgaggacaagttcgactgttacaagtgtcactggcgagaaggcagcatgtgtggctacggcatctgtgagtacagcaccgacgaggtgtacaagggctacttccaggagggcctgcggcacggatttggggtccttgagagtggtccgcaggccccccagcccttcaggtacacgggccactgggagaggggccagaggagcggctatggcattgaggaggatggtgacagaggtgagcgctacattggcatgtggcaggctggtcagcgccacggcccaggggtcatggtcacccaggcaggtgtctgctaccagggcaccttccaggcggacaagacggtgggcccgggcatcctcctctctgaagacgactccctgtatgagggcaccttcaccagggacctgaccctcatggggaagggcaaggtcaccttccccaatggcttcaccctggagggctcgttcggcagtggggcagggagaggactgcacacacagggtgtgctggacacggctgccctcccaccagacccgagcagtacctgcaagaggcagctgggcgtgggtgccttccccgtggaaagccgctggcagggagtctacagccccttccgggactttgtgtgtgctggctgccccagggacctgcaggaggccctgctgggcttcgacgtgcagagctccagggagctgcgtaggtctcaggattacctgtcctgcgagaggacccaccctgaggacagtgtgggcagtatggaagacatcctggaggagctgctgcagcaccgggagcccaaggccctgcagctgtacctcaggaaggctctgagcaactcactgcaccccctgggaaagctgctccggacactgatgctgaccttccaggctacctacgcaggtgtcggggccaacaagcacctgcaggagctggcccaggaggaggtgaagcagcatgcccaggaactctgggctgcctacaggggtctgctgcgagttgccttagagcgcaagggccaggccctggaggaggatgaagacacagagacaagggacctccaggtgcatggattggtgctgcccctcatgctgcccagcttctactcagagctcttcacgctctacctgctgcttcatgagcgggaggacagcttctacagccagggcattgccaacttgagcctctttcctgatacccaactgctcgagttcctggatgtgcagaagcacttgtggcccctcaaggacctcacgctgacgagcaatcagaggtactccctggtcagggacaagtgtttcctgtcagccaccgagtgcctgcagaagatcatgaccacggtggacccacgggagaagctggaggtgctggagaggacatacggggaaattgagggcacggtgtcgagggtattgggccgggagtacaagctgcccatggacgacctgctgccacttctcatctacgtggtgtcgcgcgcccgaattcagcacctgggagccgagatccacctgatccgtgacatgatggaccccaaccacacaggaggcctgtatgacttcctgctcacagccctggagtcctgttacgagcacatccagaaagaagacatgaggctgcaccgcttacctggccactggcactccagggagctctggtagcctggcctttcctggacagactgaagagctgagcagggcactgccagcctgtccctcattacccaaggcaaggggcaggacaggccctcagaagcagctcttggaggagatgagcattttgttttgcacaggaagatgctgctgctgccctgactgggatgagggtgaggggtgacgggtgtggccctggatgtggtggttttcccttggccactagcccatcttcaatgaccccttaatctgcagcagctcacaggctgggggtgaggagtccctggcttctcttagcctgagcctttctcccaagttccagagcctctccgggcctcagtgctgccatctgtacaatggtggagtgagtacgctgtaaaggaccttccattcattttgctgaattccagagtccttttggaaaactgactttagtctgctgggctgtattgacctctggcaggctcgaagcctcactgggtatgcagtcaacaggatgggcctggagatccgtgaactgcaggccacgtacccatgacgtaaacggcggcactggagcaagctggggcggggggtgggtaaaccctcactgccagcaggccccaagtggcttgtaaatcattctcctgtgatgtctgtgggcctgcgtggggacaacaggggcacatgacatctgcctgggccctgaccaataaaccctcagacccaggacccaggaccctgctgtagttggggagcaggagtacctttgggaggggaggactttatttaaacagtggttctagtgtgggaccaagagaggcaggagctgggtcttggggcagctttattcctgttgggcctcagtttctcttccccacacagtttatcttccgtcacattgtgccgggtgacgtgcacggtctccctctgccctagccggagatgcatgatgacaggcagtgtgatgtgttctgaaagtgtccagggcaaagcgtagggagagggtggatttgtgcagggtgcagctctggagaagaagctggatcactcttggtcccattccctaggccctgagcaagtcaggctcctggctctgggtgtggctcccccaaacgaagtactgacttcagcctgtgaggggagggttgagggaggctctggaaagcccagccacacctgagtccctggcagtagccttggggcagagggcacccgcagagtcccagagatgatgtgggcagtgggcagagagagccttggcgcctctgtttgccaccacttccccaggaaggagggacagcatttctctggctggttccactaaatgtgccagcccaaatgcagggcatgggctctggttctgccaggagcctgtgacacccccaggaagggggtggaactgaggaagagcgaggatatgcaggcactcatgcttaccgggactggggcagctcactaggattctatcctttccaatcggcatcagccagctcttgtcccctgataagtgaggacagcctgaccctggcctcaaatgcagccatccctgagttcatgcgatgctgacgggaccccagcacacttccctgcctcctttgagatctgcgagcccttgctgcagttcagattcaacaaggccctctgcccaccctctcactaggcctcacccaacaccagtggaactggagcctctggctgggcacagtggctcactttgggaggctgaggcaggaaggctgctggaaactgagagttcaagaccagcctgggcaacatagtgagaccctgtctctacaaatacaaaataaaataattagctgggtg

SEQ ID NO: 9224 - protein, 953 aa, Homo sapiens; identical to SEQ ID NO: 760

SEQ ID NO: 9225 - DNA, 6164 bp, Homo sapiens
gagccgcacaggcagtcccggcgcggggcaaccacagcgctcaggaggccctgagtccggcacctggccatgtgcaaccctgaggaggcagctctgctgcggctggaggaggtcttctcagccaccctcgcccatgtcaacagccttgtcctccagcccctgctcccagccgccccagatccctcggatccctggggcagagagtgcctgcggctcttgcaacagctgcacaagagctcccagcaactctgggaggtgacggaggaaagcctgcactcactgcaggagaggctgcgttacccggactccaccggtctggagtccctgctgctgctgcgaggtgctgaccgtgtactgcaggcccacatagagtacattgagtcctacacaagctgcatggtggtgcaggccttccagaaggcagcaaagaggagaagcgagtactggcggggccagcggaaggcgctgcggcagctgctttcaggtgtgagctcagagggctcggtgggcgcatcgctgggccaggccctccaccagccactcgcccatcacgtgcaacagtacgtgctcctcctgctgagcctcggggacaccattggggagcatcacccaacccgggagctggtggtgaacgcagtcaccctctttgggaacctgcagtccttcatgaagcaggagttggaccaggctgtggccacacaggctctctggcacaccctgagaggccggctgagggatgtgctctgcacccctgctcacagactccttcaggacagccaggacgtacccgtgacggtcgcaccgttgcgggctgagcgtgtgctgctctttgatgatgccctcgtcctgctgcagggccacaatgtccacacctttgatctgaagctggtgtgggtggatcctgggcaggacgggtgcacgtttcacctcctcacgcccgaagaagagttctccttttgtgccaaggactcccagggccaggcagtctggcagtggaaggtgacctgggctgttcaccaggccctgcatgggaagaaggacttccccgtgctgggggctggcctggagccctcccagcctcccgactgccgctgcgcagaatataccttccaggcagagggccggctctgccaggccacctacgagggcgagtggtgcaggggccggccccacggcaagggaaccctgaaatggccggatgggcggaatcacgtggggaatttctgccagggcctggagcatggcttcggcatccgcctgctgccccaggcctctgaggacaagttcgactgttacaagtgtcactggcgagaaggcagcatgtgtggctacggcatctgtgagtacagcaccgacgaggtgtacaagggctacttccaggagggcctgcggcacggatttggggtccttgagagtggtccgcaggccccccagcccttcaggtacacgggccactgggagaggggccagaggagcggctatggcattgaggaggatggtgacagaggtgagcgctacattggcatgtggcaggctggtcagcgccacggcccaggggtcatggtcacccaggcaggtgtctgctaccagggcaccttccaggcggacaagacggtgggcccgggcatcctcctctctgaagacgactccctgtatgagggcaccttcaccagggacctgaccctcatggggaagggcaaggtcaccttccccaatggcttcaccctggagggctcgttcggcagtggggcagggagaggactgcacacacagggtgtgctggacacggctgccctcccaccagacccgagcagtacctgcaagaggcagctgggcgtgggtgccttccccgtggaaagccgctggcagggagtctacagccccttccgggactttgtgtgtgctggctgccccagggacctgcaggaggccctgctgggcttcgacgtgcagagctccagggagctgcgtaggtctcaggattacctgtcctgcgagaggacccaccctgaggacagtgtgggcagtatggaagacatcctggaggagctgctgcagcaccgggagcccaaggccctgcagctgtacctcaggaaggctctgagcaactcactgcaccccctgggaaagctgctccggacactgatgctgaccttccaggctacctacgcaggtgtcggggccaacaagcacctgcaggagctggcccaggaggaggtgaagcagcatgcccaggaactctgggctgcctacaggtgggctcggtggcaaacgggacagctactgccctgtgacactagtgtgccctttccaggcatcagttctgccttgcatttgggaggaatgccaagtgtctgattcaacaatgaaccagaggcttggtcagtgtgcagctgctgagcaaaagggttagagggtggggaggtgagagcaaaggcccagctgcagccctcagctagagtccaagacccaaccaggcgctgggctgactctgaccgcaggtgcactctcaccccactgtaggctgagcttggccctggactcggaacacacctgcagtcccaggctgggctgtgaccccatgaaacactgcaaatagaagccttagatgctatagttccttctgctgctggattctcaggctaacatcctggagctccaaccttctaacttctgtggtttgagaggatgaaccctgcaggccatgtccacagttctgagaggccacctgcttttgcctttgttgactggtggtagaactccagttctgtggcaaggggcagccacaccatttctctctcattgactcacaggggtctgctgcgagttgccttagagcgcaagggccaggccctggaggaggatgaagacacagagacaaggtgactggcgcaggtctccttggggcctgccgtgtccagggaggcctcatgcgtctgctcctaggacctcccttggggaaagaggtgcttctggggaagtgctgggcattcactctattgaccaaacattgtgcattgatcgtttgtggattagaatgacccatgacctctgttctgtgaggaaccagggagggggcactgctacaatgcattgaatgcatctttgttctaaatgtatgatcccaatctcatctttcgcatgcagaaggtgagtagctccccgaggcaccctcctctccctgcacacagatggggaaaccgagggctggtagggatgagcctgaggttatacaggagttaggtgggcatgaaatttgtttcccccagtccctggagcaaaccttacaatttgcctttagattctagacctgaaagtgttcctgatcagagaggccttcctgtcactgccttgcaggaggcaagggaaatggggttagacattagggaggattccccgcccggagtcctagcacagcaaaccaggaggtggaactgaatcagcctggaatggctgctgagagctcagctgcaagttgctggtccatctggggccctggttttgctttcagtcaaatggggatccaactcctgccccacctgccatcttggttgtcaaagtcaaaggagggaatgaagttatgaattgaattgggcaaatgatgactgagaacaggcttggaaaaggttttctggggaggaggaggctggaggccaggacactgtttgttgtggaactaggagctctttgagacgagactccaagtagtaatcccagaccccaccttgctcatcccaacctgttccggtctccccatcagggacctccaggtgcatggattggtgctgcccctcatgctgcccagcttctactcagagctcttcacgctctacctgctgcttcatgagcgggaggacagcttctacagccagggcattgccaacttgagcctctttcctgatacccaactgctcgagttcctggatgtgcagaagcacttgtggcccctcaaggacctcacgctgacgagcaatcagaggtactccctggtcagggacaagtgtttcctgtcagccaccgagtgcctgcagaagatcatgaccacggtggacccacgggagaagctggaggtgctggagaggacatacggggaaattgagggcacggtgtcgagggtattgggccgggagtacaagctgcccatggacgacctgctgccacttctcatctacgtggtgtcgcgcgcccgaattcagcacctgggagccgagatccacctgatccgtgacatgatggaccccaaccacacaggaggcctgtatgacttcctgctcacagccctggagtcctgttacgagcacatccagaaagaagacatgaggctgcaccgcttacctggccactggcactccagggagctctggtagcctggcctttcctggacagactgaagagctgagcagggcactgccagcctgtccctcattacccaaggcaaggggcaggacaggccctcagaagcagctcttggaggagatgagcattttgttttgcacaggaagatgctgctgctgccctgactgggatgagggtgaggggtgacgggtgtggccctggatgtggtggttttcccttggccactagcccatcttcaatgaccccttaatctgcagcagctcacaggctgggggtgaggagtccctggcttctcttagcctgagcctttctcccaagttccagagcctctccgggcctcagtgctgccatctgtacaatggtggagtgagtacgctgtaaaggaccttccattcattttgctgaattccagagtccttttggaaaactgactttagtctgctgggctgtattgacctctggcaggctcgaagcctcactgggtatgcagtcaacaggatgggcctggagatccgtgaactgcaggccacgtacccatgacgtaaacggcggcactggagcaagctggggcggggggtgggtaaaccctcactgccagcaggccccaagtggcttgtaaatcattctcctgtgatgtctgtgggcctgcgtggggacaacaggggcacatgacatctgcctgggccctgaccaataaaccctcagacccaggacccaggaccctgctgtagttggggagcaggagtacctttgggaggggaggactttatttaaacagtggttctagtgtgggaccaagagaggcaggagctgggtcttggggcagctttattcctgttgggcctcagtttctcttccccacacagtttatcttccgtcacattgtgccgggtgacgtgcacggtctccctctgccctagccggagatgcatgatgacaggcagtgtgatgtgttctgaaagtgtccagggcaaagcgtagggagagggtggatttgtgcagggtgcagctctggagaagaagctggatcactcttggtcccattccctaggccctgagcaagtcaggctcctggctctgggtgtggctcccccaaacgaagtactgacttcagcctgtgaggggagggttgagggaggctctggaaagcccagccacacctgagtccctggcagtagccttggggcagagggcacccgcagagtcccagagatgatgtgggcagtgggcagagagagccttggcgcctctgtttgccaccacttccccaggaaggagggacagcatttctctggctggttccactaaatgtgccagcccaaatgcagggcatgggctctggttctgccaggagcctgtgacacccccaggaagggggtggaactgaggaagagcgaggatatgcaggcactcatgcttaccgggactggggcagctcactaggattctatcctttccaatcggcatcagccagctcttgtcccctgataagtgaggacagcctgaccctggcctcaaatgcagccatccctgagttcatgcgatgctgacgggaccccagcacacttccctgcctcctttgagatctgcgagcccttgctgcagttcagattcaacaaggccctctgcccaccctctcactaggcctcacccaacaccagtggaactggagcctctggctgggcacagtggctcactttgggaggctgaggcaggaaggctgctggaaactgagagttcaagaccagcctgggcaacatagtgagaccctgtctctacaaatacaaaataaaataattagctgggtg

SEQ ID NO: 9226 - protein, 762 aa, Homo sapiens
MCNPEEAALLRLEEVFSATLAHVNSLVLQPLLPAAPDPSDPWGRECLRLLQQLHKSSQQLWEVTEESLHSLQERLRYPDSTGLESLLLLRGADRVLQAHIEYIESYTSCMVVQAFQKAAKRRSEYWRGQRKALRQLLSGVSSEGSVGASLGQALHQPLAHHVQQYVLLLLSLGDTIGEHHPTRELVVNAVTLFGNLQSFMKQELDQAVATQALWHTLRGRLRDVLCTPAHRLLQDSQDVPVTVAPLRAERVLLFDDALVLLQGHNVHTFDLKLVWVDPGQDGCTFHLLTPEEEFSFCAKDSQGQAVWQWKVTWAVHQALHGKKDFPVLGAGLEPSQPPDCRCAEYTFQAEGRLCQATYEGEWCRGRPHGKGTLKWPDGRNHVGNFCQGLEHGFGIRLLPQASEDKFDCYKCHWREGSMCGYGICEYSTDEVYKGYFQEGLRHGFGVLESGPQAPQPFRYTGHWERGQRSGYGIEEDGDRGERYIGMWQAGQRHGPGVMVTQAGVCYQGTFQADKTVGPGILLSEDDSLYEGTFTRDLTLMGKGKVTFPNGFTLEGSFGSGAGRGLHTQGVLDTAALPPDPSSTCKRQLGVGAFPVESRWQGVYSPFRDFVCAGCPRDLQEALLGFDVQSSRELRRSQDYLSCERTHPEDSVGSMEDILEELLQHREPKALQLYLRKALSNSLHPLGKLLRTLMLTFQATYAGVGANKHLQELAQEEVKQHAQELWAAYRWARWQTGQLLPCDTSVPFPGISSALHLGGMPSV

SEQ ID NO: 9227 - DNA, 2676 bp, Homo sapiens
ggacctccaggtgcatggattggtgctgcccctcatgctgcccagcttctactcagagctcttcacgctctacctgctgcttcatgagcgggaggacagcttctacagccagggcattgccaacttgagcctctttcctgatacccaactgctcgagttcctggatgtgcagaagtaagccttcccttcccccgtgccgtgttagccaggactcaaactcgactcagactgtcttcagccaaaaggtggggctggggttgataggttcatgtacccaccaagttctaagcttatgcattcaggtgtggctggatctaggtgttcaactgaatgacagagggaagcaccttccatttctgttggtctttctcagcctcccccttgtggtgacaaacaccataagcaccaaccgctcaaggttcataccctcccagctcctctcccagagtccccacaggagctggcattgccttccaacagctccctcagagcccctgaagtccctcactggctcggcttggggcttgggtcttgagcccacccctgagtgccagccgtgattgaccaggcctgcctgaatatccactgctgaggctggggcaagatcacctgctctgagcacttgggctgagagtaggggagaggaggtccctcaggggagactgaggactgctctgggtgcatgtcgggaggtgtttaccacaccccagggcctcccttccaccctcagtctccaaaatgtcctttctcttcagtgtcccatctatccattgatgccacaagtgaccccactgtccacagtagagggcacgggcactgtctctgctcccacatccaggtctcctttgttacacagggatggtgcttcccacccaccctgcaaatccctgtttcttcctctatcttggtgactgtgtcctgcatctgaccagccaccagcctaaagacctggctgccagtgcttcccaagcatgccccgcctccctcaccacctcagtgtcgcttccccacaccagcctccacctctgctgcatgagggctgcatccccctgctcacagccctgtgctggctcagcagagcctcctggatggagtgcagtctcctcacccctccctctctactggtcaccacgacctggctcatacaagcccctgggccgcccttacctccctggagcttctggagctctgccttctccaggaatccttccatcctccccatgacctaggctgatctccttccccttttcaggacccagatctgccgggggaaacagtggcatagggaatttgccctctgacctcagactctgccccttgtcgaggcagagcctcctgtctcactttttcaatttcaggcacttgtggcccctcaaggacctcacgctgacgagcaatcagaggtactccctggtcagggacaagtgtttcctgtcagccaccgagtgcctgcagaagatcatgaccacggtggacccacgggagaagctggaggtgctggagaggacatacggggaaattgagggcacggtgtcgagggtattgggccgggagtacaagctgcccatggacgacctgctgccacttctcatctacgtggtgtcgcgcgcccgatggggaagccaaggcccagaaaagggagggtcccagccagggtgctggggtgctagaggtagagtgaggaccacaccccaggtgtccagccatccaggccagcgctccttccccagctgcctgtccgcgacaggcctcttctccttgtctccctcgctctcttggtggggcggtgttctccagaattcagcacctgggagccgagatccacctgatccgtgacatgatggaccccaaccacacaggaggcctgtatgacttcctgctcacagccctggagtcctgttacgagcacatccagaaagaagacatgaggctgcaccgcttacctggccactggcactccagggagctctggtagcctggcctttcctggacagactgaagagctgagcagggcactgccagcctgtccctcattacccaaggcaaggggcaggacaggccctcagaagcagctcttggaggagatgagcattttgttttgcacaggaagatgctgctgctgccctgactgggatgagggtgaggggtgacgggtgtggccctggatgtggtggttttcccttggccactagcccatcttcaatgaccccttaatctgcagcagctcacaggctgggggtgaggagtccctggcttctcttagcctgagcctttctcccaagttccagagcctctccgggcctcagtgctgccatctgtacaatggtggagtgagtacgctgtaaaggaccttccattcattttgctgaattccagagtccttttggaaaactgactttagtctgctgggctgtattgacctctggcaggctcgaagcctcactgggtatgcagtcaacaggatgggcctggagatccgtgaactgcaggccacgtacccatgacgtaaacggcggcactggagcaagctggggcggggggtgggtaaaccctcactgccagcaggccccaagtggcttgtaaatcattctcctgtgatgtctgtgggcctgcgtggggacaacaggggcacatgacatctgcctgggccctgaccaataaaccctcagacccagg

SEQ ID NO: 9228 - protein, 124 aa, Homo sapiens
MTTVDPREKLEVLERTYGEIEGTVSRVLGREYKLPMDDLLPLLIYVVSRARWGSQGPEKGGSQPGCWGARGRVRTTPQVSSHPGQRSFPSCLSATGLFSLSPSLSWWGGVLQNSAPGSRDPPDP

SEQ ID NO: 9229 - DNA, 1358 bp, Homo sapiens
atcccagaccccaccttgctcatcccaacctgttccggtctccccatcagggacctccaggtgcatggattggtgctgcccctcatgctgcccagcttctactcagagctcttcacgctctacctgctgcttcatgagcgggaggacagcttctacagccagggcattgccaacttgagcctctttcctgatacccaactgctcgagttcctggatgtgcagaagcacttgtggcccctcaaggacctcacgctgacgagcaatcagaggtactccctggtcagggacaagtgtttcctgtcagccaccgagtgcctgcagaagatcatgaccacggtggacccacgggagaagctggaggtgctggagaggacatacggggaaattgagggcacggtgtcgagggtattgggccgggagtacaagctgcccatggacgacctgctgccacttctcatctacgtggtgtcgcgcgcccgaattcagcacctgggagccgagatccacctgatccgtgacatgatggaccccaaccacacaggaggcctgtatgacttcctgctcacagccctggagtcctgttacgagcacatccagaaagaagacatgaggctgcaccgcttacctggccactggcactccagggagctctggtagcctggcctttcctggacagactgaagagctgagcagggcactgccagcctgtccctcattacccaaggcaaggggcaggacaggccctcagaagcagctcttggaggagatgagcattttgttttgcacaggaagatgctgctgctgccctgactgggatgagggtgaggggtgacgggtgtggccctggatgtggtggttttcccttggccactagcccatcttcaatgaccccttaatctgcagcagctcacaggctgggggtgaggagtccctggcttctcttagcctgagcctttctcccaagttccagagcctctccgggcctcagtgctgccatctgtacaatggtggagtgagtacgctgtaaaggaccttccattcattttgctgaattccagagtccttttggaaaactgactttagtctgctgggctgtattgacctctggcaggctcgaagcctcactgggtatgcagtcaacaggatgggcctggagatccgtgaactgcaggccacgtacccatgacgtaaacggcggcactggagcaagctggggcggggggtgggtaaaccctcactgccagcaggccccaagtggcttgtaaatcattctcctgtgatgtctgtgggcctgcgtggggacaacaggggcacatgacatctgcctgggccctgaccaataaaccctcagacccagg

SEQ ID NO: 9230 - protein, 190 aa, Homo sapiens; identical to SEQ ID NO: 9212

SEQ ID NO: 9231 - DNA, 2036 bp, Homo sapiens
aggaaggaaccagctgtaagggagggcagagggggatgtcttggaggggaatcccagactttggacactggtctctcttggaccaagaccccctctctggcttggcctccagatctgcccacctttctgtctccgtctttccaggattccatatgcttctgtctgtcttctcgtcgcagggtagattctctgtccctttctctgctgctcttcctcctggagccgtggaggcagctgggcgtgggtgccttccccgtggaaagccgctggcagggagtctacagccccttccgggactttgtgtgtgctggctgccccagggacctgcaggaggccctgctgggcttcgacgtgcagagctccagggagctgcgtaggtctcaggattacctgtcctgcgagaggacccaccctgaggacagtgtgggcagtatggaagacatcctggaggagctgctgcagcaccgggagcccaaggccctgcagctgtacctcaggaaggctctgagcaactcactgcaccccctgggaaagctgctccggacactgatgctgaccttccaggctacctacgcaggtgtcggggccaacaagcacctgcaggagctggcccaggaggaggtgaagcagcatgcccaggaactctgggctgcctacaggggtctgctgcgagttgccttagagcgcaagggccaggccctggaggaggatgaagacacagagacaagggacctccaggtgcatggattggtgctgcccctcatgctgcccagcttctactcagagctcttcacgctctacctgctgcttcatgagcgggaggacagcttctacagccagggcattgccaacttgagcctctttcctgatacccaactgctcgagttcctggatgtgcagaagcacttgtggcccctcaaggacctcacgctgacgagcaatcagaggtactccctggtcagggacaagtgtttcctgtcagccaccgagtgcctgcagaagatcatgaccacggtggacccacgggagaagctggaggtgctggagaggacatacggggaaattgagggcacggtgtcgagggtattgggccgggagtacaagctgcccatggacgacctgctgccacttctcatctacgtggtgtcgcgcgcccgaattcagcacctgggagccgagatccacctgatccgtgacatgatggaccccaaccacacaggaggcctgtatgacttcctgctcacagccctggagtcctgttacgagcacatccagaaagaagacatgaggctgcaccgcttacctggccactggcactccagggagctctggtagcctggcctttcctggacagactgaagagctgagcagggcactgccagcctgtccctcattacccaaggcaaggggcaggacaggccctcagaagcagctcttggaggagatgagcattttgttttgcacaggaagatgctgctgctgccctgactgggatgagggtgaggggtgacgggtgtggccctggatgtggtggttttcccttggccactagcccatcttcaatgaccccttaatctgcagcagctcacaggctgggggtgaggagtccctggcttctcttagcctgagcctttctcccaagttccagagcctctccgggcctcagtgctgccatctgtacaatggtggagtgagtacgctgtaaaggaccttccattcattttgctgaattccagagtccttttggaaaactgactttagtctgctgggctgtattgacctctggcaggctcgaagcctcactgggtatgcagtcaacaggatgggcctggagatccgtgaactgcaggccacgtacccatgacgtaaacggcggcactggagcaagctggggcggggggtgggtaaaccctcactgccagcaggccccaagtggcttgtaaatcattctcctgtgatgtctgtgggcctgcgtggggacaacaggggcacatgacatctgcctgggccctgaccaataaaccctcagacccagg

SEQ ID NO: 9232 - protein, 300 aa, Homo sapiens; identical to SEQ ID NO: 762

SEQ ID NO: 9233 - DNA, 3940 bp, Homo sapiens
ggtgggggtgcgagcgaggagccgcacaggcagtcccggcgcggggcaaccacagcgctcaggaggccctgagtccggcacctggccatgtgcaaccctgaggaggcagctctgctgcggctggaggaggtcttctcagccaccctcgcccatgtcaacagccttgtcctccagcccctgctcccagccgccccagatccctcggatccctggggcagagagtgcctgcggctcttgcaacagctgcacaagagctcccagcaactctgggaggtgacggaggaaagcctgcactcactgcaggagaggctgcgttacccggactccaccggtctggagtccctgctgctgctgcgaggtgctgaccgtgtactgcaggcccacatagagtacattgagtcctacacaagctgcatggtggtgcaggccttccagaaggcagcaaagaggagaagcgagtactggcggggccagcggaaggcgctgcggcagctgctttcaggtgtgagctcagagggctcggtgggcgcatcgctgggccaggccctccaccagccactcgcccatcacgtgcaacagtacgtgctcctcctgctgagcctcggggacaccattggggagcatcacccaacccgggagctggtggtgaacgcagtcaccctctttgggaacctgcagtccttcatgaagcaggagttggaccaggctgtggccacacaggctctctggcacaccctgagaggccggctgagggatgtgctctgcacccctgctcacagactccttcaggacagccaggacgtacccgtgacggtcgcaccgttgcgggctgagcgtgtgctgctctttgatgatgccctcgtcctgctgcagggccacaatgtccacacctttgatctgaagctggtgtgggtggatcctgggcaggacgggtgcacgtttcacctcctcacgcccgaagaagagttctccttttgtgccaaggactcccagggccaggcagtctggcagtggaaggtgacctgggctgttcaccaggccctgcatgggaagaaggacttccccgtgctgggggctggcctggagccctcccagcctcccgactgccgctgcgcagaatataccttccaggcagagggccggctctgccaggccacctacgagggcgagtggtgcaggggccggccccacggcaagggaaccctgaaatggccggatgggcggaatcacgtggggaatttctgccagggcctggagcatggcttcggcatccgcctgctgccccaggcctctgaggacaagttcgactgttacaagtgtcactggcgagaaggcagcatgtgtggctacggcatctgtgagtacagcaccgacgaggtgtacaagggctacttccaggagggcctgcggcacggatttggggtccttgagagtggtccgcaggccccccagcccttcaggtacacgggccactgggagaggggccagaggagcggctatggcattgaggaggatggtgacagaggtgagcgctacattggcatgtggcaggctggtcagcgccacggcccaggggtcatggtcacccaggcaggtgtctgctaccagggcaccttccaggcggacaagacggtgggcccgggcatcctcctctctgaagacgactccctgtatgagggcaccttcaccagggacctgaccctcatggggaagggcaaggtcaccttccccaatggcttcaccctggagggctcgttcggcagtggggcagggagaggactgcacacacagggtgtgctggacacggctgccctcccaccagacccgagcagtacctgcaagaggcagctgggcgtgggtgccttccccgtggaaagccgctggcagggagtctacagccccttccgggactttgtgtgtgctggctgccccagggacctgcaggaggccctgctgggcttcgacgtgcagagctccagggagctgcgtaggtctcaggattacctgtcctgcgagaggacccaccctgaggacagtgtgggcagtatggaagacatcctggaggagctgctgcagcaccgggagcccaaggccctgcagctgtacctcaggaaggctctgagcaactcactgcaccccctgggaaagctgctccggacactgatgctgaccttccaggctacctacgcaggtgtcggggccaacaagcacctgcaggagctggcccaggaggaggtgaagcagcatgcccaggaactctgggctgcctacaggctgagcttggccctggactcggaacacacctgcagtcccaggctgggctgtgaccccatgaaacactgcaaatagaagccttagatgctatagttccttctgctgctggattctcaggctaacatcctggagctccaaccttctaacttctgtggtttgagaggatgaaccctgcaggccatgtccacagttctgagaggccacctgcttttgcctttgttgactggtggtagaactccagttctgtggcaaggggcagccacaccatttctctctcattgactcacaggggtctgctgcgagttgccttagagcgcaagggccaggccctggaggaggatgaagacacagagacaagggacctccaggtgcatggattggtgctgcccctcatgctgcccagcttctactcagagctcttcacgctctacctgctgcttcatgagcgggaggacagcttctacagccagggcattgccaacttgagcctctttcctgatacccaactgctcgagttcctggatgtgcagaagcacttgtggcccctcaaggacctcacgctgacgagcaatcagaggtactccctggtcagggacaagtgtttcctgtcagccaccgagtgcctgcagaagatcatgaccacggtggacccacgggagaagctggaggtgctggagaggacatacggggaaattgagggcacggtgtcgagggtattgggccgggagtacaagctgcccatggacgacctgctgccacttctcatctacgtggtgtcgcgcgcccgaattcagcacctgggagccgagatccacctgatccgtgacatgatggaccccaaccacacaggaggcctgtatgacttcctgctcacagccctggagtcctgttacgagcacatccagaaagaagacatgaggctgcaccgcttacctggccactggcactccagggagctctggtagcctggcctttcctggacagactgaagagctgagcagggcactgccagcctgtccctcattacccaaggcaaggggcaggacaggccctcagaagcagctcttggaggagatgagcattttgttttgcacaggaagatgctgctgctgccctgactgggatgagggtgaggggtgacgggtgtggccctggatgtggtggttttcccttggccactagcccatcttcaatgaccccttaatctgcagcagctcacaggctgggggtgaggagtccctggcttctcttagcctgagcctttctcccaagttccagagcctctccgggcctcagtgctgccatctgtacaatggtggagtgagtacgctgtaaaggaccttccattcattttgctgaattccagagtccttttggaaaactgactttagtctgctgggctgtattgacctctggcaggctcgaagcctcactgggtatgcagtcaacaggatgggcctggagatccgtgaactgcaggccacgtacccatgacgtaaacggcggcactggagcaagctggggcggggggtgggtaaaccctcactgccagcaggccccaagtggcttgtaaatcattctcctgtgatgtctgtgggcctgcgtggggacaacaggggcacatgacatctgcctgggccctgaccaataaaccctcagacccagg

SEQ ID NO: 9234 - protein, 753 aa, Homo sapiens
MCNPEEAALLRLEEVFSATLAHVNSLVLQPLLPAAPDPSDPWGRECLRLLQQLHKSSQQLWEVTEESLHSLQERLRYPDSTGLESLLLLRGADRVLQAHIEYIESYTSCMVVQAFQKAAKRRSEYWRGQRKALRQLLSGVSSEGSVGASLGQALHQPLAHHVQQYVLLLLSLGDTIGEHHPTRELVVNAVTLFGNLQSFMKQELDQAVATQALWHTLRGRLRDVLCTPAHRLLQDSQDVPVTVAPLRAERVLLFDDALVLLQGHNVHTFDLKLVWVDPGQDGCTFHLLTPEEEFSFCAKDSQGQAVWQWKVTWAVHQALHGKKDFPVLGAGLEPSQPPDCRCAEYTFQAEGRLCQATYEGEWCRGRPHGKGTLKWPDGRNHVGNFCQGLEHGFGIRLLPQASEDKFDCYKCHWREGSMCGYGICEYSTDEVYKGYFQEGLRHGFGVLESGPQAPQPFRYTGHWERGQRSGYGIEEDGDRGERYIGMWQAGQRHGPGVMVTQAGVCYQGTFQADKTVGPGILLSEDDSLYEGTFTRDLTLMGKGKVTFPNGFTLEGSFGSGAGRGLHTQGVLDTAALPPDPSSTCKRQLGVGAFPVESRWQGVYSPFRDFVCAGCPRDLQEALLGFDVQSSRELRRSQDYLSCERTHPEDSVGSMEDILEELLQHREPKALQLYLRKALSNSLHPLGKLLRTLMLTFQATYAGVGANKHLQELAQEEVKQHAQELWAAYRLSLALDSEHTCSPRLGCDPMKHCK

SEQ ID NO: 9235 - DNA, 717 bp, Homo sapiens
ggtcccagccagggtgctggggtgctagaggtagagtgaggaccacaccccaggtgtccagccatccaggccagcgctccttccccagctgcctgtccgcgacaggcctcttctccttgtctccctcgctctcttggtggggcggtgttctccagaattcagcacctgggagccgagatccacctgatccgtgacatgatggaccccaaccacacaggaggcctgtatgacttcctgctcacagccctggagtcctgttacgagcacatccagaaagaagacatgaggctgcaccgcttacctggccactggcactccagggagctctggtagcctggcctttcctggacagactgaagagctgagcagggcactgccagcctgtccctcattacccaaggcaaggggcaggacaggccctcagaagcagctcttggaggagatgagcattttgttttgcacaggaagatgctgctgctgccctgactgggatgagggtgaggggtgacgggtgtggccctggatgtggtggttttcccttggccactagcccatcttcaatgaccccttaatctgcagcagctcacaggctgggggtgaggagtccctggcttctcttagcctgagcctttctcccaagttccagagcctctccgggcctcagtgctgccatctgtacaatggtggagtgagtacgctgtaaaggaccttccattc

SEQ ID NO: 9236 - protein, 45 aa, Homo sapiens; identical to SEQ ID NO: 9218

SEQ ID NO: 9237 - DNA, 1025 bp, Homo sapiens
tgctcatcccaacctgttccggtctccccatcagggacctccaggtgcatggattggtgctgcccctcatgctgcccagcttctactcagagctcttcacgctctacctgctgcttcatgagcgggaggacagcttctacagccagggcattgccaacttgagcctctttcctgatacccaactgctcgagttcctggatgtgcagaagcacttgtggcccctcaaggacctcacgctgacgagcaatcagaggtactccctggtcagggacaagtgtttcctgtcagccaccgagtgcctgcagaagatcatgaccacggtggacccacgggagaagctggaggtgctggagaggacatacggggaaattgagggcacggtgtcgagggtattgggccgggagtacaagctgcccatggacgacctgctgccacttctcatctacgtggtgtcgcgcgcccgaattcagcacctgggagccgagatccacctgatccgtgacatgatggaccccaaccacacaggaggcctgtatgacttcctgctcacagccctggagtcctgttacgagcacatccagaaagaagacatgaggctgcaccgcttacctggccactggcactccagggagctctggtagcctggcctttcctggacagactgaagagctgagcagggcactgccagcctgtccctcattacccaaggcaaggggcaggacaggccctcagaagcagctcttggaggagatgagcattttgttttgcacaggaagatgctgctgctgccctgactgggatgagggtgaggggtgacgggtgtggccctggatgtggtggttttcccttggccactagcccatcttcaatgaccccttaatctgcagcagctcacaggctgggggtgaggagtccctggcttctcttagcctgagcctttctcccaagttccagagcctctccgggcctcagtgctgccatctgtacaatggtggagtgagtacgctgtaaaggaccttccattc

SEQ ID NO: 9238 - protein, 190 aa, Homo sapiens; identical to SEQ ID NO: 9212

SEQ ID NO: 9239 - DNA, 6597 bp, Homo sapiens
gagccgcacaggcagtcccggcgcggggcaaccacagcgctcaggaggccctgagtccggcacctggccatgtgcaaccctgaggaggcagctctgctgcggctggaggaggtcttctcagccaccctcgcccatgtcaacagccttgtcctccagcccctgctcccagccgccccagatccctcggatccctggggcagagagtgcctgcggctcttgcaacagctgcacaagagctcccagcaactctgggaggtgacggaggaaagcctgcactcactgcaggagaggctgcgttacccggactccaccggtctggagtccctgctgctgctgcgaggtgctgaccgtgtactgcaggcccacatagagtacattgagtcctacacaagctgcatggtggtgcaggccttccagaaggcagcaaagaggagaagcgagtactggcggggccagcggaaggcgctgcggcagctgctttcaggtgtgagctcagagggctcggtgggcgcatcgctgggccaggccctccaccagccactcgcccatcacgtgcaacagtacgtgctcctcctgctgagcctcggggacaccattggggagcatcacccaacccgggagctggtggtgaacgcagtcaccctctttgggaacctgcagtccttcatgaagcaggagttggaccaggctgtggccacacaggctctctggcacaccctgagaggccggctgagggatgtgctctgcacccctgctcacagactccttcaggacagccaggacgtacccgtgacggtcgcaccgttgcgggctgagcgtgtgctgctctttgatgatgccctcgtcctgctgcagggccacaatgtccacacctttgatctgaagctggtgtgggtggatcctgggcaggacgggtgcacgtttcacctcctcacgcccgaagaagagttctccttttgtgccaaggactcccagggccaggcagtctggcagtggaaggtgacctgggctgttcaccaggccctgcatgggaagaaggacttccccgtgctgggggctggcctggagccctcccagcctcccgactgccgctgcgcagaatataccttccaggcagagggccggctctgccaggccacctacgagggcgagtggtgcaggggccggccccacggcaagggaaccctgaaatggccggatgggcggaatcacgtggggaatttctgccagggcctggagcatggcttcggcatccgcctgctgccccaggcctctgaggacaagttcgactgttacaagtgtcactggcgagaaggcagcatgtgtggctacggcatctgtgagtacagcaccgacgaggtgtacaagggctacttccaggagggcctgcggcacggatttggggtccttgagagtggtccgcaggccccccagcccttcaggtacacgggccactgggagaggggccagaggagcggctatggcattgaggaggatggtgacaggtgagcgccctgcagccaccactcccaggacggaggggtggaccgggccctcacagaccagattgttgcaggacacaggctcctgtttgtcccccactgtgtctctcttaagcccctcacttcccctccagtccctcggttgctgcggaggctcaggctgagcgaatcttggtcacgctgactgcagggtcgcccccgcccctcacccctcctcatggtgttggagaggcatttctgaccccctgctctgtcacgtctaaaaactgcagcccttgctggctctctgggctgtgtgataaagccctggatccttggcctggcaatcacagcctcgcctgcttctctgacctcaccccagctgcgtctcctgggcacccctccagcctttctggaccactgaagtccccacgtatccatcacatgctcctacctccatggctttgcacacactcctattccccctgtccttcctgccacctccacggagaagcctcccagatgcccttcccaggctgcctccctccctcctccattctctattcctcttgggggtcctgacctctctggcactgtgtctgttgagtggattcaggtgatgtcactgccccttatctgcactccctgccgccccgtgccagcagagtgcccaggaggtacatgggaatgagtctgatccaactctggccacattcctctccttccagaggtgagcgctacattggcatgtggcaggctggtcagcgccacggcccaggggtcatggtcacccaggcaggtgtctgctaccagggcaccttccaggcggacaagacggtggtgagtggagtgtatcctgggctatccctctctttgcaccccactcccgctgggggcactgaggctgagctgaggcctttcagggagggatgggaaagggggctgtgttcctgggtgctggagggagccagaacctgggcaggaagccagctctaccacccacctcccctggccctggccaatccctgctctgcctgaccttggtttccccatcagcaactcaggttaagaatacttaccatagactcaatgaactaacaagaatggagcacttgctcatgatgatgcattagctgacattcacagagtcctaacttgacacctggctctgggctaagctcccaccctgatcttgtgggatcttcccaagagccctgcaggttgatgtcattattatccctagtgtgtccctagtgaatgacaaatgagaggttcagagggatcagaggacctgctccatgtcaccttcactgagtggcagagctgacactcacaccctggtctgctgagcctggccgccgagcctgggactcccatgtttgcctcacccatacccttccaggtgcctggggaatgtggggctctggcctgatggctgttcctgttattatggtctgttggtttgtttatgctctacttcattctcgaaaggattgaaggaggccttcaaggaaagaggaagacaaggggaagaataagtacacaaaatagatttggaaataagccgaacactaattgtaaccctttcggctctgagcttcccggcagcccatggggcaagggagcctggtcagctctgccgttcccagggccagtgacaagcagggaagcagggatgtttcagagaaagccccacatttcttgagctcccaagggcttcctgaagaagccgctggggtgaggagccagggcggagggtgtcatttggggaaatccagggatggggtcctcggggctggtgcttagcaggccaaaggctagagtcccaattaggtacagtcctgtggggcgtgatgaggctcagggcccctctcgccatgtgtcagggcacatctcccttctttggccatctctctccaccctgagtttcctggcccttcctcacccaccctttctaccctccctggcttcctctccccaagggcccgggcatcctcctctctgaagacgactccctgtatgagggcaccttcaccagggacctgaccctcatggggaagggcaaggtcaccttccccaatggcttcaccctggagggctcgttcggcagtggggcagggagaggactgcacacacagggtgtgctggacacggctgccctcccaccagacccgagcagtacctgcaagaggcagctgggcgtgggtgccttccccgtggaaagccgctggcagggagtctacagccccttccgggactttgtgtgtgctggctgccccagggacctgcaggaggccctgctgggcttcgacgtgcagagctccagggagctgcgtaggtctcaggattacctgtcctgcgagaggacccaccctgaggacagtgtgggcagtatggaagacatcctggaggagctgctgcagcaccgggagcccaaggccctgcagctgtacctcaggaaggctctgagcaactcactgcaccccctgggaaagctgctccggacactgatgctgaccttccaggctacctacgcaggtgtcggggccaacaagcacctgcaggagctggcccaggaggaggtgaagcagcatgcccaggaactctgggctgcctacaggtgggctcggtggcaaacgggacagctactgccctgtgacactagtgtgccctttccaggcatcagttctgccttgcatttgggaggaatgccaagtgtctgattcaacaatgaaccagaggcttggtcagtgtgcagctgctgagcaaaagggttagagggtggggaggtgagagcaaaggcccagctgcagccctcagctagagtccaagacccaaccaggcgctgggctgactctgaccgcaggtgcactctcaccccactgtaggctgagcttggccctggactcggaacacacctgcagtcccaggctgggctgtgaccccatgaaacactgcaaatagaagccttagatgctatagttccttctgctgctggattctcaggctaacatcctggagctccaaccttctaacttctgtggtttgagaggatgaaccctgcaggccatgtccacagttctgagaggccacctgcttttgcctttgttgactggtggtagaactccagttctgtggcaaggggcagccacaccatttctctctcattgactcacaggggtctgctgcgagttgccttagagcgcaagggccaggccctggaggaggatgaagacacagagacaaggtgactggcgcaggtctccttggggcctgccgtgtccagggaggcctcatgcgtctgctcctaggacctcccttggggaaagaggtgcttctggggaagtgctgggcattcactctattgaccaaacattgtgcattgatcgtttgtggattagaatgacccatgacctctgttctgtgaggaaccagggagggggcactgctacaatgcattgaatgcatctttgttctaaatgtatgatcccaatctcatctttcgcatgcagaaggtgagtagctccccgaggcaccctcctctccctgcacacagatggggaaaccgagggctggtagggatgagcctgaggttatacaggagttaggtgggcatgaaatttgtttcccccagtccctggagcaaaccttacaatttgcctttagattctagacctgaaagtgttcctgatcagagaggccttcctgtcactgccttgcaggaggcaagggaaatggggttagacattagggaggattccccgcccggagtcctagcacagcaaaccaggaggtggaactgaatcagcctggaatggctgctgagagctcagctgcaagttgctggtccatctggggccctggttttgctttcagtcaaatggggatccaactcctgccccacctgccatcttggttgtcaaagtcaaaggagggaatgaagttatgaattgaattgggcaaatgatgactgagaacaggcttggaaaaggttttctggggaggaggaggctggaggccaggacactgtttgttgtggaactaggagctctttgagacgagactccaagtagtaatcccagaccccaccttgctcatcccaacctgttccggtctccccatcagggacctccaggtgcatggattggtgctgcccctcatgctgcccagcttctactcagagctcttcacgctctacctgctgcttcatgagcgggaggacagcttctacagccagggcattgccaacttgagcctctttcctgatacccaactgctcgagttcctggatgtgcagaagcacttgtggcccctcaaggacctcacgctgacgagcaatcagaggtactccctggtcagggacaagtgtttcctgtcagccaccgagtgcctgcagaagatcatgaccacggtggacccacgggagaagctggaggtgctggagaggacatacggggaaattgagggcacggtgtcgagggtattgggccgggagtacaagctgcccatggacgacctgctgccacttctcatctacgtggtgtcgcgcgcccgaattcagcacctgggagccgagatccacctgatccgtgacatgatggaccccaaccacacaggaggcctgtatgacttcctgctcacagccctggagtcctgttacgagcacatccagaaagaagacatgaggctgcaccgcttacctggccactggcactccagggagctctggtagcctggcctttcctggacagactgaagagctgagcagggcactgccagcctgtccctcattacccaaggcaaggggcaggacaggccctcagaagcagctcttggaggagatgagcattttgttttgcacaggaagatgctgctgctgccctgactgggatgagggtgaggggtgacgggtgtggccctggatgtggtggttttcccttggccactagcccatcttcaatgaccccttaatctgcagcagctcacaggctgggggtgaggagtccctggcttctcttagcctgagcctttctcccaagttccagagcctctccgggcctcagtgctgccatctgtacaatggtggagtgagtacgctgtaaaggaccttccattc

SEQ ID NO: 9240 - protein, 479 aa, Homo sapiens
MCNPEEAALLRLEEVFSATLAHVNSLVLQPLLPAAPDPSDPWGRECLRLLQQLHKSSQQLWEVTEESLHSLQERLRYPDSTGLESLLLLRGADRVLQAHIEYIESYTSCMVVQAFQKAAKRRSEYWRGQRKALRQLLSGVSSEGSVGASLGQALHQPLAHHVQQYVLLLLSLGDTIGEHHPTRELVVNAVTLFGNLQSFMKQELDQAVATQALWHTLRGRLRDVLCTPAHRLLQDSQDVPVTVAPLRAERVLLFDDALVLLQGHNVHTFDLKLVWVDPGQDGCTFHLLTPEEEFSFCAKDSQGQAVWQWKVTWAVHQALHGKKDFPVLGAGLEPSQPPDCRCAEYTFQAEGRLCQATYEGEWCRGRPHGKGTLKWPDGRNHVGNFCQGLEHGFGIRLLPQASEDKFDCYKCHWREGSMCGYGICEYSTDEVYKGYFQEGLRHGFGVLESGPQAPQPFRYTGHWERGQRSGYGIEEDGDR

SEQ ID NO: 9241 - DNA, 1823 bp, Homo sapiens
ggcggcgcgggaacctgacaccgaggatgaataaatgatgctcgctgactacccgtggccaaagcccgtggccaccgagcgccggctggcaggggcagtgaccggcggccggcccgttcgtccctgggctccgcaagcggcgcggtggcacgaagatggcggggtggccgggcgcgggtcccctctgcgtgctgggcggcgccgcactcggggtgtgcctcgcgggggttgccgggcagctggtggagcccagcacggccccacccaagcccaagccgcctccgctgaccaaggagacagtggtgttctgggacatgcgcctgtggcacgtggtgggcatcttttcgctcttcgtgttgtccatcatcatcacgctgtgctgtgtcttcaactgtcgtgtgccacggacccggaaggagatcgaagcccggtacctgcagcgaaaggcagccaagatgtacacagacaagctggagactgtgccacccctcaatgagctcacagaagtcccaggagaggataagaagaagaagaagaagaagaagaaggacagtgtggacacagtggccatcaaagtagaggaggatgagaagaatgaggccaagaagaagaaaggagagaaatgaagacatcctgggcagcttgggctggcgggccctggagctcaagccgtggccggggtccaggcatgttggactctgagctcatttggggaccacagaggctgtggtcagagagggaagctgaggcccatggccacatcctcatggcccatcaggggcaggaaccagacaatctcgtaggtgtcctgccccccagcctaggcttggctcctttcaccccatccacatgggtactgtctcggcagaggtggtctggtgccaccgtccctctgcagatacactgctctccccacccagacctgcctgtctcccaccctttctgccagggatggcagtggctgtgaaggagtaatgggatatggggttacttcagccaccctttctggcacgaaatggctgaagtgcatgggtcagggtgtgaggccacacccagagtagccatgaggaggcagagagggtcactgggggacactgtggcagcaggagggactctgtctggccagggaggagccccagtggtgagaagacttccccaagcctggcaggggatccagctcaagggagtaagtagaggtggcttcagaaatggaacccccagcccagcagacatcaagctcaaggcaatgggctaccctcatttcacacgttgtgatgaagctgaggctgctgccaggcccggcatgaggccccgaggctcgagctcggggctgggggctgcagggctgggtcaggggtacacagagctaaggccaatgggctagagggtgccggaaagagagctggagtctgggctcctcttgggaatcagagtatatttaagaagccaagggggacctcgggctgttctggtggccccttctatgcccagctgtgctgggaggtcccagggccctagaagatcacagcagggccttctgcctgctgaccataacagtgccagcttctttgcagcttcctcttctaccatttcccactacgggcacctaaaagaagcatctctgaccagaagacaaaggcccaaatagcacctgggggagggaagatgcacagaggcacttccagatggcatcgaacagactaaggctctgaaacctaggcctgaacactaaggtctcgagacaccagaggtttctgagccaggagagcctgctggaaaagcagcctgcagagatttgtgaataaagctgattgccttctcag

SEQ ID NO: 9242 - protein, 156 aa, Homo sapiens
MAGWPGAGPLCVLGGAALGVCLAGVAGQLVEPSTAPPKPKPPPLTKETVVFWDMRLWHVVGIFSLFVLSIIITLCCVFNCRVPRTRKEIEARYLQRKAAKMYTDKLETVPPLNELTEVPGEDKKKKKKKKKDSVDTVAIKVEEDEKNEAKKKKGEK

SEQ ID NO: 9243 - DNA, 1861 bp, Homo sapiens
ggcggcgcgggaacctgacaccgaggatgaataaatgatgctcgctgactacccgtggccaaagcccgtggccaccgagcgccggctggcaggggcagtgaccggcggccggcccgttcgtccctgggctccgcaagcggcgcggtggcacgaagatggcggggtggccgggcgcgggtcccctctgcgtgctgggcggcgccgcactcggggtgtgcctcgcgggggttgccgggcagctggtggagcccagcacggccccacccaagcccaagccgcctccgctgaccaaggagacagtggtgttctgggacatgcgcctgtggcacgtggtgggcatcttttcgctcttcgtgttgtccatcatcatcacgctgtgctgtgtcttcaactgtcgtgtgccacggacccggaaggagatcgaagcccggtacctgcagcgaaaggcagccaagatgtacacagacaagctggagactgtgccacccctcaatgagctcacagaagtcccaggagaggataagaagaagaagaagaagaagaagaaggacagtgtggacacagtggccatcaaagtagaggaggatgagaagaatgaggccaagaagaagaaaggagagaaatgaagacatcctgggcagcttgggctggcgggccctggagctcaagccgtggccggggtccaggcatgttggactctgagctcatttggggaccacagaggctgtggtcagagagggaagctgaggcccatggccacatcctcatggcccatcaggggcaggaaccagacaatctcgtaggtgtcctgccccccagcctaggcttggctcctttcaccccatccacatgggtactgtctcggcagaggtggtctggtgccaccgtccctctgcagatacactgctctccccacccagacctgcctgtctcccaccctttctgccagggatggcagtggctgtgaaggagtaatgggatatggggttacttcagccaccctttctggcacgaaatggctgaagtgcatgggtcagggtgtgaggccacacccagagtagccatgaggaggcagagagggtcactgggggacactgtggcagcaggagggactctgtctggccagggaggagccccagtggtgagaagacttccccaagcctggcaggggatccagctcaagggagtaagtagaggtggcttcagaaatggaacccccagcccagcagacatcaagctcaaggcaatgggctaccctcatttcacacgttgtgatgaagctgaggctgctgccaggcccggcatgaggccccgaggctcgagctcggggctgggggctgcagggctgggtcaggggtacacagagctaaggccaatgggctagagggtgccggaaagagagctggagtctgggctcctcttgggaatcagagtatatttaagaagccaagggggacctcgggctgttctggtggccccttctatgcccagctgtgctgggaggtcccagggccctagaagatcacagcagggccttctgcctgctgaccataacagtgccagcttctttgcagcttcctcttctaccatttcccactacgggcacctaaaagaagcatctctgaccagaagacaaaggcccaaatagcacctgggggagggaagatgcacagaggcacttccagatggcatcgaacagactaaggctctgaaacctaggcctgaacactaaggtctcgagacaccagaggtttctgagccaggagagcctgctggaaaagcagcctgcagagatttgtgaataaagctgattgccttctcagagccaggcctagaaaatggcctcctgagatgacccctc

SEQ ID NO: 9244 - protein, 156 aa, Homo sapiens; identical to SEQ ID NO: 9242

SEQ ID NO: 9245 - DNA, 820 bp, Homo sapiens
ggcgtgatgttatctactcagtgagggtggggagtccgtggattgaccagatgacgcagaccgcctccgatgtcccggtgctccaggtcatcatgcatagcaggtaccgggcccagcggttctggtcctgggtgggccaggccaacgacatcggcctcctcaagctcaagcaggaactcaagtacagcaattacgtgcggcccatctgcctgcctggcacggactatgtgttgaaggaccattcccgctgcactgtgacgggctggggactttccaaggctgacggcatgtggcctcagttccggaccattcaggagaaggaagtcatcatcctgaacaacaaagagtgtgacaatttctaccacaacttcaccaaaatccccactctggttcagatcatcaagtcccagatgatgtgtgcggaggacacccacagggagaagttctgctatgagctaactggagagcccttggtctgctccatggagggcacgtggtacctggtgggattggtgagctggggtgcaggctgccagaagagcgaggccccacccatctacctacaggtctcctcctaccaacactggatctgggactgcctcaacgggcaggccctggccctgccagccccatccaggaccctgctcctggcactcccactgcccctcagcctccttgctgccctctgactctgtgtgccctccctcacttgtgggccccccttgcctccgtgcccaggttgctgtgggtgcagctgtcacagccctgagagtcagggtggagatgaggtgctcaattaaacattactgttttccatgcc

SEQ ID NO: 9246 - protein, 212 aa, Homo sapiens
MTQTASDVPVLQVIMHSRYRAQRFWSWVGQANDIGLLKLKQELKYSNYVRPICLPGTDYVLKDHSRCTVTGWGLSKADGMWPQFRTIQEKEVIILNNKECDNFYHNFTKIPTLVQIIKSQMMCAEDTHREKFCYELTGEPLVCSMEGTWYLVGLVSWGAGCQKSEAPPIYLQVSSYQHWIWDCLNGQALALPAPSRTLLLALPLPLSLLAAL

SEQ ID NO: 9247 - DNA, 1802 bp, Homo sapiens
atccgttagaaggagcattgaggagtagatacccacttgccatggcctgtgggccgggggatcttcaaagccttacatctccgctttcctctgccagattagattatcagccgtctattgaagggccctggctccgggcctgcggtcagaccaacgtgtcctgcagggtggtgaaggggaagctggtagaggtaggcaagtggccatggcagattcaaggacctcagcctgtactccgtgatggtgggagtccaccagcgcccagaaaatagcactcagctcccgctcactcgcatggtgattcataaggatttcagcaatctcatgtctcaggacattgccctcctaaagctcagggactccatctcgtggtcccccttcgtccagcctgtctgcctccctaacatcaaattcaagccatccattggaagcatgtgctgggtaatcggctggggaactacagggaaaaaaggttgactctggaagctcccttgtctgccaaatggacaagacctggattcagataggagtggtaagctggagctttagttgtggccagcgccacttcccagttccttgggcaaagccccactggaggggctggagggaaagtagggtcacttggagatcctggatgccagcccctgaggtttggtcttcatctcactgcgggaggggtgacaccatgagccagtccagggcaatgggctgcgaggccggcctcgccttctctggcagaccccgaccacccagacactgccctcgaccaccatggagacccaattcccagtttctgaaggcaaagtcgacccataccgctcctgtggcttttcctacgagcaggaccccaccctcagggacccagaagccgtggctcggcggtggccctggatggtcagcgtgcgggccaatggcacacacatctgtgccggcaccatcattgcctcccagtgggtgctgactgtggcccactgcctgatctggcgtgatgttatctactcagtgagggtggggagtccgtggattgaccagatgacgcagaccgcctccgatgtcccggtgctccaggtcatcatgcatagcaggtaccgggcccagcggttctggtcctgggtgggccaggccaacgacatcggcctcctcaagctcaagcaggaactcaagtacagcaattacgtgcggcccatctgcctgcctggcacggactatgtgttgaaggaccattcccgctgcactgtgacgggctggggactttccaaggctgacggcatgtggcctcagttccggaccattcaggagaaggaagtcatcatcctgaacaacaaagagtgtgacaatttctaccacaacttcaccaaaatccccactctggttcagatcatcaagtcccagatgatgtgtgcggaggacacccacagggagaagttctgctatgagctaactggagagcccttggtctgctccatggagggcacgtggtacctggtgggattggtgagctggggtgcaggctgccagaagagcgaggccccacccatctacctacaggtctcctcctaccaacactggatctgggactgcctcaacgggcaggccctggccctgccagccccatccaggaccctgctcctggcactcccactgcccctcagcctccttgctgccctctgactctgtgtgccctccctcacttgtgggccccccttgcctccgtgcccaggttgctgtgggtgcagctgtcacagccctgagagtcagggtggagatgaggtgctcaattaaacattactgttttccatgcc

SEQ ID NO: 9248 - protein, 299 aa, Homo sapiens
METQFPVSEGKVDPYRSCGFSYEQDPTLRDPEAVARRWPWMVSVRANGTHICAGTIIASQWVLTVAHCLIWRDVIYSVRVGSPWIDQMTQTASDVPVLQVIMHSRYRAQRFWSWVGQANDIGLLKLKQELKYSNYVRPICLPGTDYVLKDHSRCTVTGWGLSKADGMWPQFRTIQEKEVIILNNKECDNFYHNFTKIPTLVQIIKSQMMCAEDTHREKFCYELTGEPLVCSMEGTWYLVGLVSWGAGCQKSEAPPIYLQVSSYQHWIWDCLNGQALALPAPSRTLLLALPLPLSLLAAL

SEQ ID NO: 9249 - DNA, 2960 bp, Homo sapiens
gctccaagttgccgccagaacccatggccggcgtggaaaccgctgcgaggcggcgccacgacggaggctgaggtcgccggcagtatccatggcgtcccagagcggcagctccctggggctcctggcctggttcttgcttcttcagccatggctcgaagaggcccgggcaggcagggtgggtgcgcagggaggcgtagcactgctcttcccctccgcgctcccctcagggccaggcggccaggaccccggagcgagcggatgggagccgccacctgtaggggctccaggatccccagcggccccccagtccagggggaacgcagtgcgccccgcttcggtgttacttccctcaggtgagccataccgacccgaggaggattccagaatgaccccggcaagcccagaagcccggacgtctcctgtgcacccgaaattccccaaaattccagaaacttctgtagctccagggtctccagcgaccgcagggcctccaggatcctgggttacttcagcatctacagtgggagaagccttggaatccgacggaatctctgaccttggaaggcagttttctcagggtattgtttctggtgctagatctgtcctggcctgcggggtaggtcaaaggggacacagcctggctcagggaggttgagggtcagaccctgacctagatgatttgagagagaggatagataacccgcctccgccctgggcagcctggtggggtggtgggaaggtagtggcttcacttccagtcccctctctttactgagcccaccagcctgtggccaccgtgtttcaaggatgattggaggattgccagccccaaacaagaagtggccctggcaggtgagcctgcagaccagcaacatacaccactgcggaggctccctcatcgacaggcgctgggtgctcactgccgcccactgtgtctttagtttcaggaccaatgccacttgttcttcaggagactgagctaaacattatgcgtcatgagaaatgttgtgagatgctcaagaacaagaatatatccaagagtaaaatggtcacgagggggaccgtctgtggctataatgaccaagggaaggatgcctgtcaggttataaagaggacacaaccaatccaggttgactctggaagctcccttgtctgccaaatggacaagacctggattcagataggagtgttccttgggcaaagccccactggaggggctggagggaaagtagggtcacttggagatcctggatgccagcccctgaggtttggtcttcatctcactgcgggaggggtgacaccatgagccagtccagggcaatgggctgcgagggtgaggaggtctgagaatcggccgagattaagttgagggactccaggagactgcttggaccagcggagtgaggagagggaggggccaaggagggaagtcagccggggcgtacccagcccgggaggtataagggagggctgtcactaggggcgcccttgcgggtcagacaccacgagcgccgtggcgggtggcccctggggggcgccacgcaggcggggcactaggagcatccccacccagctcaccagaggccgcggcatgcggccaacagggggcgccgtcgtgggggcggcactgggagcgccttccggagagacgcagtcggctgccaccccgggatgggtcgctggtgccagaccgtcgcgcgcgggcagcgcccccggacgtctgccccctcccgcgccggtgccctgctgctgctgcttctgttgctgaggtctgcaggttgctggggcgcaggggaagccccgggggcgctgtccactgctgatcccgccgaccagagcgtccagtgtgtccccaaggccacctgtccttccagccggcctcgccttctctggcagaccccgaccacccagacactgccctcgaccaccatggagacccaattcccagtttctgaaggcaaagtcgacccataccgctcctgtggcttttcctacgagcaggaccccaccctcagggacccagaagccgtggctcggcggtggccctggatggtcagcgtgcgggccaatggcacacacatctgtgccggcaccatcattgcctcccagtgggtgctgactgtggcccactgcctgatctggcgtgatgttatctactcagtgagggtggggagtccgtggattgaccagatgacgcagaccgcctccgatgtcccggtgctccaggtcatcatgcatagcaggtaccgggcccagcggttctggtcctgggtgggccaggccaacgacatcggcctcctcaagctcaagcaggaactcaagtacagcaattacgtgcggcccatctgcctgcctggcacggactatgtgttgaaggaccattcccgctgcactgtgacgggctggggactttccaaggctgacggcatgtggcctcagttccggaccattcaggagaaggaagtcatcatcctgaacaacaaagagtgtgacaatttctaccacaacttcaccaaaatccccactctggttcagatcatcaagtcccagatgatgtgtgcggaggacacccacagggagaagttctgctatgagctaactggagagcccttggtctgctccatggagggcacgtggtacctggtgggattggtgagctggggtgcaggctgccagaagagcgaggccccacccatctacctacaggtctcctcctaccaacactggatctgggactgcctcaacgggcaggccctggccctgccagccccatccaggaccctgctcctggcactcccactgcccctcagcctccttgctgccctctgactctgtgtgccctccctcacttgtgggccccccttgcctccgtgcccaggttgctgtgggtgcagctgtcacagccctgagagtcagggtggagatgaggtgctcaattaaacattactgttttccatgcc

SEQ ID NO: 9250 - protein, 385 aa, Homo sapiens; identical to SEQ ID NO: 766

SEQ ID NO: 9251 - DNA, 464 bp, Homo sapiens
agcatgtgctgggtaatcggctggggaactacagggaaaaaaggttgactctggaagctcccttgtctgccaaatggacaagacctggattcagataggagtggtaagctggagctttagttgtggccagcgccacttcccaggtatctacaccagcactgcccacttcaaccagtggatcaggactgaggttgctaacataaggttcatcagtagggctggccctgccttcctgagcccagttttcctcactggctacattctactgggctccttgagctccctgtggctcctgtgagcggtgtttcaaggacagtccctcccagaggctgcttctccctcccctctgttctaccctcagaagtggagacgagaggttgcccaggatggcagggcagagtgagggggagggtccgagagccactgttactttctgttgttcaatgaagatgcttttgaacttt

SEQ ID NO: 9252 - protein, 74 aa, Homo sapiens [sequence omitted]

SEQ ID NO: 9253 - DNA, 960 bp, Homo sapiens
atggcctgtgggccgggggatcttcaaagccttacatctccgctttcctctgccagattagattatcagccgtctattgaagggccctggctccgggcctgcggtcagaccaacgtgtcctgcagggtggtgaaggggaagctggtagaggtaggcaagtggccatggcaggtgagcatccttttcctgggcacgtacatctgcagtggctccctcatccaccaccagtgggtcctcacggctgcgcactgcttgcagagattcaaggacctcagcctgtactccgtgatggtgggagtccaccagcgcccagaaaatagcactcagctcccgctcactcgcatggtgattcataaggatttcagcaatctcatgtctcaggacattgccctcctaaagctcagggactccatctcgtggtcccccttcgtccagcctgtctgcctccctaacatcaaattcaagccatccattggaagcatgtgctgggtaatcggctggggaactacagggaaaaaagtgaaggtagtgatggcagtccttctcagacaccgtatgctgggctctgggccagacatggataacactgggcttaagaaaggtctgggcccggggaacaaatggtaccacgtggcacagtccacacagcacaatgcacacaacctttttactttttcctccagggacgctgggctccactttaaggttgactctggaagctcccttgtctgccaaatggacaagacctggattcagataggagtggtaagctggagctttagttgtggccagcgccacttcccaggtatctacaccagcactgcccacttcaaccagtggatcaggactgaggttgctaacataaggttcatcagtagggctggccctgccttcctgagcccagttttcctcactggctacattctactgggctccttgagctccctgtggctcctgtga

SEQ ID NO: 9254 - protein, 319 aa, Homo sapiens [sequence omitted]

SEQ ID NO: 9255 - DNA, 1041 bp, Homo sapiens
atgacccgccattggccctgggaggtgagcctccggatggaaaatgagcacgtgtgtggaggggccctcattgaccccagctgggtggtgactgcggcccactgcatccaaggcaccaaagagtactcagtggtgcttggcacctccaagctgcagcccatgaacttcagcagggccctctgggtccctgtgagggacatcattatgcaccccaagtactggggccgggccttcatcatgggtgacgttgcccttgtccaccttcaaacacctgtcaccttcagtgagtacgtgcagcccatctgcctcccggagcccaatttcaacctgaaggttgggacgcagtgttgggtgactggctggagccaggttaagcagcgcttttcagccaactccatgctgaccccagagctgcaggaggctgaggtgtttatcatggacaacaagaggtgtgaccggcattacaagaagtccttcttccccccagttgtcccccttgtcctgggggacatgatctgtgccaccaattatggggaaaacttgtgctatggggattctggagggccattggcttgtgaagttgagggcagatggattctggctggggtgttgtcctgggaaaaggcctgcgtgaaggcacagaatccaggtgtgtacacccgcatcaccaaatacaccaaatggatcaagaagcaaatgagcaatggagccttctcaggtccctgtgcctctgcctgcctcctgttcctgtgctggctgctgcagccccagatgggctcctgacctccctaccttttcctcctcctgccttgcctctgctgaatggggccagatggtttgaccaaggtcatgtgtccatcttcaaaaagagtcagggtggggaagagtaacccctgggagaatgggtctggctttggcatcccggtgaggagaagtgtggtggatgactaggccttgggtgagcaggagaagggaagtgtggcctagaaggattctggaatctgggaccaggagagcagggattaaacatgtgcaaacttg

SEQ ID NO: 9256 - protein, 260 aa, Homo sapiens; identical to SEQ ID NO: 768

SEQ ID NO: 9257 - DNA, 3128 bp, Homo sapiens
agaacccatggccggcgtggaaaccgctgcgaggcggcgccacgacggaggctgaggtcgccggcagtatccatggcgtcccagagcggcagctccctggggctcctggcctggttcttgcttcttcagccatggctcgaagaggcccgggcaggcagggtgggtgcgcagggaggcgtagcactgctcttcccctccgcgctcccctcagggccaggcggccaggaccccggagcgagcggatgggagccgccacctgtaggggctccaggatccccagcggccccccagtccagggggaacgcagtgcgccccgcttcggtgttacttccctcagcctgtggccagcggacttcaaggataactggaggattgccggctccagacaggaagtggccctggcaggtgagcctgcagaccagcaacagacacatctgcggaggctcccttatcgccagacactgggtactcactgccgctcactgcatctctgggtgagggtttggggctcagagcttgggccctgatcaggctgtgggacctggagccagtctgtccccctccctgaacttcctcttcctcatctgtaaaagggggtgacagccccatagtttttatccagtctgggtgagacctgaggatttgcatttctaacaagtttctgggtgttgcctccgccgctgatctggggactactggctaaagtggtcaggggtcctggagggatgtggcttggagagagggaggtagctgctggctggcataggaagatggtaccaggcgggaagcacctcgaaggtgtggaagcagagtgtagaccctggaggatcttcctgcagccatctggaatacacagtgaagctgggagacacaaatgtgcatcatcgctccaaaacagcacttgtggtcccagttcgtgacgtcgttatccaccgatattttacgtctcctggaataattgaaaatgacattgcccttgccctgcttgacttccctgtgaattactccacgcacatccagcttgtgtgcctccctgaacaggctttcatggtgcaagctggtacgaactgctgggtgaccggatggggcaaagtaaatgaaacaggtgagccataccgacccgaggaggattccagaatgaccccggcaagcccagaagcccggacgtctcctgtgcacccgaaattccccaaaattccagaaacttctgtagctccagggtctccagcgaccgcagggcctccaggatcctgggttacttcagcatctacagtgggagaagccttggaatccgacggaatctctgaccttggaaggcagttttctcagggtattgtttctggtgctagatctgtcctggcctgcggggtaggtcaaaggggacacagcctggctcagggaggttgagggtcagaccctgacctagatgatttgagagagaggatagataacccgcctccgccctgggcagcctggtggggtggtgggaaggtagtggcttcacttccagtcccctctctttactgagcccaccagcctgtggccaccgtgtttcaaggatgattggaggattgccagccccaaacaagaagtggccctggcaggtgagcctgcagaccagcaacatacaccactgcggaggctccctcatcgacaggcgctgggtgctcactgccgcccactgtgtctttagtaatttggaatacaaggtgaagctgggagaccctgacttgcatgctggttccaaagaggcactggtgatcccagtttgagacatcatttttcctagcaattttgattttgccactttgacaagcgacattgcccttgctctgctcgcctactctgtgaattattcctcacatatccagcctgcgtgcctccccgaaaagctttttgaagtggaagctgggacagagtgctgggtgactggatggggccaagtgtcagagagtgtttcaggaccaatgccacttgttcttcaggagactgagctaaacattatgcgtcatgagaaatgttgtgagatgctcaagaacaagaatatatccaagagtaaaatggtcacgagggggaccgtctgtggctataatgaccaagggaaggatgcctgtcaggttataaagaggacacaaccaatccagtttgtggtgagccctggtggtcggaggatttggaaatgacccgccattggccctgggaggtgagcctccggatggaaaatgagcacgtgtgtggaggggccctcattgaccccagctgggtggtgactgcggcccactgcatccaaggcaccaaagagtactcagtggtgcttggcacctccaagctgcagcccatgaacttcagcagggccctctgggtccctgtgagggacatcattatgcaccccaagtactggggccgggccttcatcatgggtgacgttgcccttgtccaccttcaaacacctgtcaccttcagtgagctccacagccaactccatgctgaccccagagctgcaggaggctgaggtgtttatcatggacaacaagaggtgtgaccggcattacaagaagtccttcttccccccagttgtcccccttgtcctgggggacatgatctgtgccaccaattatggggaaaacttgtgctatggggattctggagggccattggcttgtgaagttgagggcagatggattctggctggggtgttgtcctgggaaaaggcctgcgtgaaggcacagaatccaggtgtgtacacccgcatcaccaaatacaccaaatggatcaagaagcaaatgagcaatggagccttctcaggtccctgtgcctctgcctgcctcctgttcctgtgctggctgctgcagccccagatgggctcctgacctccctaccttttcctcctcctgccttgcctctgctgaatggggccagatggtttgaccaaggtcatgtgtccatcttcaaaaagagtcagggtggggaagagtaacccctgggagaatgggtctggctttggcatcccggtgaggagaagtgtggtggatgactaggccttgggtgagcaggagaagggaagtgtggcctagaaggattctggaatctgggaccaggagagcagggattaaacatgtgcaaacttg

SEQ ID NO: 9258 - protein, 141 aa, Homo sapiens; identical to SEQ ID NO: 4464

SEQ ID NO: 9259 - DNA, 492 bp, Homo sapiens
ctccgccgctgatctggggactactggctaaagtggtcaggggtcctggagggatgtggcttggagagagggaggtagctgctggctggcataggaagatggtaccaggcgggaagcacctcgaaggtgtggaagcagagtgtagaccctggaggatcttcctgcagccatctggaatacacagtgaagctgggagacacaaatgtgcatcatcgctccaaaacagcacttgtggtcccagttcgtgacgtcgttatccaccgatattttacgtctcctggaataattgaaaatgacattgcccttgccctgcttgacttccctgtgaattactccacgcacatccagcttgtgtgcctccctgaacaggctttcatggtgcaagctggtacgaactgctgggtgaccggatggggcaaagtaaatgaaacagattctcaaaccaagagtaattgtgaaactctccagtgcgctgggaccagggaaccaagg

SEQ ID NO: 9260 - protein, 38 aa, Homo sapiens
MVQAGTNCWVTGWGKVNETDSQTKSNCETLQCAGTREP

SEQ ID NO: 9261 - DNA, 1447 bp, Homo sapiens
atgggagccgccacctgtaggggctccaggatccccagcggccccccagtccagggggaacgcagtgcgccccgcttcggtgttacttccctcagcctgtggccagcggacttcaaggataactggaggattgccggctccagacaggaagtggccctggcagcacttgtggtcccagttcgtgacgtcgttatccaccgatattttacgtctcctggaataattgaaaatgacattgcccttgccctgcttgacttccctgtgaattactccacgcacatccagcttgtgtgcctccctgaacaggctttcatggtgcaagctggtacgaactgctgggtgaccggatggggcaaagtaaatgaaacagattcatcagaaaagatagtaactgagcctcaggaggctgagctaagcattattcttcatgataaatgtaatgaggtgctcaaggaaaagataagaatgaggagtgaaatggtcaagaaagggaccatctgtggctataatgaccaagggaaggatgcctgtcagggagattctggggggcccctggtctgtgaattaaatggcacatgggtccaggttgccttcgtgaaggggggaaaaaacacaactggcctggtggggtggtgggaaggtagtggcttcacttccagtcccctctctttactgagcccaccagcctgtggccaccgtgtttcaaggatgattggaggattgccagccccaaacaagaagtggccctggcaggtgagcctgcagaccagcaacatacaccactgcggaggctccctcatcgacaggcgctgggtgctcactgccgcccactgtgtctttagtaatttggaatacaaggtgaagctgggagaccctgacttgcatgctggttccaaagaggcactggtgatcccagtttgagacatcatttttcctagcaattttgattttgccactttgacaagcgacattgcccttgctctgctcgcctactctgtgaattattcctcacatatccagcctgcgtgcctccccgaaaagctttttgaagtggaagctgggacagagtgctgggtgactggatggggccaagtgtcagagagtggtgagacaggcaggatgctgaggtgggacagtctggtgggctgggcttggcctgcaagctattgggagaggcagggaggccattttctagcaggtgggtgagggaggagggtggagaagatgctgccaggaagtaatttaacaactatgttatgaatttctgtcgtcatattgggaccttggggcttgggggccaagtgtagtgggttctcttcagggtaaatttcagctcagggtgatgagctgtctgccaataggagccaacccccactagaaggacctgccttgatgggttgaacttcttcaccctagcagtgtaggccaagccagagcaaccctgcca

SEQ ID NO: 9262 - protein, 306 aa, Homo sapiens [sequence omitted]

SEQ ID NO: 9263 - DNA, 302 bp, Homo sapiens
gctgggcatggcccagaagcgtcacctgacgtttaatgctactgtccctttggtccatgttgatgatagtgtgtgtgggattgccagagcctgctctccgtggactcagggccctccacctcatcgggagcctcccaggcactcagcgtctcctggcctagggccctcgcctcagagtggcagctgtctagccctttgttcacacaaaaatgcgaccactactctacggcagagcttcctccagccagggctttagagtctccttcccttacttgtttgcaataaaaattaaaactctttaa

SEQ ID NO: 9264 - protein, 82 aa, Homo sapiens [sequence omitted]

SEQ ID NO: 9265 - DNA, 1827 bp, Homo sapiens
agcctgcggtccgcggcccggggaatctgaagcgtggctcgggagccccgggggacatggcctccttcttggctgtcgtcggggcgcccgggggagtcaactcctgtgtctttgaccgtttccattacagtgtcaagatgggagatcggagtgtctataatgaaaacacaagtgtggtggtctcagtccaaagagcttttgtccaccctaagttctcaacagttacaaccattcgaaatgaccttgcccttctccagctccaacatcctgtgaattttacctcaaacatccagcctatctgcatccctcaggagaatttccaggtggaagggagattctgggggccgcttggcctgtgaatataatgacacatgggtccaggtagggattgtgagctggggcatcggctgtggtcgctgagggttgcctggagtttatacagaaattggtgtctacagtaagtggctgattgcagtggtggatcaggctacctgtttgtatccagcagtgttcctcatcttagtcctgcatttggtgctgcccctgggcatcctggtggcccagtgatcaccccagcccactccccttttgtttctgagtctcatactaggcctctcctccaacctcccactccttctcaatgccgtttctgaaaatcccagttggaatccacgggccctctggagatccatacaatagagcacagcagggagactggggcctggaaagtgcccctgcctggtgctctggtcacctgcctcagccatgcctgcaccagggctgtgctctggctagtgggaaggagggggtgaactaattccagctagaggaccagcctccctgccaggtgggccacagtgactcatcagtatctgggggaacatctatcaaagaagagacatcatcaacagtgaagcaagtgttagatgtggttctggtttcagggctcccacctaagactttgtgaaaccagccagctgggtgattgctcagcgtgaaggaggcgttaccaggtccctgcagaggtgtgaggcctgggacttccactctaggctcagttgtctggggctgggagaagttcccctgcagcccagtgtggatccatctgtgagtggacagcctctgccacactaactctcttggggctacccattcttggcacccccttcctcagtgccctagtggccactttcagagacactacaagttgtattgaggcagttatggagtgcagagttttcagaaatcaactaaataaatgtttggagagtctcctatgttctccatgtctactggcctggttattggggacactgaagacaacttacctcacattaagcttaggaagatgttgatgattctttttaaactaaagagtgagagaggaagtctctgcctgcccagttgtgagttggatggatggttttagacagttgggttttgctgcctatgctctccatggccatcagcatttccgcatggagctttgtagctgagtttgctagtcattgcatctgggaaggaggaagcgagagaaactggaagcaagagagtggtcagggcactacaccccaaactgcaacctccattttctgcctatttctgcccctccttctccaagccttgagcaccagatcactttaatcaggctctatggaaaacacagggctgagggttagggagatgacaggttggggtgcttactgattctggctcatttccctcattaccctatgggtcccagggtagttctttgatatgatgcagagcccattattgcttccagtttccttctttgtttatgaaacattgaagttgcctcctttt

SEQ ID NO: 9266 - protein, 100 aa, Homo sapiens
MASFLAVVGAPGGVNSCVFDRFHYSVKMGDRSVYNENTSVVVSVQRAFVHPKFSTVTTIRNDLALLQLQHPVNFTSNIQPICIPQENFQVEGRFWGPLGL

SEQ ID NO: 9267 - DNA, 882 bp, Homo sapiens; identical to SEQ ID NO: 769

SEQ ID NO: 9268 - protein, 293 aa, Homo sapiens; identical to SEQ ID NO: 770

SEQ ID NO: 9269 - DNA, 907 bp, Homo sapiens
ggcggctcacctaccctgctttctgcattcttctctccacatccctctctgtacttacagcccccaatggcccccaaaaagccagagcccaagaaggatgatgccaaggcagcccccaaggcagctccagctcccgcacctccccctgagcctgagcgccctaaggaggtcgagtttgatgcttccaagatcaagattgagttcacacctgagcagattgaagagttcaaggaagccttcatgctgttcgaccgcacacccaagtgtgagatgaagatcacctacgggcagtgtggggatgtcctgcgggcgctgggccagaaccccacacaggcagaagtgctccgtgtcctggggaagccaagacaggaagagctcaataccaagatgatggactttgaaactttcctgcctatgctccagcacatttccaagaacaaggacacaggcacctatgaggacttcgtggaggggctgcgggtcttcgacaaggagggcaatggcactgtcatgggtgctgagcttcgccacgtgctggccacgctgggtgagaggctgacagaagacgaagtggagaagttgatggctgggcaagaggactccaatggctgcatcaactatgaagcatttgtgaagcacatcatgtccagctaaacctcgtgcccaggaagcccagggaaggctgtgcagggacgtctcatctcccatgtgtgatgctgacaccagcggcctggagtcgtgggaaggaggggagccttaccaagactcctgcaaaaacccttggacctctccacgtggttgccgtctctggcccctctcaggctgtgcttacctgtgacagcagctctgtccccaccccatgggcctcatgaataaatggcttcttgccggccttcctttctgactt

SEQ ID NO: 9270 - protein, 195 aa, Homo sapiens; identical to SEQ ID NO: 772

SEQ ID NO: 9271 - DNA, 442 bp, Homo sapiens
gacgcgggagtgtggagaggccgagaggagccttccgccccccgccccgggacattgcgctagaggccgaggcccggagtcttacggcggcgggatgtcctgggaaaatgtagctgtggaagagcagaacattcctccctcctgtgatggctgacattcataggaaggcggacacacggaagacgccaggtaacaagagcccagaagaaggccggcgtggccgggctttcctgccttagtccacaggctcctcagaagtcagggcccatatcttccccgcattctccttggctgggggaagggagagcccccaatggcccccaaaaagccagagcccaagaaggatgatgccaaggcagcccccaaggcagctccagctcccgcacctccccctgagcctgagcgccctaaggaggtcgagtttgatgcttccaagatcaag

SEQ ID NO: 9272 - protein, 42 aa, Homo sapiens
MAPKKPEPKKDDAKAAPKAAPAPAPPPEPERPKEVEFDASKI

SEQ ID NO: 9273 - DNA, 669 bp, Homo sapiens
aggggcaggaaaacaaggagaaaccatcattgattgcggctgccagaagccgtcaccacctctcaggcccctcctcgcctgaccttggggtccagagagaggacatgccagtctccccactcccatggtctcacagcagcagctgcagggacagccaggctggtctgggatgggggtcgagggtgggtcctctctgccagctccaggttcagctgctgtctcagggttaggctccagctcaacccctggggctgctccctggctttctgagaagatgccgtcaggcagattccatctcataacgtttcctggaggaaaacgttccgacaatgagcgttccaacaatgaagggatctgtctctgatcctggggcctgctcatgaggaaactgagcctacccatggcaactgagagacaaagagggaccacgggacggtgctctaactcacccaaagaaagcacagagatgggcacaaaggtaacaacacgcaacactgagggatgcagacctgagggccccatccctcagcatccaatcccagtgcttccccttccggtgaagacctcctgctgaacagatgaggaacagaccagagacttgccctactccagtgggatgcaagcccatgcccacactgccagggagtggactgtcaacaacccaaggcc

SEQ ID NO: 9274 - protein, 64 aa, Homo sapiens
MRKLSLPMATERQRGTTGRCSNSPKESTEMGTKVTTRNTEGCRPEGPIPQHPIPVLPLPVKTSC

SEQ ID NO: 9275 - DNA, 2135 bp, Homo sapiens
ggcctgagccacagaagctgctcagggactatccatggcctccccgtggccaacttgagtctgctctgcagctttaggcccgacttggaaggcccatgggctgcagatgaggaaactgaggtccagacagccgaagagtggtagtgtccaggacacacaactgggccggcggcggcggctgccccgagggacgcggccctaggcggtggcgatggggaccgcccggatcgcacccggcctggcgctcctgctctgctgccccgtgctcagctccgcgtacgcgctggtggatgcagatgacgtcatgactaaagaggaacagatcttcctgctgcaccgtgctcaggcccagtgcgaaaaacggctcaaggaggtcctgcagaggccagccagcataatggaatcagacaagggatggacatctgcgtccacatcagggaagcccaggaaagataaggcatctgggaagctctaccctgagtctgaggaggacaaggaggcacccactggcagcaggtaccgagggcgcccctgtctgccggaatgggaccacatcctgtgctggccgctgggggcaccaggtgaggtggtggctgtgccctgtccggactacatttatgacttcaatcacaaaggccatgcctaccgacgctgtgaccgcaatggcagctgggagctggtgcctgggcacaacaggacgtgggccaactacagcgagtgtgtcaaatttctcaccaatgagactcgtgaacgggaggtgtttgaccgcctgggcatgatttacaccgtgggctactccgtgtccctggcgtccctcaccgtagctgtgctcatcctggcctactttaggcggctgcactgcacgcgcaactacatccacatgcacctgttcctgtccttcatgctgcgcgccgtgagcatcttcgtcaaggacgctgtgctctactctggcgccacgcttgatgaggctgagcgcctcaccgaggaggagctgcgcgccatcgcccaggcgcccccgccgcctgccaccgccgctgccggctacgcgggctgcagggtggctgtgaccttcttcctttacttcctggccaccaactactactggattctggtggaggggctgtacctgcacagcctcatcttcatggccttcttctcagagaagaagtacctgtggggcttcacagtcttcggctggggtctgcccgctgtcttcgtggctgtgtgggtcagtgtcagagctaccctggccaacaccgggtgctgggacttgagctccgggaacaaaaagtggatcatccaggtgcccatcctggcctccattgtgctcaacttcatcctcttcatcaatatcgtccgggtgctcgccaccaagctgcgggagaccaacgccggccggtgtgacacacggcagcagtaccggaagctgctcaaatccacgctggtgctcatgcccctctttggcgtccactacattgtcttcatggccacaccatacaccgaggtctcagggacgctctggcaagtccagatgcactatgagatgctcttcaactccttccagggattttttgtcgcaatcatatactgtttctgcaatggcgaggtacaagctgagatcaagaaatcttggagccgctggacactggcactggacttcaagcgaaaggcacgcagcgggagcagcagctatagctacggccccatggtgtcccacacaagtgtgaccaatgtcggcccccgtgtgggactcggcctgcccctcagcccccgcctactgcccactgccaccaccaacggccaccctcagctgcctggccatgccaagccagggaccccagccctggagaccctcgagaccacaccacctgccatggctgctcccaaggacgatgggttcctcaacggctcctgctcaggcctggacgaggaggcctctgggcctgagcggccacctgccctgctacaggaagagtgggagacagtcatgtgaccaggcgctgggggctggacctgctgacatagtggatggacagatggaccaaaagatgggtggttgaatgatttcccactcagggctggggccaagaggaaaaacagggaaaaaaagaaaaaaaaaagaaaaaggaaaagga

SEQ ID NO: 9276 - protein, 593 aa, Homo sapiens; identical to SEQ ID NO: 774

SEQ ID NO: 9277 - DNA, 2033 bp, Homo sapiens
cgctgctcgctcgctcgctcgctcgctcgccctcagcgcatgggccccgcgccgggccccggggcctcgggccgccgggacgccggggtcccataggccggggcgtgggcggggcggccagcctgacgcagctctgcaccccctaccaccaccagggccggcggcggcggctgccccgagggacgcggccctaggcggtggcgatggggaccgcccggatcgcacccggcctggcgctcctgctctgctgccccgtgctcagctccgcgtacgcgctggtggatgcagatgacgtcatgactaaagaggaacagatcttcctgctgcaccgtgctcaggcccagtgcgaaaaacggctcaaggaggtcctgcagaggccagccagcataatggaatcagacaagggatggacatctgcgtccacatcagggaagcccaggaaagataaggcatctgggaagctctaccctgagtctgaggaggacaaggaggcacccactggcagcaggtaccgagggcgcccctgtctgccggaatgggaccacatcctgtgctggccgctgggggcaccaggtgaggtggtggctgtgccctgtccggactacatttatgacttcaatcacaaaggccatgcctaccgacgctgtgaccgcaatggcagctgggagctggtgcctgggcacaacaggacgtgggccaactacagcgagtgtgtcaaatttctcaccaatgagactcgtgaacgggaggtgtttgaccgcctgggcatgatttacaccgtgggctactccgtgtccctggcgtccctcaccgtagctgtgctcatcctggcctactttaggcggctgcactgcacgcgcaactacatccacatgcacctgttcctgtccttcatgctgcgcgccgtgagcatcttcgtcaaggacgctgtgctctactctggcgccacgcttgatgaggctgagcgcctcaccgaggaggagctgcgcgccatcgcccaggcgcccccgccgcctgccaccgccgctgccggctacgcgggctgcagggtggctgtgaccttcttcctttacttcctggccaccaactactactggattctggtggaggggctgtacctgcacagcctcatcttcatggccttcttctcagagaagaagtacctgtggggcttcacagtcttcggctggggtgctgggacttgagctccgggaacaaaaagtggatcatccaggtgcccatcctggcctccattgtgctcaacttcatcctcttcatcaatatcgtccgggtgctcgccaccaagctgcgggagaccaacgccggccggtgtgacacacggcagcagtaccggaagctgctcaaatccacgctggtgctcatgcccctctttggcgtccactacattgtcttcatggccacaccatacaccgaggtctcagggacgctctggcaagtccagatgcactatgagatgctcttcaactccttccagggattttttgtcgcaatcatatactgtttctgcaatggcgaggtacaagctgagatcaagaaatcttggagccgctggacactggcactggacttcaagcgaaaggcacgcagcgggagcagcagctatagctacggccccatggtgtcccacacaagtgtgaccaatgtcggcccccgtgtgggactcggcctgcccctcagcccccgcctactgcccactgccaccaccaacggccaccctcagctgcctggccatgccaagccagggaccccagccctggagaccctcgagaccacaccacctgccatggctgctcccaaggacgatgggttcctcaacggctcctgctcaggcctggacgaggaggcctctgggcctgagcggccacctgccctgctacaggaagagtgggagacagtcatgtgaccaggcgctgggggctggacctgctgacatagtggatggacagatggaccaaaagatgggtggttgaatgatttcccactcagggctggggccaagaggaaaaacaggg

SEQ ID NO: 9278 - protein, 333 aa, Homo sapiens
MGTARIAPGLALLLCCPVLSSAYALVDADDVMTKEEQIFLLHRAQAQCEKRLKEVLQRPASIMESDKGWTSASTSGKPRKDKASGKLYPESEEDKEAPTGSRYRGRPCLPEWDHILCWPLGAPGEVVAVPCPDYIYDFNHKGHAYRRCDRNGSWELVPGHNRTWANYSECVKFLTNETREREVFDRLGMIYTVGYSVSLASLTVAVLILAYFRRLHCTRNYIHMHLFLSFMLRAVSIFVKDAVLYSGATLDEAERLTEEELRAIAQAPPPPATAAAGYAGCRVAVTFFLYFLATNYYWILVEGLYLHSLIFMAFFSEKKYLWGFTVFGWGAGT

SEQ ID NO: 9279 - DNA, 744 bp, Homo sapiens
tggccctgacctacctgccccgctggcccaggaagctgctcaaatccacgctggtgctcatgcccctctttggcgtccactacattgtcttcatggccacaccatacaccgaggtctcagggacgctctggcaagtccagatgcactatgagatgctcttcaactccttccagggattttttgtcgcaatcatatactgtttctgcaatggcgaggtacaagctgagatcaagaaatcttggagccgctggacactggcactggacttcaagcgaaaggcacgcagcgggagcagcagctatagctacggccccatggtgtcccacacaagtgtgaccaatgtcggcccccgtgtgggactcggcctgcccctcagcccccgcctactgcccactgccaccaccaacggccaccctcagctgcctggccatgccaagccagggaccccagccctggagaccctcgagaccacaccacctgccatggctgctcccaaggacgatgggttcctcaacggctcctgctcaggcctggacgaggaggcctctgggcctgagcggccacctgccctgctacaggaagagtgggagacagtcatgtgaccaggcgctgggggctggacctgctgacatagtggatggacagatggaccaaaagatgggtggttgaatgatttcccactcagggctggggccaagaggaaaaacagggaaaaaaagaaaaaaaaaagaaaaaggaaaagga

SEQ ID NO: 9280 - protein, 180 aa, Homo sapiens
MPLFGVHYIVFMATPYTEVSGTLWQVQMHYEMLFNSFQGFFVAIIYCFCNGEVQAEIKKSWSRWTLALDFKRKARSGSSSYSYGPMVSHTSVTNVGPRVGLGLPLSPRLLPTATTNGHPQLPGHAKPGTPALETLETTPPAMAAPKDDGFLNGSCSGLDEEASGPERPPALLQEEWETVM

SEQ ID NO: 9281 - DNA, 852 bp, Homo sapiens
gtcgtctttgtggctgggggtcttgccccactagcccagtgtggggaaagaagagccctttctgcttttccttctctgcccttacccagggcaggtgtctgccgctccttcccctgaggacaaggaagatggggagccaaagaccaagcatctcagagaagaggaggaagaaggcgagaagcacagggaacttaggctgcggaactatgtcccggaggatgaggacctgaagaagaggagggtgccccaggccaaaccggttgcagtggaggagaaggtgaaggagcagctggaggccgccaagcccgagcccgtcatcgaggaggtggacctggccaacctcgctcctcggaagcctgactgggacctcaagagagatgtggccaagaagctggagaaactaaaaaagcggactcagagggccattgccgagctgatccgtgaaaggctgaaaggccaggaagacagcctagcctctgcagtggatgctgccaccgaacaaaagacctgtgactccgactgaggcatgccctgccccaccactcgcccatcaggcctgtcctgcagaggatggtcttgggcagggatgggggctaggcttgccatcacctccagtttggcttctgagcagagactccctgcccatcaagtctgaaacccccatggatgaggtcagctccttgtctgctgggtggcccctgccattctgaatggaggcagaaccagcaacaactctgggcgtgcctgtgtctgcacatgtggatgtacatatgtctgtatatatgtatatattttgaactttctaaaaaaaaatctggaaatagaaacaagtaaacccctgtgtgtggcaga

SEQ ID NO: 9282 - protein, 33 aa, Homo sapiens
MGSQRPSISEKRRKKARSTGNLGCGTMSRRMRT

SEQ ID NO: 9283 - DNA, 779 bp, Homo sapiens
gcgacccgcagtccatctgactcctgcttcccgggtgttgctcgtgacaaggaagatggggagccaaagaccaagcatctcagagaagaggaggaagaaggcgagaagcacagggaacttaggctgcggaactatgtcccggaggatgaggacctgaagaagaggagggtgccccaggccaaaccggttgcagtggaggagaaggtgaaggagcagctggaggccgccaagcccgagcccgtcatcgaggaggtggacctggccaacctcgctcctcggaagcctgactgggacctcaagagagatgtggccaagaagctggagaaactaaaaaagcggactcagagggccattgccgagctgatccgtgaaaggctgaaaggccaggaagacagcctagcctctgcagtggatgctgccaccgaacaaaagacctgtgactccgactgaggcatgccctgccccaccactcgcccatcaggcctgtcctgcagaggatggtcttgggcagggatgggggctaggcttgccatcacctccagtttggcttctgagcagagactccctgcccatcaagtctgaaacccccatggatgaggtcagctccttgtctgctgggtggcccctgccattctgaatggaggcagaaccagcaacaactctgggcgtgcctgtgtctgcacatgtggatgtacatatgtctgtatatatgtatatattttgaactttctaaaaaaaaatctggaaatagaaacaagtaaacccctgtgtgtggcaga

SEQ ID NO: 9284 - protein, 33 aa, Homo sapiens; identical to SEQ ID NO: 9282

SEQ ID NO: 9285 - DNA, 393 bp, Homo sapiens
gggcaagatggaggcaactacggctggtgtgggccggctagaggaagaggcgttgcggcgaaaggaacggctgaaggccctacgggagaaaaccgggcgcaaggtgagaagatggtcttgggcagggatgggggctaggcttgccatcacctccagtttggcttctgagcagagactccctgcccatcaagtctgaaacccccatggatgaggtcagctccttgtctgctgggtggcccctgccattctgaatggaggcagaaccagcaacaactctgggcgtgcctgtgtctgcacatgtggatgtacatatgtctgtatatatgtatatattttgaactttctaaaaaaaaatctggaaatagaaacaagtaaacccctgtgtgtggcaga

SEQ ID NO: 9286 - protein, 62 aa, Homo sapiens
MEATTAGVGRLEEEALRRKERLKALREKTGRKVRRWSWAGMGARLAITSSLASEQRLPAHQV

SEQ ID NO: 9287 - DNA, 1097 bp, Homo sapiens
aaaggaggggcgtacgcgggcaagatggaggcaactacggctggtgtgggccggctagaggaagaggcgttgcggcgaaaggaacggctgaaggccctacgggagaaaaccgggcgcaaggacaaggaagatggggagccaaagaccaagcatctcagagaagaggaggaagaaggcgagaagcacagggaacttaggctgcggaactatgtcccggaggatgaggacctgaagaagaggagggtgccccaggccaaaccggttgcagtggaggagaaggtgaaggagcagctggaggccgccaagcccgagcccgtcatcgaggaggtggtgagtgcctggaccaccctggcatcctcgctgcttctgtgtgtcctgtttctcttcgccacttgctctccctctgccccccattccttctcgtcacttctttattcccttcccaccagcccctttgctctcgtccctctccttcctcctcctctttctcccatttccctccttctcgagcctgccctcccccttgtcctggggtggcccctccaccctgatgtgtgtctcctcccttcccaggacctggccaacctcgctcctcggaagcctgactgggacctcaagagagatgtggccaagaagctggagaaactaaaaaagcggactcagagggccattgccgagctgatccgtgaaaggctgaaaggccaggaagacagcctagcctctgcagtggatgctgccaccgaacaaaagacctgtgactccgactgaggcatgccctgccccaccactcgcccatcaggcctgtcctgcagaggatggtcttgggcagggatgggggctaggcttgccatcacctccagtttggcttctgagcagagactccctgcccatcaagtctgaaacccccatggatgaggtcagctccttgtctgctgggtggcccctgccattctgaatggaggcagaaccagcaacaactctgggcgtgcctgtgtctgcacatgtggatgtacatatgtctgtatatatgtatatattttgaactttctaaaaaaaaatctggaaatagaaacaagtaaacccctgtgtgtggcaga

SEQ ID NO: 9288 - protein, 247 aa, Homo sapiens
MEATTAGVGRLEEEALRRKERLKALREKTGRKDKEDGEPKTKHLREEEEEGEKHRELRLRNYVPEDEDLKKRRVPQAKPVAVEEKVKEQLEAAKPEPVIEEVVSAWTTLASSLLLCVLFLFATCSPSAPHSFSSLLYSLPTSPFALVPLLPPPLSPISLLLEPALPLVLGWPLHPDVCLLPSQDLANLAPRKPDWDLKRDVAKKLEKLKKRTQRAIAELIRERLKGQEDSLASAVDAATEQKTCDSD

SEQ ID NO: 9289 - DNA, 855 bp, Homo sapiens
aaaaggaggggcgtacgcgggcaagatggaggcaactacggctggtgtgggccggctagaggaagaggcgttgcggcgaaaggaacggctgaaggccctacgggagaaaaccgggcgcaaggacaaggaagatggggagccaaagaccaagcatctcagagaagaggaggaagaaggcgagaagcacagggaacttaggctgcggaactatgtcccggaggatgaggacctgaagaagaggagggtgccccaggccaaaccggttgcagtggaggagaaggtgaaggagcagctggaggccgccaagcccgagcccgtcatcgaggaggtggacctggccaacctcgctcctcggaagcctgactgggacctcaagagagatgtggccaagaagctggagaaactaaaaaagcggactcagagggccattgccgagctgatccgtgaaaggctgaaaggccaggaagacagcctagcctctgcagtggatgctgccaccgaacaaaagacctgtgactccgactgaggcatgccctgccccaccactcgcccatcaggcctgtcctgcagaggatggtcttgggcagggatgggggctaggcttgccatcacctccagtttggcttctgagcagagactccctgcccatcaagtctgaaacccccatggatgaggtcagctccttgtctgctgggtggcccctgccattctgaatggaggcagaaccagcaacaactctgggcgtgcctgtgtctgcacatgtggatgtacatatgtctgtatatatgtatatattttgaactttctaaaaaaaaatctggaaatagaaacaagtaaacccctgtgtgtggcaga

SEQ ID NO: 9290 - protein, 166 aa, Homo sapiens; identical to SEQ ID NO: 776

SEQ ID NO: 9291 - DNA, 399 bp, Homo sapiens
ggtcgtcgcgcatgcgcgggggtgggcaaggcagtggtcagcgacccgcagtccatctgactcctgcttcccgggtgttgctcgtgacaaggaagatggggagccaaagaccaagcatctcagagaagaggaggaagaaggcgagaagcacagggaacttaggctgcggaactatgtcccggaggatgaggacctgaagaagaggagggtgccccaggccaaaccggttgcaggtaagcaagctgtccctctccacctctgcttcctggcactgtcagccaccctccacctcagcaggctttgctctctgagaataaccagcagtaccaggacaggagttgggcctgcaggcaggaccctttgttaccatctcatggcagatgcacacagtcggccttc

SEQ ID NO: 9292 - protein, 61 aa, Homo sapiens
MRGGGQGSGQRPAVHLTPASRVLLVTRKMGSQRPSISEKRRKKARSTGNLGCGTMSRRMRT

SEQ ID NO: 9293 - DNA, 997 bp, Homo sapiens
tggccccaggctgcccactgtctgctcaggcttccaaagctacaacctgccagcctatgctccatacctgccctgcgaggcctgcgcgatgcaagacgggagaaaaggaggggcgtacgcgggcaagatggaggcaactacggctggtgtgggccggctagaggaagaggcgttgcggcgaaaggaacggctgaaggccctacgggagaaaaccgggcgcaaggtgagaagtgtggagtgagggtcgcagttgaggcgtccagcgttcggggtccgggtcgcgcttgaggagagcaaagggctaataaggaaagacagctgccgagggcgcgcatgcgcgggcgctaacgcatgcgcgagaagacggcgccctcccacgatgtctggggctgcttggcgtgggactcctctggcgctggtgcggtcgtcgcgcatgcgcgggggtgggcaaggcagtggtcagcgacccgcagtccatctgactcctgcttcccgggtgttgctcgtgtaggtatctagggctgcctgtaggttcagatgcttgttgggttaggcgtgatttgttccgttcctctatggcctagctggtctttaacccccgccttcgattctgagtcagacagactccccagtccggcagcactccttggacagggcagcaagtgacagcagtgggtatacagccggagtcgtttcgtgcaaaaatcaaaaagaggccgggcacggtggctcacgcctgtaatcccagtgctttgggaggccgaggcaggcggatcacttgaggttagtagttcgagaccaggctgggtaacatggtgaaaccccgcctctactaaaaatacaaaaattagccgggcgtggtggtgcgcgcctgtaatcccagcttctcgggaggctatggcaggagaaccgcttgagcctgggaggcagaggttgtagtgagccgagatctcgccactgtactccagcctgggcaacagagcgagactccgtctca

SEQ ID NO: 9294 - protein, 34 aa, Homo sapiens
MLHTCPARPARCKTGEKEGRTRARWRQLRLVWAG

SEQ ID NO: 9295 - DNA, 8192 bp, Homo sapiens
gccggagccgggccgggccatggccgcctcggagcggctgtacgagttgtggctgctctactacgcgcagaaggacctgggttacctgcagcagtggctgaaggcctttgtaggtgccttcaagaagagcatctcactgtcctctctggagccacgaaggccagaggaggcaggtgcagaggtcccgctgctaccactggatgagctgcatgtgctggccgaacagctgcaccaggctgacctggagcaagccctcctgctgctcaagctcttcatcattctctgcaggaacctggagaacatagaggcaggccggggccaagtgctagtgccccgagtgctggcactgttgaccaagttggtggcggagctgaaaggatgcccaccaccccagggccgaggcacgcagttggagaatgtggccctacatgctctgcttctctgcgagggcctctttgacccttaccaaacctggcggcgccagcgcagtggggaagtcatcagctccaaggagaagagcaaatacaagttccctcctgctgctttgccccaggaattcagcgccttcttccaagagagcctacagaatgcagaccacttgcctcccatactgctgttacgtctcatccacctcttctgcgccgtcctcgctggaggaaaggagaacgggcagatggctgtaagtgatggctctgtgaagggcctgctgagtgtggtgcggggctggagccgtgggccagccccggacccgtgcctagtgccactggctctagaggcactggtaggtgcagtccatgtcttgcatgccagccgcgcacctcctcgtggcccagagcttcgtgccctgcttgagagctacttccatgtccttaatgctgactggccagctggtctgagctcaggccccgaagaggcccttgtcaccctccgggtcagcatgctcgacgccatccccatgatgctggcatgtgaagaccggccagtgctgcaagccaccttcctcagcaacaattgctttgaacacctcactcggctcattcagaacagcaagctgtacctgcagtcccgggcgccccccgagggggacagtgacctggctacccggttactgactgagcccgatgtccaaaaggtcctggaccaagacacagacgccattgcagtccatgtagtcagagtgctgacctgcatcatgagtgactccccctcggccaaggaggtgtttaaggagcgcatcggctaccctcacctgcaggaggttctgcagagccatggtccccccacccatcggctgttgcaagagctgctcaacatggctgtggagggtgaccacagcatgtgcccacctccaccaatccgcaacgagcagccggtactggtgctggcgcagtggctgccgtcattgcccaccgctgagctgcggctcttcctagcgcaacgcctcaggtggctctgtgacagctgccctgccagccgtgccacctgtgtgcaggcaggcctggtgggctgcctgttggagacactcagcacagggctagccctggaggcccgctgccaagagcagctgctggcactgctacaagcactgggccgtgtatcaataaggcccatggagctgcgtcacctgctgcgcccccggccaggattggactcggaaccaggcggagctgaggctggaaaggcccgacacgcaggtgctgtcatccgcacattatcaggcatggccaggcaccagggtcctgcacgtgctctgcgctactttgacctcacgcccagcatggcgggcatcatggtaccccctgtacagcgatggccagggcctggcttcacctttcatgcctggctctgtctgcaccctatggatacagcacctacccctgcccccacccgaccactccagcgaaagcagctgtacagcttctttaccagcagcggctcagggtttgaggccttcttcacggcggccgggaccctggtggtggctgtgtgcacacggaaggagtatttgaccatgagtttgcccgaagtgtcctttgccgactctgcctggcactgcgtggctatcgtccatgtgcctgggcgccggcccttcagccagaacctggtccatgtctacaaagacggccatctggtcaagacagcaccccttcgctgcccctccctcagtgagcctttctcctcctgctgtatcggctccgctggataccgcacaacgaccaccaccacagggctgcccacaccaccagtccccgccaccctggcctacactcaccccgccctcacccgctcccagtcagtcccagcctccacagggcttggctgggggtccgggctggtggcccccctgcaggagggcagcatcgactctaccctcgcaggcacccaggacactcggtggggcagccccacatccctggagggtgagctgggggctgtggccatctttcacgaagccctgcaggcgacggctctgaggaccctgtgcaccctggggcccaatgagacggcacccttcaagcctgagggggagctgcatgagctcagcaccaggctgctcctccattactcacctcaggcttgtaagaacaacatctgcctggacctgtcccccagtcatgggcttgatgggcgcctgacgggccacagagtggagacctgggatgtgaaggatgtggtgaactgcgttgggggtatgggtgccctgctgcccctgctggagcgagtagctgcacagcccaaagaggctgaagcaggtccagctgaaacgcatgacctcgtgggtcctgaactgacctctggtcacaacacccagggcctggttctcccattgggtaaatcttcagaggaacggatggagaggaacgcagtggctgcttttctgctgatgctgcggaacttccttcagggtcacatggtgaaccaagagagcctggtgcagtgccaggggcctgccatcatcggggccctcctgcgaaaggtcccaagctgggccatggacatgaacgtgctcatgtccgcccagctgctgatggagcaggtggcagctgagggcagcgggcccctcctgtacctactctaccagcatttgctcttcaactttcacctctggaccctcagtgacttcgccgtgcgcctcggtcacatccagtacatgtccagcatagttcgggagcacagacagaagctgcggaagaagtacggcgtccagtttatcttggatgctctgcgcacccactacagcccgcagcgggagcgccccctggctgctgacgacctacgcaccgtgcagacctccctcctgggcctggcgagggagttcctggtgcggagtctctcagcagatgacgtgcaggtcacgcagaccatgctgagctttttggcggccacaggcgatgacggtcaggcggtgggtgcgctggacctgctgctggccctgctgcacggttccctggtgcaggagtccttggctgtctttctgttggagccagggaacctcgaagtgctactggccctgctagtgcggccagggtcactgcccctgctgcccgatcgagtctgcaagatcctgcgcagactgcagcagaatgagcggctacctgagcggagccgccagcgcctccggctgcgggagtgtggtctccagggtctggttgcctgcttgcctgaggggactgtttccccccagctctgccagggcctctacaagctgttcctgggggcagattgcctgaacctctcagatctgctggctgtggtacagctgtccctccaggctgacctcagcgttcgcctagacatctgtcgccagcttttccacctcatctacggacagccagatgtagtgcggcttctggcccgacaggctggctggcaagatgtgctgacccggctatatgtcctggaggctgccacagccggcagcccccctccgtcttccccagagtcacctacctcccccaagccagccccacccaagccacccactgagtcacctgctgagccttcagatgtcttcctgccctcagaggccccctgccctgaccctgatggcttttaccatgctctctccccattctgcacgccctttgacctgggcctggaacggtctagtgtaggatcaggcaacactgctggtggtggcggcagcagtgggactcttactccagccagccagcccggcactccttcgccactggatgggccgcggccctttcctgctgctcctggccgccacagctccagtctctccaatgtgctggaggacggcagcctcccggagcccaccattagcggggatgatacctcgaacaccagcaacccacagcaaacctctgaggaagagttgtgcaatctgctcaccaacgtgctgttctcggtgacgtggcgtggcgtggaaggcagcgatgaggctgcctggcgggagcgtggccaggttttctcagtgctcacccagctgggggcctcagccacacttgtgcgcccaccagactgcatcaagcgcagcctcctggagatgatgctggagtcagccctgaccgacatcaaagaggcccccgtgggggtcctggccagcctcacccagcaagcgctttggctgctgcgtctgctgcaggacttcctgtgtgctgaaggccatggtaaccaggaactgtggagtgagaagctctttgaaggtgtatgcagcctacttgatcgcctgggagcctggccccacctggccaacggcacagctgatctccgtgagatggcgcagattggcctacggcttgtacttggctacatcctgctggaagacccacagctgcatgcccaggcctacgtgagattgcacatgctgctacagactgcagtgccagcccgccgcgaggaggcctgctatgtgctctccaagctggaggctgcactggggcgggtgctgaacacctcttccttggagtcagccactgatgaggcagggtccccacttgcagctgcagcagctgcagcagctgcagagcgctgctcctggctggtgccactggtgcgcacgctgctagaccgtgcctatgagccgctggggctgcagtggggactgccctccctgccacccaccaatggcagccccaccttctttgaagacttccaggctttttgtgccacacccgaatggcgccacttcatcgacaaacaggtacagccaaccatgtcccagttcgaaatggacacgtatgctaagagccacgaccttatgtcaggtttctggaatgcctgctatgacatgcttatgagcagtgggcagcggcgccagtgggagcgcgcccagagtcgtcgggccttccaggagctggtgctggaacctgcgcagaggcgggcgcgcctggaggggctacgctacacggcagtgctgaagcagcaggcaacgcagcactccatggccctgctgcactggggggcgctgtggcgccagctcgccagcccatgtggggcctgggcgctgagggacactcccatcccccgctggaaactgtccagcgccgagacatattcacgcatgcgtctgaagctggtgcccaaccatcacttcgaccctcacctggaagccagcgctctccgagacaatctgggtgaggttcccctgacacccaccgaggaggcctcactgcctctggcagtgaccaaagaggccaaagtgagcaccccacccgagttgctgcaggaggaccagctcggcgaggacgagctggctgagctggagaccccgatggaggcagcagaactggatgagcagcgtgagaagctggtgctgtcggccgagtgccagctggtgacggtagtggccgtggtcccagggctgctggaggtcaccacacagaatgtatacttctacgatggcagcactgagcgcgtggaaaccgaggagggcatcggctatgatttccggcgcccactggcccagctgcgtgaggtccacctgcggcgtttcaacctgcgccgttcagcacttgagctcttctttatcgatcaggccaactacttcctcaacttcccatgcaaggtgggcacgaccccagtctcatctcctagccagactcccagaccccagcctggccccatcccaccccatacccaggtacggaaccaggtgtactcgtggctcctgcgcctacggcccccctctcaaggctacctaagcagccgctccccccaggagatgctgcgtgcctcaggccttacccagaaatgggtacagcgtgagatatccaacttcgagtacttgatgcaactcaacaccattgcggggcggacctacaatgacctgtctcagtaccctgtgttcccctgggtcctgcaggactacgtgtccccaaccctggacctcagcaacccagccgtcttccgggacctgtctaagcccatcggtgtggtgaaccccaagcatgcccagctcgtgagggagaagtatgaaagctttgaggacccagcagggaccattgacaagttccactatggcacccactactccaatgcagcaggcgtgatgcactacctcatccgcgtggagcccttcacctccctgcacgtccagctgcaaagtggccgctttgactgctccgaccggcagttccactcggtggcggcagcctggcaggcacgcctggagagccctgccgatgtgaaggagctcatcccggaattcttctactttcctgacttcctggagaaccagaacggttttgacctgggctgtctccagctgaccaacgagaaggtaggcgatgtggtgctacccccgtgggccagctctcctgaggacttcatccagcagcaccgccaggctctggagtcggagtatgtgtctgcacacctacacgagtggatcgacctcatctttggctacaagcagcgggggccagccgccgaggaggccctcaatgtcttctattactgcacctatgagggggctgtagacctggaccatgtgacagatgagcgggaacggaaggctctggagggcattatcagcaactttgggcagactccctgtcagctgctgaaggagccacatccaactcggctctcagctgaggaagcagcccatcgccttgcacgcctggacactaactcacctagcatcttccagcacctggacgaactcaaggcattcttcgcagaggttgtcagtgatggtgtacccctggtgctagccctggtcccccaccggcagccccactccttcatcacccagggttccccagacctgttggtgactgtgagtgccagtgggctgctgggcacccacagctggttgccctatgaccgcaacataagcaactacttcagcttcagcaaagaccccaccatgggcagccacaagacgcagcgactgctgagtggcccgtgggtgccaggcagtggtgtgagtggacaagcactggcagtggccccggatggaaagctgctattcagcggtggccactgggatggcagcctgcgggtgactgcactaccccgtggcaagctgttgagccagctcagctgccaccttgatgtagtaacctgccttgcactggacacctgtggcatctacctcatctcaggctcccgggacaccacgtgcatggtgtggcggctcctgcatcagggtggtctgtcagtaggcctggcaccaaagcctgtgcaggtcctgtatgggcatggggctgcagtgagctgtgtggccatcagcactgaacttgacatggctgtgtctggatctgaggatggaactgtgatcatacacactgtacgccgcggacagtttgtagcggcactacggcctctgggtgccacattccctggacctattttccacctggcattggggtccgaaggccagattgtggtacagagctcagcgtgggaacgtcctggggcccaggtcacctactccttgcacctgtattcagtcaatgggaagttgcgggcttcactgcccctggcagagcagcctacagccctgacggtgacagaggactttgtgttgctgggcaccgcccagtgcgccctgcacatcctccaactaaacacactgctcccggccgcgcctcccttgcccatgaaggtggccatccgcagcgtggccgtgaccaaggagcgcagccacgtgctggtgggcctggaggatggcaagctcatcgtggtggtcgcggggcagccctctgaggtgcgcagca

SEQ ID NO: 9296 - protein, 2754 aa, Homo sapiens
MAASERLYELWLLYYAQKDLGYLQQWLKAFVGAFKKSISLSSLEPRRPEEAGAEVPLLPLDELHVLAEQLHQADLEQALLLLKLFIILCRNLENIEAGRGQVLVPRVLALLTKLVAELKGCPPPQGRGTQLENVALHALLLCEGLFDPYQTWRRQRSGEVISSKEKSKYKFPPAALPQEFSAFFQESLQNADHLPPILLLRLIHLFCAVLAGGKENGQMAVSDGSVKGLLSVVRGWSRGPAPDPCLVPLALEALVGAVHVLHASRAPPRGPELRALLESYFHVLNADWPAGLSSGPEEALVTLRVSMLDAIPMMLACEDRPVLQATFLSNNCFEHLTRLIQNSKLYLQSRAPPEGDSDLATRLLTEPDVQKVLDQDTDAIAVHVVRVLTCIMSDSPSAKEVFKERIGYPHLQEVLQSHGPPTHRLLQELLNMAVEGDHSMCPPPPIRNEQPVLVLAQWLPSLPTAELRLFLAQRLRWLCDSCPASRATCVQAGLVGCLLETLSTGLALEARCQEQLLALLQALGRVSIRPMELRHLLRPRPGLDSEPGGAEAGKARHAGAVIRTLSGMARHQGPARALRYFDLTPSMAGIMVPPVQRWPGPGFTFHAWLCLHPMDTAPTPAPTRPLQRKQLYSFFTSSGSGFEAFFTAAGTLVVAVCTRKEYLTMSLPEVSFADSAWHCVAIVHVPGRRPFSQNLVHVYKDGHLVKTAPLRCPSLSEPFSSCCIGSAGYRTTTTTTGLPTPPVPATLAYTHPALTRSQSVPASTGLGWGSGLVAPLQEGSIDSTLAGTQDTRWGSPTSLEGELGAVAIFHEALQATALRTLCTLGPNETAPFKPEGELHELSTRLLLHYSPQACKNNICLDLSPSHGLDGRLTGHRVETWDVKDVVNCVGGMGALLPLLERVAAQPKEAEAGPAETHDLVGPELTSGHNTQGLVLPLGKSSEERMERNAVAAFLLMLRNFLQGHMVNQESLVQCQGPAIIGALLRKVPSWAMDMNVLMSAQLLMEQVAAEGSGPLLYLLYQHLLFNFHLWTLSDFAVRLGHIQYMSSIVREHRQKLRKKYGVQFILDALRTHYSPQRERPLAADDLRTVQTSLLGLAREFLVRSLSADDVQVTQTMLSFLAATGDDGQAVGALDLLLALLHGSLVQESLAVFLLEPGNLEVLLALLVRPGSLPLLPDRVCKILRRLQQNERLPERSRQRLRLRECGLQGLVACLPEGTVSPQLCQGLYKLFLGADCLNLSDLLAVVQLSLQADLSVRLDICRQLFHLIYGQPDVVRLLARQAGWQDVLTRLYVLEAATAGSPPPSSPESPTSPKPAPPKPPTESPAEPSDVFLPSEAPCPDPDGFYHALSPFCTPFDLGLERSSVGSGNTAGGGGSSGTLTPASQPGTPSPLDGPRPFPAAPGRHSSSLSNVLEDGSLPEPTISGDDTSNTSNPQQTSEEELCNLLTNVLFSVTWRGVEGSDEAAWRERGQVFSVLTQLGASATLVRPPDCIKRSLLEMMLESALTDIKEAPVGVLASLTQQALWLLRLLQDFLCAEGHGNQELWSEKLFEGVCSLLDRLGAWPHLANGTADLREMAQIGLRLVLGYILLEDPQLHAQAYVRLHMLLQTAVPARREEACYVLSKLEAALGRVLNTSSLESATDEAGSPLAAAAAAAAAERCSWLVPLVRTLLDRAYEPLGLQWGLPSLPPTNGSPTFFEDFQAFCATPEWRHFIDKQVQPTMSQFEMDTYAKSHDLMSGFWNACYDMLMSSGQRRQWERAQSRRAFQELVLEPAQRRARLEGLRYTAVLKQQATQHSMALLHWGALWRQLASPCGAWALRDTPIPRWKLSSAETYSRMRLKLVPNHHFDPHLEASALRDNLGEVPLTPTEEASLPLAVTKEAKVSTPPELLQEDQLGEDELAELETPMEAAELDEQREKLVLSAECQLVTVVAVVPGLLEVTTQNVYFYDGSTERVETEEGIGYDFRRPLAQLREVHLRRFNLRRSALELFFIDQANYFLNFPCKVGTTPVSSPSQTPRPQPGPIPPHTQVRNQVYSWLLRLRPPSQGYLSSRSPQEMLRASGLTQKWVQREISNFEYLMQLNTIAGRTYNDLSQYPVFPWVLQDYVSPTLDLSNPAVFRDLSKPIGVVNPKHAQLVREKYESFEDPAGTIDKFHYGTHYSNAAGVMHYLIRVEPFTSLHVQLQSGRFDCSDRQFHSVAAAWQARLESPADVKELIPEFFYFPDFLENQNGFDLGCLQLTNEKVGDVVLPPWASSPEDFIQQHRQALESEYVSAHLHEWIDLIFGYKQRGPAAEEALNVFYYCTYEGAVDLDHVTDERERKALEGIISNFGQTPCQLLKEPHPTRLSAEEAAHRLARLDTNSPSIFQHLDELKAFFAEVVSDGVPLVLALVPHRQPHSFITQGSPDLLVTVSASGLLGTHSWLPYDRNISNYFSFSKDPTMGSHKTQRLLSGPWVPGSGVSGQALAVAPDGKLLFSGGHWDGSLRVTALPRGKLLSQLSCHLDVVTCLALDTCGIYLISGSRDTTCMVWRLLHQGGLSVGLAPKPVQVLYGHGAAVSCVAISTELDMAVSGSEDGTVIIHTVRRGQFVAALRPLGATFPGPIFHLALGSEGQIVVQSSAWERPGAQVTYSLHLYSVNGKLRASLPLAEQPTALTVTEDFVLLGTAQCALHILQLNTLLPAAPPLPMKVAIRSVAVTKERSHVLVGLEDGKLIVVVAGQPSEVRSSQFARKLWRSSRRISQVSSGETEYNPTEAR

SEQ ID NO: 9297 - DNA, 2081 bp, Homo sapiens
aaagttttcctggcagcgcctagacctgggcttagccactgcccctcttgcccatggaaccagctctggggcctggggtccagaaggacctgggttacctgcagcagtggctgaaggcctttgtaggtgccttcaagaagagcatctcactgtcctctctggagccacgaaggccagaggaggcaggtgcagaggtcccgctgctaccactggatgagctgcatgtgctggccgaacagctgcaccaggctgacctggagcaagccctcctgctgctcaagctcttcatcattctctgcaggaacctggagaacatagaggcaggccggggccaagtgctagtgccccgagtgctggcactgttgaccaagttggtggcggagctgaaaggatgcccaccaccccagggccgaggcacgcagttggagaatgtggccctacatgctctgcttctctgcgagggcctctttgacccttaccaaacctggcggcgccagcgcagtggggaagtcatcagctccaaggagaagagcaaatacaagttccctcctgctgctttgccccaggaattcagcgccttcttccaagagagcctacagaatgcagaccacttgcctcccatactgctgttacgtctcatccacctcttctgcgccgtcctcgctggaggaaaggagaacgggcagatggctgtaagtgatggctctgtgaagggcctgctgagtgtggtgcggggctggagccgtgggccagccccggacccgtgcctagtgccactggctctagaggcactggtaggtgcagtccatgtcttgcatgccagccgcgcacctcctcgtggcccagagcttcgtgccctgcttgagagctacttccatgtccttaatgctgactggccagctggtctgagctcaggccccgaagaggcccttgtcaccctccgggtcagcatgctcgacgccatccccatgatgctggcatgtgaagaccggccagtgctgcaagccaccttcctcagcaacaattgctttgaacacctcactcggctcattcagaacagcaaggtcctggaccaagacacagacgccattgcagtccatgtagtcagagtgctgacctgcatcatgagtgactccccctcggccaaggaggtgtttaaggagcgcatcggctaccctcacctgcaggaggttctgcagagccatggtccccccacccatcggctgttgcaagagctgctcaacatggctgtggagggtgaccacagcatgtgcccacctccaccaatccgcaacgagcagccggtactggtgctggcgcagtggctgccgtcattgcccaccgctgagctgcggctcttcctagcgcaacgcctcaggtggctctgtgacagctgccctgccagccgtgccacctgtgtgcaggcaggcctggtgggctgcctgttggagacactcagcacagggctagccctggaggcccgctgccaagagcagctgctggcactgctacaagcactgggccgtgtatcaataaggcccatggagctgcgtcacctgctgcgcccccggccaggattggactcggaaccaggcggagctgaggctggaaaggcccgacacgcaggtgctgtcatccgcacattatcaggcatggccaggcaccagggtcctgcacgtgctctgcgctactttgacctcacgcccagcatggcgggcatcatggtaccccctgtacagcgatggccagggcctggcttcacctttcatgcctggctctgtctgcaccctatggatacagcacctacccctgcccccaccctgcccagctcagggattggcgggcgatgttaccccctcagggattggcgggcggaagtcccgcccctcgccggctgaggggccgccctgagggccagcactggcgtctgcggccgcagcagcactttttgcacagtctggggcggggttccccggcttccaagtcgctgtttcgtcaaagcacgagggccgcctgtggccttaattcctaacggcggccccggttctcccttctcggcaataaaccaggcctagttttgt

SEQ ID NO: 9298 - protein, 614 aa, Homo sapiens
MEPALGPGVQKDLGYLQQWLKAFVGAFKKSISLSSLEPRRPEEAGAEVPLLPLDELHVLAEQLHQADLEQALLLLKLFIILCRNLENIEAGRGQVLVPRVLALLTKLVAELKGCPPPQGRGTQLENVALHALLLCEGLFDPYQTWRRQRSGEVISSKEKSKYKFPPAALPQEFSAFFQESLQNADHLPPILLLRLIHLFCAVLAGGKENGQMAVSDGSVKGLLSVVRGWSRGPAPDPCLVPLALEALVGAVHVLHASRAPPRGPELRALLESYFHVLNADWPAGLSSGPEEALVTLRVSMLDAIPMMLACEDRPVLQATFLSNNCFEHLTRLIQNSKVLDQDTDAIAVHVVRVLTCIMSDSPSAKEVFKERIGYPHLQEVLQSHGPPTHRLLQELLNMAVEGDHSMCPPPPIRNEQPVLVLAQWLPSLPTAELRLFLAQRLRWLCDSCPASRATCVQAGLVGCLLETLSTGLALEARCQEQLLALLQALGRVSIRPMELRHLLRPRPGLDSEPGGAEAGKARHAGAVIRTLSGMARHQGPARALRYFDLTPSMAGIMVPPVQRWPGPGFTFHAWLCLHPMDTAPTPAPTLPSSGIGGRCYPLRDWRAEVPPLAG

SEQ ID NO: 9299 - DNA, 6513 bp, Homo sapiens
ggcccatggagctgcgtcacctgctgcgcccccggccaggattggactcggaaccaggcggagctgaggctggaaaggcccgacacgcaggtgctgtcatccgcacattatcaggcatggccaggcaccagggtcctgcacgtgctctgcgctactttgacctcacgcccagcatggcgggcatcatggtaccccctgtacagcgatggccagggcctggcttcacctttcatgcctggctctgtctgcaccctatggatacagcacctacccctgcccccacccgaccactccagcgaaagcagctgtacagcttctttaccagcagcggctcagggtttgaggccttcttcacggcggccgggaccctggtggtggctgtgtgcacacggaaggagtatttgaccatgagtttgcccgaagtgtcctttgccgactctgcctggcactgcgtggctatcgtccatgtgcctgggcgccggcccttcagccagaacctggtccatgtctacaaagacggccatctggtcaagacagcaccccttcgctgcccctccctcagtgagcctttctcctcctgctgtatcggctccgctggataccgcacaacgaccaccaccacagggctgcccacaccaccagtccccgccaccctggcctacactcaccccgccctcacccgctcccagtcagtcccagcctccacagggcttggctgggggtccgggctggtggcccccctgcaggagggcagcatcgactctaccctcgcaggcacccaggacactcggtggggcagccccacatccctggagggtgagctgggggctgtggccatctttcacgaagccctgcaggcgacggctctgaggaccctgtgcaccctggggcccaatgagacggcacccttcaagcctgagggggagctgcatgagctcagcaccaggctgctcctccattactcacctcaggcttgtaagaacaacatctgcctggacctgtcccccagtcatgggcttgatgggcgcctgacgggccacagagtggagacctgggatgtgaaggatgtggtgaactgcgttgggggtatgggtgccctgctgcccctgctggagcgagtagctgcacagcccaaagaggctgaagcaggtccagctgaaacgcatgacctcgtgggtcctgaactgacctctggtcacaacacccagggcctggttctcccattgggtaaatcttcagaggaacggatggagaggaacgcagtggctgcttttctgctgatgctgcggaacttccttcagggtcacatggtgaaccaagagagcctggtgcagtgccaggggcctgccatcatcggggccctcctgcgaaaggtcccaagctgggccatggacatgaacgtgctcatgtccgcccagctgctgatggagcaggtggcagctgagggcagcgggcccctcctgtacctactctaccagcatttgctcttcaactttcacctctggaccctcagtgacttcgccgtgcgcctcggtcacatccagtacatgtccagcatagttcgggagcacagacagaagctgcggaagaagtacggcgtccagtttatcttggatgctctgcgcacccactacagcccgcagcgggagcgccccctggctgctgacgacctacgcaccgtgcagacctccctcctgggcctggcgagggagttcctggtgcggagtctctcagcagatgacgtgcaggtcacgcagaccatgctgagctttttggcggccacaggcgatgacggtcagatcctgcgcagactgcagcagaatgagcggctacctgagcggagccgccagcgcctccggctgcgggagtgtggtctccagggtctggttgcctgcttgcctgaggggactgtttccccccagctctgccagggcctctacaagctgttcctgggggcaggatcaggcaacactgctggtggtggcggcagcagtgggactcttactccagccagccagcccggcactccttcgccactggatgggccgcggccctttcctgctgctcctggccgccacagctccagtctctccaatgtgctggaggacggcagcctcccggagcccaccattagcggggatgatacctcgaacaccagcaacccacagcaaacctctgaggaagagttgtgcaatctgctcaccaacgtgctgttctcggtgacgtggcgtggcgtggaaggcagcgatgaggctgcctggcgggagcgtggccaggttttctcagtgctcacccagctgggggcctcagccacacttgtgcgcccaccagactgcatcaagcgcagcctcctggagatgatgctggagtcagccctgaccgacatcaaagaggcccccgtgggggtcctggccagcctcacccagcaagcgctttggctgctgcgtctgctgcaggacttcctgtgtgctgaaggccatggtaaccaggaactgtggagtgagaagctctttgaaggtgtatgcagcctacttgatcgcctgggagcctggccccacctggccaacggcacagctgatctccgtgagatggcgcagattggcctacggcttgtacttggctacatcctgctggaagacccacagctgcatgcccaggcctacgtgagattgcacatgctgctacagactgcagtgccagcccgccgcgaggaggcctgctatgtgctctccaagctggaggctgcactggggcgggtgctgaacacctcttccttggagtcagccactgatgaggcagggtccccacttgcagctgcagcagctgcagcagctgcagagcgctgctcctggctggtgccactggtgcgcacgctgctagaccgtgcctatgagccgctggggctgcagtggggactgccctccctgccacccaccaatggcagccccaccttctttgaagacttccaggctttttgtgccacacccgaatggcgccacttcatcgacaaacaggtacagccaaccatgtcccagttcgaaatggacacgtatgctaagagccacgaccttatgtcaggtttctggaatgcctgctatgacatgcttatgagcagtgggcagcggcgccagtgggagcgcgcccagagtcgtcgggccttccaggagctggtgctggaacctgcgcagaggcgggcgcgcctggaggggctacgctacacggcagtgctgaagcagcaggcaacgcagcactccatggccctgctgcactggggggcgctgtggcgccagctcgccagcccatgtggggcctgggcgctgagggacactcccatcccccgctggaaactgtccagcgccgagacatattcacgcatgcgtctgaagctggtgcccaaccatcacttcgaccctcacctggaagccagcgctctccgagacaatctgggtgaggttcccctgacacccaccgaggaggcctcactgcctctggcagtgaccaaagaggccaaagtgagcaccccacccgagttgctgcaggaggaccagctcggcgaggacgagctggctgagctggagaccccgatggaggcagcagaactggatgagcagcgtgagaagctggtgctgtcggccgagtgccagctggtgacggtagtggccgtggtcccagggctgctggaggtcaccacacagaatgtatacttctacgatggcagcactgagcgcgtggaaaccgaggagggcatcggctatgatttccggcgcccactggcccagctgcgtgaggtccacctgcggcgtttcaacctgcgccgttcagcacttgagctcttctttatcgatcaggccaactacttcctcaacttcccatgcaaggtgggcacgaccccagtctcatctcctagccagactcccagaccccagcctggccccatcccaccccatacccaggtacggaaccaggtgtactcgtggctcctgcgcctacggcccccctctcaaggctacctaagcagccgctccccccaggagatgctgcgtgcctcaggccttacccagaaatgggtacagcgtgagatatccaacttcgagtacttgatgcaactcaacaccattgcggggcggacctacaatgacctgtctcagtaccctgtgttcccctgggtcctgcaggactacgtgtccccaaccctggacctcagcaacccagccgtcttccgggacctgtctaagcccatcggtgtggtgaaccccaagcatgcccagctcgtgagggagaagtatgaaagctttgaggacccagcagggaccattgacaagttccactatggcacccactactccaatgcagcaggcgtgatgcactacctcatccgcgtggagcccttcacctccctgcacgtccagctgcaaagtggccgctttgactgctccgaccggcagttccactcggtggcggcagcctggcaggcacgcctggagagccctgccgatgtgaaggagctcatcccggaattcttctactttcctgacttcctggagaaccagaacggttttgacctgggctgtctccagctgaccaacgagaaggtaggcgatgtggtgctacccccgtgggccagctctcctgaggacttcatccagcagcaccgccaggctctggagtcggagtatgtgtctgcacacctacacgagtggatcgacctcatctttggctacaagcagcgggggccagccgccgaggaggccctcaatgtcttctattactgcacctatgagggggctgtagacctggaccatgtgacagatgagcgggaacggaaggctctggagggcattatcagcaactttgggcagactccctgtcagctgctgaaggagccacatccaactcggctctcagctgaggaagcagcccatcgccttgcacgcctggacactaactcacctagcatcttccagcacctggacgaactcaaggcattcttcgcagaggttgtcagtgatggtgtacccctggtgctagccctggtcccccaccggcagccccactccttcatcacccagggttccccagacctgttggtgactgtgagtgccagtgggctgctgggcacccacagctggttgccctatgaccgcaacataagcaactacttcagcttcagcaaagaccccaccatgggcagccacaagacgcagcgactgctgagtggcccgtgggtgccaggcagtggtgtgagtggacaagcactggcagtggccccggatggaaagctgctattcagcggtggccactgggatggcagcctgcgggtgactgcactaccccgtggcaagctgttgagccagctcagctgccaccttgatgtagtaacctgccttgcactggacacctgtggcatctacctcatctcaggctcccgggacaccacgtgcatggtgtggcggctcctgcatcagggtggtctgtcagtaggcctggcaccaaagcctgtgcaggtcctgtatgggcatggggctgcagtgagctgtgtggccatcagcactgaacttgacatggctgtgtctggatctgaggatggaactgtgatcatacacactgtacgccgcggacagtttgtagcggcactacggcctctgggtgccacattccctggacctattttccacctggcattggggtccgaaggccagattgtggtacagagctcagcgtgggaacgtcctggggcccaggtcacctactccttgcacctgtattcagtcaatgggaagttgcgggcttcactgcccctggcagagcagcctacagccctgacggtgacagaggactttgtgttgctgggcaccgcccagtgcgccctgcacatcctccaactaaacacactgctcccggccgcgcctcccttgcccatgaaggtggccatccgcagcgtggccgtgaccaaggagcgcagccacgtgctggtgggcctggaggatggcaagctcatcgtggtggtcgcggggcagccctctgaggtgcgcagcagccagttcgcgcggaagctgtggcggtcctcgcggcgcatctcccaggtgtcctcgggagagacggaatacaaccctactgaggcgcgctgaacctggccagtccggctgctcgggccccgcccccggcaggcctggcccgggaggccccgcccagaagtcggcgggaacaccccggggtgggcagcccaggggggtgagcggggcccaccctgcccagctcagggattggcgggcgatgttaccccctcagggattggcgggcggaagtcccgcccctcgccggctgaggggccgccctgagggccagcactggcgtctgcggccgcagcagcactttttgcacagtctggggcggggttccccggcttccaagtcgctgtttcgtcaaagcacgagggccgcctgtggccttaattcctaacggcggccccggttctcccttctcggcaataaaccaggcctagttttgtagctg

SEQ ID NO: 9300 - protein, 2040 aa, Homo sapiens
MELRHLLRPRPGLDSEPGGAEAGKARHAGAVIRTLSGMARHQGPARALRYFDLTPSMAGIMVPPVQRWPGPGFTFHAWLCLHPMDTAPTPAPTRPLQRKQLYSFFTSSGSGFEAFFTAAGTLVVAVCTRKEYLTMSLPEVSFADSAWHCVAIVHVPGRRPFSQNLVHVYKDGHLVKTAPLRCPSLSEPFSSCCIGSAGYRTTTTTTGLPTPPVPATLAYTHPALTRSQSVPASTGLGWGSGLVAPLQEGSIDSTLAGTQDTRWGSPTSLEGELGAVAIFHEALQATALRTLCTLGPNETAPFKPEGELHELSTRLLLHYSPQACKNNICLDLSPSHGLDGRLTGHRVETWDVKDVVNCVGGMGALLPLLERVAAQPKEAEAGPAETHDLVGPELTSGHNTQGLVLPLGKSSEERMERNAVAAFLLMLRNFLQGHMVNQESLVQCQGPAIIGALLRKVPSWAMDMNVLMSAQLLMEQVAAEGSGPLLYLLYQHLLFNFHLWTLSDFAVRLGHIQYMSSIVREHRQKLRKKYGVQFILDALRTHYSPQRERPLAADDLRTVQTSLLGLAREFLVRSLSADDVQVTQTMLSFLAATGDDGQILRRLQQNERLPERSRQRLRLRECGLQGLVACLPEGTVSPQLCQGLYKLFLGAGSGNTAGGGGSSGTLTPASQPGTPSPLDGPRPFPAAPGRHSSSLSNVLEDGSLPEPTISGDDTSNTSNPQQTSEEELCNLLTNVLFSVTWRGVEGSDEAAWRERGQVFSVLTQLGASATLVRPPDCIKRSLLEMMLESALTDIKEAPVGVLASLTQQALWLLRLLQDFLCAEGHGNQELWSEKLFEGVCSLLDRLGAWPHLANGTADLREMAQIGLRLVLGYILLEDPQLHAQAYVRLHMLLQTAVPARREEACYVLSKLEAALGRVLNTSSLESATDEAGSPLAAAAAAAAAERCSWLVPLVRTLLDRAYEPLGLQWGLPSLPPTNGSPTFFEDFQAFCATPEWRHFIDKQVQPTMSQFEMDTYAKSHDLMSGFWNACYDMLMSSGQRRQWERAQSRRAFQELVLEPAQRRARLEGLRYTAVLKQQATQHSMALLHWGALWRQLASPCGAWALRDTPIPRWKLSSAETYSRMRLKLVPNHHFDPHLEASALRDNLGEVPLTPTEEASLPLAVTKEAKVSTPPELLQEDQLGEDELAELETPMEAAELDEQREKLVLSAECQLVTVVAVVPGLLEVTTQNVYFYDGSTERVETEEGIGYDFRRPLAQLREVHLRRFNLRRSALELFFIDQANYFLNFPCKVGTTPVSSPSQTPRPQPGPIPPHTQVRNQVYSWLLRLRPPSQGYLSSRSPQEMLRASGLTQKWVQREISNFEYLMQLNTIAGRTYNDLSQYPVFPWVLQDYVSPTLDLSNPAVFRDLSKPIGVVNPKHAQLVREKYESFEDPAGTIDKFHYGTHYSNAAGVMHYLIRVEPFTSLHVQLQSGRFDCSDRQFHSVAAAWQARLESPADVKELIPEFFYFPDFLENQNGFDLGCLQLTNEKVGDVVLPPWASSPEDFIQQHRQALESEYVSAHLHEWIDLIFGYKQRGPAAEEALNVFYYCTYEGAVDLDHVTDERERKALEGIISNFGQTPCQLLKEPHPTRLSAEEAAHRLARLDTNSPSIFQHLDELKAFFAEVVSDGVPLVLALVPHRQPHSFITQGSPDLLVTVSASGLLGTHSWLPYDRNISNYFSFSKDPTMGSHKTQRLLSGPWVPGSGVSGQALAVAPDGKLLFSGGHWDGSLRVTALPRGKLLSQLSCHLDVVTCLALDTCGIYLISGSRDTTCMVWRLLHQGGLSVGLAPKPVQVLYGHGAAVSCVAISTELDMAVSGSEDGTVIIHTVRRGQFVAALRPLGATFPGPIFHLALGSEGQIVVQSSAWERPGAQVTYSLHLYSVNGKLRASLPLAEQPTALTVTEDFVLLGTAQCALHILQLNTLLPAAPPLPMKVAIRSVAVTKERSHVLVGLEDGKLIVVVAGQPSEVRSSQFARKLWRSSRRISQVSSGETEYNPTEAR

SEQ ID NO: 9301 - DNA, 2074 bp, Homo sapiens
gcagatgggaatcctaatcaaggtcactgatttcaaggcaccttagaaaatgagctaaacatgggaagagtatgggggcaggaggggtgccttcttcatcagggccaggataaagtgtcgactcaacaagctctgaaagccttagggagatcaggagggagatctgtccttggaccccttccatcgccttcctagacaggaacattcctgaatgttgcccccaggcctgactttttttttaggtttccctctcttcctgcctttgggctagggggacaaggaataacagggtgagaggaccaagttgaaactaagtgtgatactctggaagcatcttccatgtctgtcccagcttctcacccactttctgagatgccctcctaaagtctctgcctgtttcttggagggaacctctgcatctgtgacacctactctatgacccctggggactgacagtaaaggaagggatgatgcttcagggagcagatagtgtaatctgatagtactcaggcatagctaggcctgcccttgcccctgcaggttgtcagtgatggtgtacccctggtgctagccctggtcccccaccggcagccccactccttcatcacccagggttccccagacctgttggtgactgtgagtgccagtgggctgctgggcacccacagctggttgccctatgaccgcaacataagcaactacttcagcttcagcaaagaccccaccatgggcagccacaagtaggacagagggctgtgggtggggtgggctacaaatgccctgcacccggaattattcccctccctaatcagaatgtaggccagctgcaggggaaaggtctggccaggctccctgagggcctgggtctcttccatgtggcctggcctcacttgctatccccctcactgggtcaggacgcagcgactgctgagtggcccgtgggtgccaggcagtggtgtgagtggacaagcactggcagtggccccggatggaaagctgctattcagcggtggccactgggatggcagcctgcgggtgactgcactaccccgtggcaagctgttgagccagctcagctgccaccttggtatgaacagccttggagctggggagaatgaggcacacaggtatggggccgggttctgaggctggccagggcggatgtgactcctccgttctgcctgtaccctccccttcccatgcagatgtagtaacctgccttgcactggacacctgtggcatctacctcatctcaggctcccgggacaccacgtgcatggtgtggcggctcctgcatcaggtgtgcctcgtgggcagctctgtggggcccccgtagcccagacctgcagcccatccgtccctcagtggccttccagtcctgtcctcctctagtcttggacaaggccttcatttcctgagcctcaggggacagtcctaagccaaccctggtcctccacagggtggtctgtcagtaggcctggcaccaaagcctgtgcaggtcctgtatgggcatggggctgcagtgagctgtgtggccatcagcactgaacttgacatggctgtgtctggatctgaggtgtgtgtatgcatgtgccctggggagggtgagtttcctgggcaatccccctggagcccagactcctgcccaggaccctaagttgccttcctgcaggatggaactgtgatcatacacactgtacgccgcggacagtttgtagcggcactacggcctctgggtgccacattccctggacctattttccacctggcattggggtccgaaggccagattgtggtacagagctcagcgtgggaacgtcctggggcccaggtatggggaaggggtgcccagcaaagatggaggggcagttgggatcctgtccttgctgacactccctgcttcctccaggtcacctactccttgcacctgtattcagtcaatgggaagttgcgggcttcactgcccctggcagagcagcctacagccctgacggtgacagaggactttgtgttgctgggcaccgcccagtgcgccctgcacatcctccaactaaacacgtaagccccccattta

SEQ ID NO: 9302 - protein, 90 aa, Homo sapiens
MWPGLTCYPPHWVRTQRLLSGPWVPGSGVSGQALAVAPDGKLLFSGGHWDGSLRVTALPRGKLLSQLSCHLGMNSLGAGENEAHRYGAGF

SEQ ID NO: 9303 - DNA, 1360 bp, Homo sapiens
ccagaaacccacctctgccccctcctgcctgcaggtgactgtgagtgccagtgggctgctgggcacccacagctggttgccctatgaccgcaacataagcaactacttcagcttcagcaaagaccccaccatgggcagccacaagtaggacagagggctgtgggtggggtgggctacaaatgccctgcacccggaattattcccctccctaatcagaatgtaggccagctgcaggggaaaggtctggccaggctccctgagggcctgggtctcttccatgtggcctggcctcacttgctatccccctcactgggtcaggacgcagcgactgctgagtggcccgtgggtgccaggcagtggtgtgagtggacaagcactggcagtggccccggatggaaagctgctattcagcggtggccactgggatggcagcctgcgggtgactgcactaccccgtggcaagctgttgagccagctcagctgccaccttgatgtagtaacctgccttgcactggacacctgtggcatctacctcatctcaggctcccgggacaccacgtgcatggtgtggcggctcctgcatcaggtgtgcctcgtgggcagctctgtggggcccccgtagcccagacctgcagcccatccgtccctcagtggccttccagtcctgtcctcctctagtcttggacaaggccttcatttcctgagcctcaggggacagtcctaagccaaccctggtcctccacagggtggtctgtcagtaggcctggcaccaaagcctgtgcaggtcctgtatgggcatggggctgcagtgagctgtgtggccatcagcactgaacttgacatggctgtgtctggatctgaggtgtgtgtatgcatgtgccctggggagggtgagtttcctgggcaatccccctggagcccagactcctgcccaggaccctaagttgccttcctgcaggatggaactgtgatcatacacactgtacgccgcggacagtttgtagcggcactacggcctctgggtgccacattccctggacctattttccacctggcattggggtccgaaggccagattgtggtacagagctcagcgtgggaacgtcctggggcccaggtatggggaaggggtgcccagcaaagatggaggggcagttgggatcctgtccttgctgacactccctgcttcctccaggtcacctactccttgcacctgtattcagtcaatgggaagttgcgggcttcactgcccctggcagagcagcctacagccctgacggtgacagaggactttgtgttgctgggcaccgcccagtgcgccctgcacatcctccaactaaacacgtaagccccccattta

SEQ ID NO: 9304 - protein, 114 aa, Homo sapiens
MWPGLTCYPPHWVRTQRLLSGPWVPGSGVSGQALAVAPDGKLLFSGGHWDGSLRVTALPRGKLLSQLSCHLDVVTCLALDTCGIYLISGSRDTTCMVWRLLHQVCLVGSSVGPP

SEQ ID NO: 9305 - DNA, 805 bp, Homo sapiens
ccacagggtggtctgtcagtaggcctggcaccaaagcctgtgcaggtcctgtatgggcatggggctgcagtgagctgtgtggccatcagcactgaacttgacatggctgtgtctggatctgaggtgtgtgtatgcatgtgccctggggagggtgagtttcctgggcaatccccctggagcccagactcctgcccaggaccctaagttgccttcctgcaggatggaactgtgatcatacacactgtacgccgcggacagtttgtagcggcactacggcctctgggtgccacattccctggacctattttccacctggcattggggtccgaaggccagattgtggtacagagctcagcgtgggaacgtcctggggcccaggtatggggaaggggtgcccagcaaagatggaggggcagttgggatcctgtccttgctgacactccctgcttcctccaggtcacctactccttgcacctgtattcagtcaatgggaagttgcgggcttcactgcccctggcagagcagcctacagccctgacggtgacagaggactttgtgttgctgggcaccgcccagtgcgccctgcacatcctccaactaaacacactgctcccggccgcgcctcccttgcccatgaaggtggccatccgcagcgtggccgtgaccaaggagcgcagccacgtgctggtgggcctggaggatggcaagctcatcgtggtggtcgcggggcagccctctgaggtgaggatggggcgggggtggggaggcccccctcgccggctgaggggccgccctgagggccagc

SEQ ID NO: 9306 - protein, 56 aa, Homo sapiens
MKVAIRSVAVTKERSHVLVGLEDGKLIVVVAGQPSEVRMGRGWGGPPRRLRGRPEG

SEQ ID NO: 9307 - DNA, 568 bp, Homo sapiens
atccaggggcaacagattttcacagctcatccacaaggagtggtggtacagccagccgcagcatgattacctagttgtgagctgttggcatgtggttagaagccatcagaggtgcaagggcttagaaaagaccctggccagacctgactccactcttaaacctgggtcttctccttggcggtgctgtcagcgcacagacccatgcgcatccccacccacaaccctttaccctgatgatctgtattatattttaatgtatatgtgaatatattgaaaataatttgttttttcctggtttttgtttggttttcgttttgcttttagcctctacatgctaggatcacaggaagactttgtaaggacagtttaagttctcctgcaaggtttaatttgttatcatgtaaatattctaaagcaggctgccttgtggttttggccagccttgtgctatgttgataagattgatttactgcttaaaatcactttactttatccaatttttactgaactttttatgtaaaaaaataaaatcaattaaagaacttggcatgtgtgttccctaaaagtt

SEQ ID NO: 9308 - protein, 37 aa, Homo sapiens
MLIRLIYCLKSLYFIQFLLNFLCKKIKSIKELGMCVP

SEQ ID NO: 9309 - DNA, 7856 bp, Homo sapiens
caacactctcatcaccagcaccagtaacagagccagtggccttgccacatacaccaataacagttctaatggcagcaccagtacccttaccagtagatgtagcagttagatctctgaaagaaccaccaattataattgtaccagaatctttagaagcagatactaagcaggacactatatctaatagtttagaagaacacgtaactcaaatattgaatgagcaagcagatatttcctcaaaaaaagaagattcccatattgggaaggatgaagaaattccagatagttctaagattagtctgagctgtaaaaaaacaggttctaagaagaaatcctcacaatctgaaggcatctttcttggttcagaatctgatgaagattctgtacggacttcttcaagtcaaagatcacatgatttaaaattttcagcaagcattgaaaaggaaagagattttaaaaagagctcagcacctttaaaaagtgaggatctagggaaaccttcacgatctaaaacagacagagatgataaatattttagctattcaaaacttgaaagagatactcggtatgtatcttcccgatgtagatcagaaagagagcgacggcggagcagatctcactctaggtctgagagaggctctagaactaatttatcctattccaggtcagaacgatctcattattatgactctgatcgtcgctaccataggagctccccttatcgagagaggacgcgctattctcggccatacacagataacagagcacgagagagttctgactcagaagaagagtataagaagacatactcaaggcgtacctcatctcattcctcttcttacagagacctaaggacatcatcctattctaaatctgatcgggactgtaaaactgagacctcttacttagagatggaaagaagaggcaagtattcttcaaaactagaaagagaatctaaaaggacttcagaaaatgaagcaattaaaagatgttgttctccccctaatgaactgggattccgacgagggtcatcatattctaagcatgacagtagtgcttcccgttataaatctaccctttcaaaacctatacccaagtctgataaatttaaaaattctttctgttgtacagaattaaatgaagaaatcaaacagtctcattcttttagtttacagacaccttgttcaaaaggtagtgaattaagaatgattaataaaaatcctgaaagagaaaaggctgggtctccagctccatcaaatcgattaaatgattcacctactttaaaaaagctagatgaattgcctatttttaagtccgaatttataacacatgatagccatgatagtattaaggaattagactctttatctaaagtgaagaatgatcaattaagaagtttttgtcccatagaattaaatataaatggatctcctggggcagaatctgatttggcaacattttgcacttctaaaactgatgctgttttaatgacttctgatgatagtgtgactggatcggaattatcccctttggtcaaagcatgcatgctttcatcaaatggatttcagaatattagtaggtgcaaagaaaaagacttggatgatacctgcatgctgcataagaagtcagaaagcccatttagagaaacagaacctctggtgtcaccacaccaagataaactcatgtctatgccagttatgactgtggattattccaaaacagtagttaaagaaccagttgatacgagggtttcttgctgcaaaaccaaagattcagacatatactgtactttgaacgatagcaacccttctttgtgtaactctgaagctgaaaatattgagccttcagttatgaagatttcttcaaatagctttatgaatgtgcatttggaatcaaaaccagttatatgtgatagtagaaatttgacagatcactcaaaatttgcatgtgaagaatataagcagagcatcggtagcactagttcagcttctgttaatcattttgatgatttatatcaacctattgggagttcaggtattgcttcatctcttcagagtcttccaccaggaataaaggtggacagtctaactctcttgaaatgcggagagaacacatctccagttctggatgcagtgctaaagagtaaaaaaagttcagagtttttaaagcatgcagggaaagaaacaatagtagaagtaggtagtgaccttcctgattcaggaaagggatttgcttccagggagaacaggcgtaataatgggttatctgggaaatgtttgcaagaggctcaagaagaagggaattccatattgcctgaaagaagaggaagaccagaaatctctttagatgaaagaggagaaggaggacatgtgcatacttctgatgactcagaagttgtattttcttcttgtgatttgaatttaaccatggaagacagtgatggtgtaacttatgcattaaagtgtgacagtagtggtcatgccccagaaattgtgtctacagttcatgaagattattctggctcttctgaaagttcaaatgatgaaagtgattcagaagatacagattcggatgatagcagtattccaagaaaccgtctccagtctgttgtggttgtgccaaagaattctactttgcccatggaagaaacaagtccttgttcttctcggagcagtcaaagttatagacactattctgaccattgggaagatgagagattggagtcaaggagacatttgtatgaggaaaaatttgaaagtatagcaagtaaagcctgtcctcaaactgataagtttttccttcataaaggaacagagaagaatccggaaatttcttttacacagtccagtagaaaacaaatagataatcgcctgcctgaactttctcatcctcagagtgatggggttgatagtacaagtcatacagatgtgaaatctgaccctctgggtcacccaaattcagaggaaaccgtgaaagccaaaataccttctaggcagcaagaagagctgccaatttattcttctgattttgaagatgtcccaaataagtcttggcaacagaccactttccaaaacaggccagatagtagactgggaaaaacagaattgagtttttcttcctcttgtgagataccacatgtggatggcttgcactcatcagaagagctcagaaacttaggttgggacttctctcaagaaaagccttctaccacgtatcagcaacctgacagtagctatggagcttgtggtggacacaagtatcagcaaaatgcagaacagtatggtgggacacgtgattactggcaaggcaatggttactgggatccaagatcaggtagacctcctggaactggggttgtgtatgatcgaactcaaggacaagtaccagattccctaacagatgatcgtgaagaagaggagaattgggatcaacaggatggatcccatttttcagaccagtccgataaatttcttctatcccttcagaaagacaaggggtcagtgcaagcacctgaaataagcagcaattccattaaggacactttagctgtgaatgaaaagaaagatttttcaaaaaacttagaaaaaaatgatatcaaagatagagggcctcttaaaaaaaggaggcaggaaatagagagtgattctgaaagtgatggtgagcttcaggacagaaagaaagttagagtggaggtagagcagggagagacatcagtgcccccaggttcagcactggttgggccctcctgtgtcatggatgacttcagggacccacagcgatggaaggaatgtgccaagcaagggaaaatgccatgttactttgatcttattgaagaaaatgtttatttaacagaaagaaagaagaataaatctcatcgagatattaagcgaatgcagtgtgagtgtacacctctttctaaagatgaaagagctcaaggtgaaatagcatgtggggaagattgtcttaatcgtcttctcatgattgaatgttcttctcggtgtccaaatggggattattgttccaatagacggtttcagagaaaacagcatgcagatgtggaagtcatactcacagaaaagaaaggctggggcttgagagctgccaaagaccttccttcgaacacctttgtcctagaatattgtggagaggtactcgatcataaagagtttaaagctcgagtgaaggagtatgcacgaaacaaaaacatccattactatttcatggccctgaagaatgatgagataatagatgccactcaaaaaggaaattgctctcgtttcatgaatcacagctgtgaaccaaattgtgaaacccaaaaatggactgtgaacggacaactgagggttgggttttttaccaccaaactggttccttcaggctcagagttaacgtttgactatcagttccagagatatggaaaagaagcccagaaatgtttctgcggatcagccaattgccggggttacctgggaggagaaaacagagtcagcatcagagcagcaggagggaaaatgaagaaggaacgatctcgtaagaaggattcagtggatggagagctagaagctctgatggaaaatggtgagggtctctctgataaaaaccaggtgctcagcttatcccggctaatggttagaattgaaactttggagcagaaacttacctgtctggaactcatacagaacacacactcacagtcctgcctgaagtcctttctggaacgtcatgggctgtctttgttgtggatctggatggcagagctaggtgacggccgggaaagtaaccagaagcttcaggaagagattataaagactttggaacacttgcccattcctactaaaaatatgttggaggaaagcaaagtacttccaattattcaacgctggtctcagactaagactgctgtccctccgttgagtgaaggagatgggtattctagtgagaatacatcgcgtgctcatacaccactcaacacacctgatccttccaccaagctgagcacagaagctgacacagacactcccaagaaactaatgtttcgcagactgaaaattataagtgaaaatagcatggacagtgcaatctctgatgcaaccagtgagctagaaggcaaggatggcaaagaggatcttgatcaattagaaaatgtccctgtagaggaagaggaagaattgcagtcacaacagctactcccacaacagctgcctgaatgcaaagttgatagtgaaaccaacatagaagctagtaagctacctacatctgaaccagaagctgacgctgaaatagagcccaaagagagcaacggcacaaaactagaagaacctattaatgaagaaacaccatcccaagatgaagaggagggtgtgtctgatgtggagagtgaaaggagccaagaacagccagataaaacagtggatataagtgatttggccaccaaactcctggacagttggaaagacctaaaggaggtatatcgaattccaaagaaaagtcaaactgaaaaggaaaacacaagaaatcagcctgaataaatggaatgacttgtctgcctcacatattctaaggtgcagagtcagaatatgaactgttgcaactgaacgaggaagggatgctgttggcttcagagatcaaacacctgccccgaagactcctaataggtcaagagagagagacccagacaagcaaactcaaaataaagagaaaaggaaacgaagaagctccctctcaccaccctcttctgcctatgagcggggaacaaaaaggccagatgacagatatgatacaccaacttctaaaaagaaagtacgaattaaagaccgcaataaactttctacagaggaacgccggaagttgtttgagcaagaggtggctcaacgggaggctcagaaacaacagcaacagatgcagaacctgggaatgacatcaccactgccctatgactctcttggttataatgccccgcatcatccctttgctggttacccaccaggttatcccatgcaggcctatgtggatcccagcaaccctaatgctggaaaggtgctcctgcccacacccagcatggacccagtgtgttctcctgctccttatgatcatgctcagcccttggtgggacattctacagaacccctttctgcccctccaccagtaccagtggtgccacatgtggcagctcctgtggaagtttccagttcccagtatgtggcccagagtgatggtgtagtacaccaagactccagcgttgctgtcttgccagtgccggcccccggcccagttcagggacagaattatagtgtttgggattcaaaccaacagtctgtcagtgtacagcagcagtactctcctgcacagtctcaagcaaccatatattatcaaggacagacatgtccaacagtctatggtgtgacatcaccttattcacagacaactccaccaattgtacagagttatgcccagccaagtcttcagtatatccaggggcaacagattttcacagctcatccacaaggagtggtggtacagccagccgcagcagtgactacaatagttgcaccagggcagcctcagcccttgcagccatctgaaatggttgtgacaaataatctcttggatctgccgcccccctctcctcccaaaccaaaaaccattgtcttacctcccaactggaagacagctcgagatccagaagggaagatttattactaccatgtgatcacaaggcagactcagtgggatcctcctacttgggaaagcccaggagatgatgccagccttgagcatgaagctgagatggacctgggaactccaacatatgatgaaaaccccatgaaggcctcgaaaaagcccaagacagcagaagcagacacctccagtgaactagcaaagaaaagcaaagaagtattcagaaaagagatgtcccagttcatcgtccagtgcctgaacccttaccggaaacctgactgcaaagtgggaagaattaccacaactgaagactttaaacatctggctcgcaagctgactcacggtgttatgaataaggagctgaagtactgtaagaatcctgaggacctggagtgcaatgagaatgtgaaacacaaaaccaaggagtacattaagaagtacatgcagaagtttggggctgtttacaaacccaaagaggacactgaattagagtgactgttgggccagggtgggaggatgggtggtcaggtaagacagactctagggagaggaaatcctgtgggcctttctgtcccacccctgtcagcactgtgctactgatgatacatcaccctggggaattcaaccctgcagatgtcaactgaaggccacaaaaatgaactccatctacaagtgattacctagttgtgagctgttggcatgtggttagaagccatcagaggtgcaagggcttagaaaagaccctggccagacctgactccactcttaaacctgggtcttctccttggcggtgctgtcagcgcacagacccatgcgcatccccacccacaaccctttaccctgatgatctgtattatattttaatgtatatgtgaatatattgaaaataatttgttttttcctggtttttgtttggttttcgttttgcttttagcctctacatgctaggatcacaggaagactttgtaaggacagtttaagttctcctgcaaggtttaatttgttatcatgtaaatattctaaagcaggctgccttgtggttttggccagccttgtgctatgttgataagattgatttactgcttaaaatcactttactttatccaatttttactgaactttttatgtaaaaaaataaaatcaattaaagaacttggcatgtgtgttccctaaaagtt

SEQ ID NO: 9310 - protein, 1819 aa, Homo sapiens
MAAPVPLPVDVAVRSLKEPPIIIVPESLEADTKQDTISNSLEEHVTQILNEQADISSKKEDSHIGKDEEIPDSSKISLSCKKTGSKKKSSQSEGIFLGSESDEDSVRTSSSQRSHDLKFSASIEKERDFKKSSAPLKSEDLGKPSRSKTDRDDKYFSYSKLERDTRYVSSRCRSERERRRSRSHSRSERGSRTNLSYSRSERSHYYDSDRRYHRSSPYRERTRYSRPYTDNRARESSDSEEEYKKTYSRRTSSHSSSYRDLRTSSYSKSDRDCKTETSYLEMERRGKYSSKLERESKRTSENEAIKRCCSPPNELGFRRGSSYSKHDSSASRYKSTLSKPIPKSDKFKNSFCCTELNEEIKQSHSFSLQTPCSKGSELRMINKNPEREKAGSPAPSNRLNDSPTLKKLDELPIFKSEFITHDSHDSIKELDSLSKVKNDQLRSFCPIELNINGSPGAESDLATFCTSKTDAVLMTSDDSVTGSELSPLVKACMLSSNGFQNISRCKEKDLDDTCMLHKKSESPFRETEPLVSPHQDKLMSMPVMTVDYSKTVVKEPVDTRVSCCKTKDSDIYCTLNDSNPSLCNSEAENIEPSVMKISSNSFMNVHLESKPVICDSRNLTDHSKFACEEYKQSIGSTSSASVNHFDDLYQPIGSSGIASSLQSLPPGIKVDSLTLLKCGENTSPVLDAVLKSKKSSEFLKHAGKETIVEVGSDLPDSGKGFASRENRRNNGLSGKCLQEAQEEGNSILPERRGRPEISLDERGEGGHVHTSDDSEVVFSSCDLNLTMEDSDGVTYALKCDSSGHAPEIVSTVHEDYSGSSESSNDESDSEDTDSDDSSIPRNRLQSVVVVPKNSTLPMEETSPCSSRSSQSYRHYSDHWEDERLESRRHLYEEKFESIASKACPQTDKFFLHKGTEKNPEISFTQSSRKQIDNRLPELSHPQSDGVDSTSHTDVKSDPLGHPNSEETVKAKIPSRQQEELPIYSSDFEDVPNKSWQQTTFQNRPDSRLGKTELSFSSSCEIPHVDGLHSSEELRNLGWDFSQEKPSTTYQQPDSSYGACGGHKYQQNAEQYGGTRDYWQGNGYWDPRSGRPPGTGVVYDRTQGQVPDSLTDDREEEENWDQQDGSHFSDQSDKFLLSLQKDKGSVQAPEISSNSIKDTLAVNEKKDFSKNLEKNDIKDRGPLKKRRQEIESDSESDGELQDRKKVRVEVEQGETSVPPGSALVGPSCVMDDFRDPQRWKECAKQGKMPCYFDLIEENVYLTERKKNKSHRDIKRMQCECTPLSKDERAQGEIACGEDCLNRLLMIECSSRCPNGDYCSNRRFQRKQHADVEVILTEKKGWGLRAAKDLPSNTFVLEYCGEVLDHKEFKARVKEYARNKNIHYYFMALKNDEIIDATQKGNCSRFMNHSCEPNCETQKWTVNGQLRVGFFTTKLVPSGSELTFDYQFQRYGKEAQKCFCGSANCRGYLGGENRVSIRAAGGKMKKERSRKKDSVDGELEALMENGEGLSDKNQVLSLSRLMVRIETLEQKLTCLELIQNTHSQSCLKSFLERHGLSLLWIWMAELGDGRESNQKLQEEIIKTLEHLPIPTKNMLEESKVLPIIQRWSQTKTAVPPLSEGDGYSSENTSRAHTPLNTPDPSTKLSTEADTDTPKKLMFRRLKIISENSMDSAISDATSELEGKDGKEDLDQLENVPVEEEEELQSQQLLPQQLPECKVDSETNIEASKLPTSEPEADAEIEPKESNGTKLEEPINEETPSQDEEEGVSDVESERSQEQPDKTVDISDLATKLLDSWKDLKEVYRIPKKSQTEKENTRNQPE

SEQ ID NO: 9311 - DNA, 7780 bp, Homo sapiens
caacactctcatcaccagcaccagtaacagagccagtggccttgccacatacaccaataacagttctaatggcagcaccagtacccttaccagtagatgtagcagttagatctctgaaagaaccaccaattataattgtaccagaatctttagaagcagatactaagcaggacactatatctaatagtttagaagaacacgtaactcaaatattgaatgagcaagcagatatttcctcaaaaaaagaagattcccatattgggaaggatgaagaaattccagatagttctaagattagtctgagctgtaaaaaaacaggttctaagaagaaatcctcacaatctgaaggcatctttcttggttcagaatctgatgaagattctgtacggacttcttcaagtcaaagatcacatgatttaaaattttcagcaagcattgaaaaggaaagagattttaaaaagagctcagcacctttaaaaagtgaggatctagggaaaccttcacgatctaaaacagacagagatgataaatattttagctattcaaaacttgaaagagatactcggtatgtatcttcccgatgtagatcagaaagagagcgacggcggagcagatctcactctaggtctgagagaggctctagaactaatttatcctattccaggtcagaacgatctcattattatgactctgatcgtcgctaccataggagctccccttatcgagagaggacgcgctattctcggccatacacagataacagagcacgagagagttctgactcagaagaagagtataagaagacatactcaaggcgtacctcatctcattcctcttcttacagagacctaaggacatcatcctattctaaatctgatcgggactgtaaaactgagacctcttacttagagatggaaagaagaggcaagtattcttcaaaactagaaagagaatctaaaaggacttcagaaaatgaagcaattaaaagatgttgttctccccctaatgaactgggattccgacgagggtcatcatattctaagcatgacagtagtgcttcccgttataaatctaccctttcaaaacctatacccaagtctgataaatttaaaaattctttctgttgtacagaattaaatgaagaaatcaaacagtctcattcttttagtttacagacaccttgttcaaaaggtagtgaattaagaatgattaataaaaatcctgaaagagaaaaggctgggtctccagctccatcaaatcgattaaatgattcacctactttaaaaaagctagatgaattgcctatttttaagtccgaatttataacacatgatagccatgatagtattaaggaattagactctttatctaaagtgaagaatgatcaattaagaagtttttgtcccatagaattaaatataaatggatctcctggggcagaatctgatttggcaacattttgcacttctaaaactgatgctgttttaatgacttctgatgatagtgtgactggatcggaattatcccctttggtcaaagcatgcatgctttcatcaaatggatttcagaatattagtaggtgcaaagaaaaagacttggatgatacctgcatgctgcataagaagtcagaaagcccatttagagaaacagaacctctggtgtcaccacaccaagataaactcatgtctatgccagttatgactgtggattattccaaaacagtagttaaagaaccagttgatacgagggtttcttgctgcaaaaccaaagattcagacatatactgtactttgaacgatagcaacccttctttgtgtaactctgaagctgaaaatattgagccttcagttatgaagatttcttcaaatagctttatgaatgtgcatttggaatcaaaaccagttatatgtgatagtagaaatttgacagatcactcaaaatttgcatgtgaagaatataagcagagcatcggtagcactagttcagcttctgttaatcattttgatgatttatatcaacctattgggagttcaggtattgcttcatctcttcagagtcttccaccaggaataaaggtggacagtctaactctcttgaaatgcggagagaacacatctccagttctggatgcagtgctaaagagtaaaaaaagttcagagtttttaaagcatgcagggaaagaaacaatagtagaagtaggtagtgaccttcctgattcaggaaagggatttgcttccagggagaacaggcgtaataatgggttatctgggaaatgtttgcaagaggctcaagaagaagggaattccatattgcctgaaagaagaggaagaccagaaatctctttagatgaaagaggagaaggaggacatgtgcatacttctgatgactcagaagttgtattttcttcttgtgatttgaatttaaccatggaagacagtgatggtgtaacttatgcattaaagtgtgacagtagtggtcatgccccagaaattgtgtctacagttcatgaagattattctggctcttctgaaagttcaaatgatgaaagtgattcagaagatacagattcggatgatagcagtattccaagaaaccgtctccagtctgttgtggttgtgccaaagaattctactttgcccatggaagaaacaagtccttgttcttctcggagcagtcaaagttatagacactattctgaccattgggaagatgagagattggagtcaaggagacatttgtatgaggaaaaatttgaaagtatagcaagtaaagcctgtcctcaaactgataagtttttccttcataaaggaacagagaagaatccggaaatttcttttacacagtccagtagaaaacaaatagataatcgcctgcctgaactttctcatcctcagagtgatggggttgatagtacaagtcatacagatgtgaaatctgaccctctgggtcacccaaattcagaggaaaccgtgaaagccaaaataccttctaggcagcaagaagagctgccaatttattcttctgattttgaagatgtcccaaataagtcttggcaacagaccactttccaaaacaggccagatagtagactgggaaaaacagaattgagtttttcttcctcttgtgagataccacatgtggatggcttgcactcatcagaagagctcagaaacttaggttgggacttctctcaagaaaagccttctaccacgtatcagcaacctgacagtagctatggagcttgtggtggacacaagtatcagcaaaatgcagaacagtatggtgggacacgtgattactggcaaggcaatggttactgggatccaagatcaggtagacctcctggaactggggttgtgtatgatcgaactcaaggacaagtaccagattccctaacagatgatcgtgaagaagaggagaattgggatcaacaggatggatcccatttttcagaccagtccgataaatttcttctatcccttcagaaagacaaggggtcagtgcaagcacctgaaataagcagcaattccattaaggacactttagctgtgaatgaaaagaaagatttttcaaaaaacttagaaaaaaatgatatcaaagatagagggcctcttaaaaaaaggaggcaggaaatagagagtgattctgaaagtgatggtgagcttcaggacagaaagaaagttagagtggaggtagagcagggagagacatcagtgcccccaggttcagcactggttgggccctcctgtgtcatggatgacttcagggacccacagcgatggaaggaatgtgccaagcaagggaaaatgccatgttactttgatcttattgaagaaaatgtttatttaacagaaagaaagaagaataaatctcatcgagatattaagcgaatgcagtgtgagtgtacacctctttctaaagatgaaagagctcaaggtgaaatagcatgtggggaagattgtcttaatcgtcttctcatgattgaatgttcttctcggtgtccaaatggggattattgttccaatagacggtttcagagaaaacagcatgcagatgtggaagtcatactcacagaaaagaaaggctggggcttgagagctgccaaagaccttccttcgaacacctttgtcctagaatattgtggagaggtactcgatcataaagagtttaaagctcgagtgaaggagtatgcacgaaacaaaaacatccattactatttcatggccctgaagaatgatgagataatagatgccactcaaaaaggaaattgctctcgtttcatgaatcacagctgtgaaccaaattgtgaaacccaaaaatggactgtgaacggacaactgagggttgggttttttaccaccaaactggttccttcaggctcagagttaacgtttgactatcagttccagagatatggaaaagaagcccagaaatgtttctgcggatcagccaattgccggggttacctgggaggagaaaacagagtcagcatcagagcagcaggagggaaaatgaagaaggaacgatctcgtaagaaggattcagtggatggagagctagaagctctgatggaaaatggtgagggtctctctgataaaaaccaggtgctcagcttatcccggctaatggttagaattgaaactttggagcagaaacttacctgtctggaactcatacagaacacacactcacagtcctgcctgaagtcctttctggaacgtcatgggctgtctttgttgtggatctggatggcagagctaggtgacggccgggaaagtaaccagaagcttcaggaagagattataaagactttggaacacttgcccattcctactaaaaatatgttggaggaaagcaaagtacttccaattattcaacgctggtctcagactaagactgctgtccctccgttgagtgaaggagatgggtattctagtgagaatacatcgcgtgctcatacaccactcaacacacctgatccttccaccaagctgagcacagaagctgacacagacactcccaagaaactaatgtttcgcagactgaaaattataagtgaaaatagcatggacagtgcaatctctgatgcaaccagtgagctagaaggcaaggatggcaaagaggatcttgatcaattagaaaatgtccctgtagaggaagaggaagaattgcagtcacaacagctactcccacaacagctgcctgaatgcaaagttgatagtgaaaccaacatagaagctagtaagctacctacatctgaaccagaagctgacgctgaaatagagcccaaagagagcaacggcacaaaactagaagaacctattaatgaagaaacaccatcccaagatgaagaggagggtgtgtctgatgtggagagtgaaaggagccaagaacagccagataaaacagtggatataagtgatttggccaccaaactcctggacagttggaaagacctaaaggaggtatatcgaattccaaagaaaagtcaaactgaaaaggaaaacacaacaactgaacgaggaagggatgctgttggcttcagagatcaaacacctgccccgaagactcctaataggtcaagagagagagacccagacaagcaaactcaaaataaagagaaaaggaaacgaagaagctccctctcaccaccctcttctgcctatgagcggggaacaaaaaggccagatgacagatatgatacaccaacttctaaaaagaaagtacgaattaaagaccgcaataaactttctacagaggaacgccggaagttgtttgagcaagaggtggctcaacgggaggctcagaaacaacagcaacagatgcagaacctgggaatgacatcaccactgccctatgactctcttggttataatgccccgcatcatccctttgctggttacccaccaggttatcccatgcaggcctatgtggatcccagcaaccctaatgctggaaaggtgctcctgcccacacccagcatggacccagtgtgttctcctgctccttatgatcatgctcagcccttggtgggacattctacagaacccctttctgcccctccaccagtaccagtggtgccacatgtggcagctcctgtggaagtttccagttcccagtatgtggcccagagtgatggtgtagtacaccaagactccagcgttgctgtcttgccagtgccggcccccggcccagttcagggacagaattatagtgtttgggattcaaaccaacagtctgtcagtgtacagcagcagtactctcctgcacagtctcaagcaaccatatattatcaaggacagacatgtccaacagtctatggtgtgacatcaccttattcacagacaactccaccaattgtacagagttatgcccagccaagtcttcagtatatccaggggcaacagattttcacagctcatccacaaggagtggtggtacagccagccgcagcagtgactacaatagttgcaccagggcagcctcagcccttgcagccatctgaaatggttgtgacaaataatctcttggatctgccgcccccctctcctcccaaaccaaaaaccattgtcttacctcccaactggaagacagctcgagatccagaagggaagatttattactaccatgtgatcacaaggcagactcagtgggatcctcctacttgggaaagcccaggagatgatgccagccttgagcatgaagctgagatggacctgggaactccaacatatgatgaaaaccccatgaaggcctcgaaaaagcccaagacagcagaagcagacacctccagtgaactagcaaagaaaagcaaagaagtattcagaaaagagatgtcccagttcatcgtccagtgcctgaacccttaccggaaacctgactgcaaagtgggaagaattaccacaactgaagactttaaacatctggctcgcaagctgactcacggtgttatgaataaggagctgaagtactgtaagaatcctgaggacctggagtgcaatgagaatgtgaaacacaaaaccaaggagtacattaagaagtacatgcagaagtttggggctgtttacaaacccaaagaggacactgaattagagtgactgttgggccagggtgggaggatgggtggtcaggtaagacagactctagggagaggaaatcctgtgggcctttctgtcccacccctgtcagcactgtgctactgatgatacatcaccctggggaattcaaccctgcagatgtcaactgaaggccacaaaaatgaactccatctacaagtgattacctagttgtgagctgttggcatgtggttagaagccatcagaggtgcaagggcttagaaaagaccctggccagacctgactccactcttaaacctgggtcttctccttggcggtgctgtcagcgcacagacccatgcgcatccccacccacaaccctttaccctgatgatctgtattatattttaatgtatatgtgaatatattgaaaataatttgttttttcctggtttttgtttggttttcgttttgcttttagcctctacatgctaggatcacaggaagactttgtaaggacagtttaagttctcctgcaaggtttaatttgttatcatgtaaatattctaaagcaggctgccttgtggttttggccagccttgtgctatgttgataagattgatttactgcttaaaatcactttactttatccaatttttactgaactttttatgtaaaaaaataaaatcaattaaagaacttggcatgtgtgttccctaaaagtt

SEQ ID NO: 9312 - protein, 2342 aa, Homo sapiens
MAAPVPLPVDVAVRSLKEPPIIIVPESLEADTKQDTISNSLEEHVTQILNEQADISSKKEDSHIGKDEEIPDSSKISLSCKKTGSKKKSSQSEGIFLGSESDEDSVRTSSSQRSHDLKFSASIEKERDFKKSSAPLKSEDLGKPSRSKTDRDDKYFSYSKLERDTRYVSSRCRSERERRRSRSHSRSERGSRTNLSYSRSERSHYYDSDRRYHRSSPYRERTRYSRPYTDNRARESSDSEEEYKKTYSRRTSSHSSSYRDLRTSSYSKSDRDCKTETSYLEMERRGKYSSKLERESKRTSENEAIKRCCSPPNELGFRRGSSYSKHDSSASRYKSTLSKPIPKSDKFKNSFCCTELNEEIKQSHSFSLQTPCSKGSELRMINKNPEREKAGSPAPSNRLNDSPTLKKLDELPIFKSEFITHDSHDSIKELDSLSKVKNDQLRSFCPIELNINGSPGAESDLATFCTSKTDAVLMTSDDSVTGSELSPLVKACMLSSNGFQNISRCKEKDLDDTCMLHKKSESPFRETEPLVSPHQDKLMSMPVMTVDYSKTVVKEPVDTRVSCCKTKDSDIYCTLNDSNPSLCNSEAENIEPSVMKISSNSFMNVHLESKPVICDSRNLTDHSKFACEEYKQSIGSTSSASVNHFDDLYQPIGSSGIASSLQSLPPGIKVDSLTLLKCGENTSPVLDAVLKSKKSSEFLKHAGKETIVEVGSDLPDSGKGFASRENRRNNGLSGKCLQEAQEEGNSILPERRGRPEISLDERGEGGHVHTSDDSEVVFSSCDLNLTMEDSDGVTYALKCDSSGHAPEIVSTVHEDYSGSSESSNDESDSEDTDSDDSSIPRNRLQSVVVVPKNSTLPMEETSPCSSRSSQSYRHYSDHWEDERLESRRHLYEEKFESIASKACPQTDKFFLHKGTEKNPEISFTQSSRKQIDNRLPELSHPQSDGVDSTSHTDVKSDPLGHPNSEETVKAKIPSRQQEELPIYSSDFEDVPNKSWQQTTFQNRPDSRLGKTELSFSSSCEIPHVDGLHSSEELRNLGWDFSQEKPSTTYQQPDSSYGACGGHKYQQNAEQYGGTRDYWQGNGYWDPRSGRPPGTGVVYDRTQGQVPDSLTDDREEEENWDQQDGSHFSDQSDKFLLSLQKDKGSVQAPEISSNSIKDTLAVNEKKDFSKNLEKNDIKDRGPLKKRRQEIESDSESDGELQDRKKVRVEVEQGETSVPPGSALVGPSCVMDDFRDPQRWKECAKQGKMPCYFDLIEENVYLTERKKNKSHRDIKRMQCECTPLSKDERAQGEIACGEDCLNRLLMIECSSRCPNGDYCSNRRFQRKQHADVEVILTEKKGWGLRAAKDLPSNTFVLEYCGEVLDHKEFKARVKEYARNKNIHYYFMALKNDEIIDATQKGNCSRFMNHSCEPNCETQKWTVNGQLRVGFFTTKLVPSGSELTFDYQFQRYGKEAQKCFCGSANCRGYLGGENRVSIRAAGGKMKKERSRKKDSVDGELEALMENGEGLSDKNQVLSLSRLMVRIETLEQKLTCLELIQNTHSQSCLKSFLERHGLSLLWIWMAELGDGRESNQKLQEEIIKTLEHLPIPTKNMLEESKVLPIIQRWSQTKTAVPPLSEGDGYSSENTSRAHTPLNTPDPSTKLSTEADTDTPKKLMFRRLKIISENSMDSAISDATSELEGKDGKEDLDQLENVPVEEEEELQSQQLLPQQLPECKVDSETNIEASKLPTSEPEADAEIEPKESNGTKLEEPINEETPSQDEEEGVSDVESERSQEQPDKTVDISDLATKLLDSWKDLKEVYRIPKKSQTEKENTTTERGRDAVGFRDQTPAPKTPNRSRERDPDKQTQNKEKRKRRSSLSPPSSAYERGTKRPDDRYDTPTSKKKVRIKDRNKLSTEERRKLFEQEVAQREAQKQQQQMQNLGMTSPLPYDSLGYNAPHHPFAGYPPGYPMQAYVDPSNPNAGKVLLPTPSMDPVCSPAPYDHAQPLVGHSTEPLSAPPPVPVVPHVAAPVEVSSSQYVAQSDGVVHQDSSVAVLPVPAPGPVQGQNYSVWDSNQQSVSVQQQYSPAQSQATIYYQGQTCPTVYGVTSPYSQTTPPIVQSYAQPSLQYIQGQQIFTAHPQGVVVQPAAAVTTIVAPGQPQPLQPSEMVVTNNLLDLPPPSPPKPKTIVLPPNWKTARDPEGKIYYYHVITRQTQWDPPTWESPGDDASLEHEAEMDLGTPTYDENPMKASKKPKTAEADTSSELAKKSKEVFRKEMSQFIVQCLNPYRKPDCKVGRITTTEDFKHLARKLTHGVMNKELKYCKNPEDLECNENVKHKTKEYIKKYMQKFGAVYKPKEDTELE

SEQ ID NO: 9313 - DNA, 7824 bp, Homo sapiens
caacactctcatcaccagcaccagtaacagagccagtggccttgccacatacaccaataacagttctaatggcagcaccagtacccttaccagtagatgtagcagttagatctctgaaagaaccaccaattataattgtaccagaatctttagaagcagatactaagcaggacactatatctaatagtttagaagaacacgtaactcaaatattgaatgagcaagcagatatttcctcaaaaaaagaagattcccatattgggaaggatgaagaaattccagatagttctaagattagtctgagctgtaaaaaaacaggttctaagaagaaatcctcacaatctgaaggcatctttcttggttcagaatctgatgaagattctgtacggacttcttcaagtcaaagatcacatgatttaaaattttcagcaagcattgaaaaggaaagagattttaaaaagagctcagcacctttaaaaagtgaggatctagggaaaccttcacgatctaaaacagacagagatgataaatattttagctattcaaaacttgaaagagatactcggtatgtatcttcccgatgtagatcagaaagagagcgacggcggagcagatctcactctaggtctgagagaggctctagaactaatttatcctattccaggtcagaacgatctcattattatgactctgatcgtcgctaccataggagctccccttatcgagagaggacgcgctattctcggccatacacagataacagagcacgagagagttctgactcagaagaagagtataagaagacatactcaaggcgtacctcatctcattcctcttcttacagagacctaaggacatcatcctattctaaatctgatcgggactgtaaaactgagacctcttacttagagatggaaagaagaggcaagtattcttcaaaactagaaagagaatctaaaaggacttcagaaaatgaagcaattaaaagatgttgttctccccctaatgaactgggattccgacgagggtcatcatattctaagcatgacagtagtgcttcccgttataaatctaccctttcaaaacctatacccaagtctgataaatttaaaaattctttctgttgtacagaattaaatgaagaaatcaaacagtctcattcttttagtttacagacaccttgttcaaaaggtagtgaattaagaatgattaataaaaatcctgaaagagaaaaggctgggtctccagctccatcaaatcgattaaatgattcacctactttaaaaaagctagatgaattgcctatttttaagtccgaatttataacacatgatagccatgatagtattaaggaattagactctttatctaaagtgaagaatgatcaattaagaagtttttgtcccatagaattaaatataaatggatctcctggggcagaatctgatttggcaacattttgcacttctaaaactgatgctgttttaatgacttctgatgatagtgtgactggatcggaattatcccctttggtcaaagcatgcatgctttcatcaaatggatttcagaatattagtaggtgcaaagaaaaagacttggatgatacctgcatgctgcataagaagtcagaaagcccatttagagaaacagaacctctggtgtcaccacaccaagataaactcatgtctatgccagttatgactgtggattattccaaaacagtagttaaagaaccagttgatacgagggtttcttgctgcaaaaccaaagattcagacatatactgtactttgaacgatagcaacccttctttgtgtaactctgaagctgaaaatattgagccttcagttatgaagatttcttcaaatagctttatgaatgtgcatttggaatcaaaaccagttatatgtgatagtagaaatttgacagatcactcaaaatttgcatgtgaagaatataagcagagcatcggtagcactagttcagcttctgttaatcattttgatgatttatatcaacctattgggagttcaggtattgcttcatctcttcagagtcttccaccaggaataaaggtggacagtctaactctcttgaaatgcggagagaacacatctccagttctggatgcagtgctaaagagtaaaaaaagttcagagtttttaaagcatgcagggaaagaaacaatagtagaagtaggtagtgaccttcctgattcaggaaagggatttgcttccagggagaacaggcgtaataatgggttatctgggaaatgtttgcaagaggctcaagaagaagggaattccatattgcctgaaagaagaggaagaccagaaatctctttagatgaaagaggagaaggaggacatgtgcatacttctgatgactcagaagttgtattttcttcttgtgatttgaatttaaccatggaagacagtgatggtgtaacttatgcattaaagtgtgacagtagtggtcatgccccagaaattgtgtctacagttcatgaagattattctggctcttctgaaagttcaaatgatgaaagtgattcagaagatacagattcggatgatagcagtattccaagaaaccgtctccagtctgttgtggttgtgccaaagaattctactttgcccatggaagaaacaagtccttgttcttctcggagcagtcaaagttatagacactattctgaccattgggaagatgagagattggagtcaaggagacatttgtatgaggaaaaatttgaaagtatagcaagtaaagcctgtcctcaaactgataagtttttccttcataaaggaacagagaagaatccggaaatttcttttacacagtccagtagaaaacaaatagataatcgcctgcctgaactttctcatcctcagagtgatggggttgatagtacaagtcatacagatgtgaaatctgaccctctgggtcacccaaattcagaggaaaccgtgaaagccaaaataccttctaggcagcaagaagagctgccaatttattcttctgattttgaagatgtcccaaataagtcttggcaacagaccactttccaaaacaggccagatagtagactgggaaaaacagaattgagtttttcttcctcttgtgagataccacatgtggatggcttgcactcatcagaagagctcagaaacttaggttgggacttctctcaagaaaagccttctaccacgtatcagcaacctgacagtagctatggagcttgtggtggacacaagtatcagcaaaatgcagaacagtatggtgggacacgtgattactggcaaggcaatggttactgggatccaagatcaggtagacctcctggaactggggttgtgtatgatcgaactcaaggacaagtaccagattccctaacagatgatcgtgaagaagaggagaattgggatcaacaggatggatcccatttttcagaccagtccgataaatttcttctatcccttcagaaagacaaggggtcagtgcaagcacctgaaataagcagcaattccattaaggacactttagctgtgaatgaaaagaaagatttttcaaaaaacttagaaaaaaatgatatcaaagatagagggcctcttaaaaaaaggaggcaggaaatagagagtgattctgaaagtgatggtgagcttcaggacagaaagaaagttagagtggaggtagagcagggagagacatcagtgcccccaggttcagcactggttgggccctcctgtgtcatggatgacttcagggacccacagcgatggaaggaatgtgccaagcaagggaaaatgccatgttactttgatcttattgaagaaaatgtttatttaacagaaagaaagaagaataaatctcatcgagatattaagcgaatgcagtgtgagtgtacacctctttctaaagatgaaagagctcaaggtgaaatagcatgtggggaagattgtcttaatcgtcttctcatgattgaatgttcttctcggtgtccaaatggggattattgttccaatagacggtttcagagaaaacagcatgcagatgtggaagtcatactcacagaaaagaaaggctggggcttgagagctgccaaagaccttccttcataatagatgccactcaaaaaggaaattgctctcgtttcatgaatcacagctgtgaaccaaattgtgaaacccaaaaatggactgtgaacggacaactgagggttgggttttttaccaccaaactggttccttcaggctcagagttaacgtttgactatcagttccagagatatggaaaagaagcccagaaatgtttctgcggatcagccaattgccggggttacctgggaggagaaaacagagtcagcatcagagcagcaggagggaaaatgaagaaggaacgatctcgtaagaaggattcagtggatggagagctagaagctctgatggaaaatggtgagggtctctctgataaaaaccaggtgctcagcttatcccggctaatggttagaattgaaactttggagcagaaacttacctgtctggaactcatacagaacacacactcacagtcctgcctgaagtcctttctggaacgtcatgggctgtctttgttgtggatctggatggcagagctaggtgacggccgggaaagtaaccagaagcttcaggaagagattataaagactttggaacacttgcccattcctactaaaaatatgttggaggaaagcaaagtacttccaattattcaacgctggtctcagactaagactgctgtccctccgttgagtgaaggagatgggtattctagtgagaatacatcgcgtgctcatacaccactcaacacacctgatccttccaccaagctgagcacagaagctgacacagacactcccaagaaactaatgtttcgcagactgaaaattataagtgaaaatagcatggacagtgcaatctctgatgcaaccagtgagctagaaggcaaggatggcaaagaggatcttgatcaattagaaaatgtccctgtagaggaagaggaagaattgcagtcacaacagctactcccacaacagctgcctgaatgcaaagttgatagtgaaaccaacatagaagctagtaagctacctacatctgaaccagaagctgacgctgaaatagagcccaaagagagcaacggcacaaaactagaagaacctattaatgaagaaacaccatcccaagatgaagaggagggtgtgtctgatgtggagagtgaaaggagccaagaacagccagataaaacagtggatataagtgatttggccaccaaactcctggacagttggaaagacctaaagcttctcagggcagcaaggagcttgttaacatcaccagctgaccatgtgtctccttttctcaactccatttccaacttcgtgctgaagaaaaacgagaacctagcgtgcattctgtgaagaaacaggaagatggttgggaagttggatgatgcatgaaaaatataataggaggtatatcgaattccaaagaaaagtcaaactgaaaaggaaaacacaacaactgaacgaggaagggatgctgttggcttcagagatcaaacacctgccccgaagactcctaataggtcaagagagagagacccagacaagcaaactcaaaataaagagaaaaggaaacgaagaagctccctctcaccaccctcttctgcctatgagcggggaacaaaaaggccagatgacagatatgatacaccaacttctaaaaagaaagtacgaattaaagaccgcaataaactttctacagaggaacgccggaagttgtttgagcaagaggtggctcaacgggaggctcagaaacaacagcaacagatgcagaacctgggaatgacatcaccactgccctatgactctcttggttataatgccccgcatcatccctttgctggttacccaccaggttatcccatgcaggcctatgtggatcccagcaaccctaatgctggaaaggtgctcctgcccacacccagcatggacccagtgtgttctcctgctccttatgatcatgctcagcccttggtgggacattctacagaacccctttctgcccctccaccagtaccagtggtgccacatgtggcagctcctgtggaagtttccagttcccagtatgtggcccagagtgatggtgtagtacaccaagactccagcgttgctgtcttgccagtgccggcccccggcccagttcagggacagaattatagtgtttgggattcaaaccaacagtctgtcagtgtacagcagcagtactctcctgcacagtctcaagcaaccatatattatcaaggacagacatgtccaacagtctatggtgtgacatcaccttattcacagacaactccaccaattgtacagagttatgcccagccaagtcttcagtatatccaggggcaacagattttcacagctcatccacaaggagtggtggtacagccagccgcagcagtgactacaatagttgcaccagggcagcctcagcccttgcagccatctgaaatggttgtgacaaataatctcttggatctgccgcccccctctcctcccaaaccaaaaaccattgtcttacctcccaactggaagacagctcgagatccagaagggaagatttattactaccatgtgatcacaaggcagactcagtgggatcctcctacttgggaaagcccaggagatgatgccagccttgagcatgaagctgagatggacctgggaactccaacatatgatgaaaaccccatgaaggcctcgaaaaagcccaagacagcagaagcagacacctccagtgaactagcaaagaaaagcaaagaagtattcagaaaagagatgtcccagttcatcgtccagtgcctgaacccttaccggaaacctgactgcaaagtgggaagaattaccacaactgaagactttaaacatctggctcgcaagctgactcacggtgttatgaataaggagctgaagtactgtaagaatcctgaggacctggagtgcaatgagaatgtgaaacacaaaaccaaggagtacattaagaagtacatgcagaagtttggggctgtttacaaacccaaagaggacactgaattagagtgactgttgggccagggtgggaggatgggtggtcaggtaagacagactctagggagaggaaatcctgtgggcctttctgtcccacccctgtcagcactgtgctactgatgatacatcaccctggggaattcaaccctgcagatgtcaactgaaggccacaaaaatgaactccatctacaagtgattacctagttgtgagctgttggcatgtggttagaagccatcagaggtgcaagggcttagaaaagaccctggccagacctgactccactcttaaacctgggtcttctccttggcggtgctgtcagcgcacagacccatgcgcatccccacccacaaccctttaccctgatgatctgtattatattttaatgtatatgtgaatatattgaaaataatttgttttttcctggtttttgtttggttttcgttttgcttttagcctctacatgctaggatcacaggaagactttgtaaggacagtttaagttctcctgcaaggtttaatttgttatcatgtaaatattctaaagcaggctgccttgtggttttggccagccttgtgctatgttgataagattgatttactgcttaaaatcactttactttatccaatttttactgaactttttatgtaaaaaaataaaatcaattaaagaacttggcatgtgtgttccctaaaagtt

SEQ ID NO: 9314 - protein, 1350 aa, Homo sapiens
MAAPVPLPVDVAVRSLKEPPIIIVPESLEADTKQDTISNSLEEHVTQILNEQADISSKKEDSHIGKDEEIPDSSKISLSCKKTGSKKKSSQSEGIFLGSESDEDSVRTSSSQRSHDLKFSASIEKERDFKKSSAPLKSEDLGKPSRSKTDRDDKYFSYSKLERDTRYVSSRCRSERERRRSRSHSRSERGSRTNLSYSRSERSHYYDSDRRYHRSSPYRERTRYSRPYTDNRARESSDSEEEYKKTYSRRTSSHSSSYRDLRTSSYSKSDRDCKTETSYLEMERRGKYSSKLERESKRTSENEAIKRCCSPPNELGFRRGSSYSKHDSSASRYKSTLSKPIPKSDKFKNSFCCTELNEEIKQSHSFSLQTPCSKGSELRMINKNPEREKAGSPAPSNRLNDSPTLKKLDELPIFKSEFITHDSHDSIKELDSLSKVKNDQLRSFCPIELNINGSPGAESDLATFCTSKTDAVLMTSDDSVTGSELSPLVKACMLSSNGFQNISRCKEKDLDDTCMLHKKSESPFRETEPLVSPHQDKLMSMPVMTVDYSKTVVKEPVDTRVSCCKTKDSDIYCTLNDSNPSLCNSEAENIEPSVMKISSNSFMNVHLESKPVICDSRNLTDHSKFACEEYKQSIGSTSSASVNHFDDLYQPIGSSGIASSLQSLPPGIKVDSLTLLKCGENTSPVLDAVLKSKKSSEFLKHAGKETIVEVGSDLPDSGKGFASRENRRNNGLSGKCLQEAQEEGNSILPERRGRPEISLDERGEGGHVHTSDDSEVVFSSCDLNLTMEDSDGVTYALKCDSSGHAPEIVSTVHEDYSGSSESSNDESDSEDTDSDDSSIPRNRLQSVVVVPKNSTLPMEETSPCSSRSSQSYRHYSDHWEDERLESRRHLYEEKFESIASKACPQTDKFFLHKGTEKNPEISFTQSSRKQIDNRLPELSHPQSDGVDSTSHTDVKSDPLGHPNSEETVKAKIPSRQQEELPIYSSDFEDVPNKSWQQTTFQNRPDSRLGKTELSFSSSCEIPHVDGLHSSEELRNLGWDFSQEKPSTTYQQPDSSYGACGGHKYQQNAEQYGGTRDYWQGNGYWDPRSGRPPGTGVVYDRTQGQVPDSLTDDREEEENWDQQDGSHFSDQSDKFLLSLQKDKGSVQAPEISSNSIKDTLAVNEKKDFSKNLEKNDIKDRGPLKKRRQEIESDSESDGELQDRKKVRVEVEQGETSVPPGSALVGPSCVMDDFRDPQRWKECAKQGKMPCYFDLIEENVYLTERKKNKSHRDIKRMQCECTPLSKDERAQGEIACGEDCLNRLLMIECSSRCPNGDYCSNRRFQRKQHADVEVILTEKKGWGLRAAKDLPS

SEQ ID NO: 9315 - DNA, 8192 bp, Homo sapiens
ctaaaatgaaaatggaaattggtgataccttatctactgcagaagaatcttccccaccaaagtcaagggtggaattgggcaaaattcattttaagaaacatctgcttcatgtaacatccaggccactgctggctactaccacagcagtagcatctccacctactcatgcagcaccattaccagcagtgatagcagaatcaacaactgtagactcaccgccctcatctccgcctccaccgcctccacctgcccaagccacaacactctcatcaccagcaccagtaacagagccagtggccttgccacatacaccaataacagttctaatggcagcaccagtacccttaccagtagatgtagcagttagatctctgaaagaaccaccaattataattgtaccagaatctttagaagcagatactaagcaggacactatatctaatagtttagaagaacacgtaactcaaatattgaatgagcaagcagatatttcctcaaaaaaagaagattcccatattgggaaggatgaagaaattccagatagttctaagattagtctgagctgtaaaaaaacaggttctaagaagaaatcctcacaatctgaaggcatctttcttggttcagaatctgatgaagattctgtacggacttcttcaagtcaaagatcacatgatttaaaattttcagcaagcattgaaaaggaaagagattttaaaaagagctcagcacctttaaaaagtgaggatctagggaaaccttcacgatctaaaacagacagagatgataaatattttagctattcaaaacttgaaagagatactcggtatgtatcttcccgatgtagatcagaaagagagcgacggcggagcagatctcactctaggtctgagagaggctctagaactaatttatcctattccaggtcagaacgatctcattattatgactctgatcgtcgctaccataggagctccccttatcgagagaggacgcgctattctcggccatacacagataacagagcacgagagagttctgactcagaagaagagtataagaagacatactcaaggcgtacctcatctcattcctcttcttacagagacctaaggacatcatcctattctaaatctgatcgggactgtaaaactgagacctcttacttagagatggaaagaagaggcaagtattcttcaaaactagaaagagaatctaaaaggacttcagaaaatgaagcaattaaaagatgttgttctccccctaatgaactgggattccgacgagggtcatcatattctaagcatgacagtagtgcttcccgttataaatctaccctttcaaaacctatacccaagtctgataaatttaaaaattctttctgttgtacagaattaaatgaagaaatcaaacagtctcattcttttagtttacagacaccttgttcaaaaggtagtgaattaagaatgattaataaaaatcctgaaagagaaaaggctgggtctccagctccatcaaatcgattaaatgattcacctactttaaaaaagctagatgaattgcctatttttaagtccgaatttataacacatgatagccatgatagtattaaggaattagactctttatctaaagtgaagaatgatcaattaagaagtttttgtcccatagaattaaatataaatggatctcctggggcagaatctgatttggcaacattttgcacttctaaaactgatgctgttttaatgacttctgatgatagtgtgactggatcggaattatcccctttggtcaaagcatgcatgctttcatcaaatggatttcagaatattagtaggtgcaaagaaaaagacttggatgatacctgcatgctgcataagaagtcagaaagcccatttagagaaacagaacctctggtgtcaccacaccaagataaactcatgtctatgccagttatgactgtggattattccaaaacagtagttaaagaaccagttgatacgagggtttcttgctgcaaaaccaaagattcagacatatactgtactttgaacgatagcaacccttctttgtgtaactctgaagctgaaaatattgagccttcagttatgaagatttcttcaaatagctttatgaatgtgcatttggaatcaaaaccagttatatgtgatagtagaaatttgacagatcactcaaaatttgcatgtgaagaatataagcagagcatcggtagcactagttcagcttctgttaatcattttgatgatttatatcaacctattgggagttcaggtattgcttcatctcttcagagtcttccaccaggaataaaggtggacagtctaactctcttgaaatgcggagagaacacatctccagttctggatgcagtgctaaagagtaaaaaaagttcagagtttttaaagcatgcagggaaagaaacaatagtagaagtaggtagtgaccttcctgattcaggaaagggatttgcttccagggagaacaggcgtaataatgggttatctgggaaatgtttgcaagaggctcaagaagaagggaattccatattgcctgaaagaagaggaagaccagaaatctctttagatgaaagaggagaaggaggacatgtgcatacttctgatgactcagaagttgtattttcttcttgtgatttgaatttaaccatggaagacagtgatggtgtaacttatgcattaaagtgtgacagtagtggtcatgccccagaaattgtgtctacagttcatgaagattattctggctcttctgaaagttcaaatgatgaaagtgattcagaagatacagattcggatgatagcagtattccaagaaaccgtctccagtctgttgtggttgtgccaaagaattctactttgcccatggaagaaacaagtccttgttcttctcggagcagtcaaagttatagacactattctgaccattgggaagatgagagattggagtcaaggagacatttgtatgaggaaaaatttgaaagtatagcaagtaaagcctgtcctcaaactgataagtttttccttcataaaggaacagagaagaatccggaaatttcttttacacagtccagtagaaaacaaatagataatcgcctgcctgaactttctcatcctcagagtgatggggttgatagtacaagtcatacagatgtgaaatctgaccctctgggtcacccaaattcagaggaaaccgtgaaagccaaaataccttctaggcagcaagaagagctgccaatttattcttctgattttgaagatgtcccaaataagtcttggcaacagaccactttccaaaacaggccagatagtagactgggaaaaacagaattgagtttttcttcctcttgtgagataccacatgtggatggcttgcactcatcagaagagctcagaaacttaggttgggacttctctcaagaaaagccttctaccacgtatcagcaacctgacagtagctatggagcttgtggtggacacaagtatcagcaaaatgcagaacagtatggtgggacacgtgattactggcaaggcaatggttactgggatccaagatcaggtagacctcctggaactggggttgtgtatgatcgaactcaaggacaagtaccagattccctaacagatgatcgtgaagaagaggagaattgggatcaacaggatggatcccatttttcagaccagtccgataaatttcttctatcccttcagaaagacaaggggtcagtgcaagcacctgaaataagcagcaattccattaaggacactttagctgtgaatgaaaagaaagatttttcaaaaaacttagaaaaaaatgatatcaaagatagagggcctcttaaaaaaaggaggcaggaaatagagagtgattctgaaagtgatggtgagcttcaggacagaaagaaagttagagtggaggtagagcagggagagacatcagtgcccccaggttcagcactggttgggccctcctgtgtcatggatgacttcagggacccacagcgatggaaggaatgtgccaagcaagggaaaatgccatgttactttgatcttattgaagaaaatgtttatttaacagaaagaatgaagtatctttgggtactgtattagtccgttttcatgctgctgataaagacatacccgagactgggaagaaaaagaggtttaattggacttgcagttccacatggctggggaggcctcagaattgcggcaggaggcaaaaggcacttcttacatggtggtggcaagagaaaaagaggaagaagcaaaagtgaaaacccttgataaacccatcagatcttgtgtgacttaatcaccatcacaagaataacacgagaaaggccggcccccatgattcagttacctcctcaagttgagtttgggtggggaaacagccaaaccatatcagaaagaagaataaatctcatcgagatattaagcgaatgcagtgtgagtgtacacctctttctaaagatgaaagagctcaaggtgaaatagcatgtggggaagattgtcttaatcgtcttctcatgattgaatgttcttctcggtgtccaaatggggattattgttccaatagacggtttcagagaaaacagcatgcagatgtggaagtcatactcacagaaaagaaaggctggggcttgagagctgccaaagaccttccttcataatagatgccactcaaaaaggaaattgctctcgtttcatgaatcacagctgtgaaccaaattgtgaaacccaaaaatggactgtgaacggacaactgagggttgggttttttaccaccaaactggttccttcaggctcagagttaacgtttgactatcagttccagagatatggaaaagaagcccagaaatgtttctgcggatcagccaattgccggggttacctgggaggagaaaacagagtcagcatcagagcagcaggagggaaaatgaagaaggaacgatctcgtaagaaggattcagtggatggagagctagaagctctgatggaaaatggtgagggtctctctgataaaaaccaggtgctcagcttatcccggctaatggttagaattgaaactttggagcagaaacttacctgtctggaactcatacagaacacacactcacagtcctgcctgaagtcctttctggaacgtcatgggctgtctttgttgtggatctggatggcagagctaggtgacggccgggaaagtaaccagaagcttcaggaagagattataaagactttggaacacttgcccattcctactaaaaatatgttggaggaaagcaaagtacttccaattattcaacgctggtctcagactaagactgctgtccctccgttgagtgaaggagatgggtattctagtgagaatacatcgcgtgctcatacaccactcaacacacctgatccttccaccaagctgagcacagaagctgacacagacactcccaagaaactaatgtttcgcagactgaaaattataagtgaaaatagcatggacagtgcaatctctgatgcaaccagtgagctagaaggcaaggatggcaaagaggatcttgatcaattagaaaatgtccctgtagaggaagaggaagaattgcagtcacaacagctactcccacaacagctgcctgaatgcaaagttgatagtgaaaccaacatagaagctagtaagctacctacatctgaaccagaagctgacgctgaaatagagcccaaagagagcaacggcacaaaactagaagaacctattaatgaagaaacaccatcccaagatgaagaggagggtgtgtctgatgtggagagtgaaaggagccaagaacagccagataaaacagtggatataagtgatttggccaccaaactcctggacagttggaaagacctaaaggaggtatatcgaattccaaagaaaagtcaaactgaaaaggaaaacacaacaactgaacgaggaagggatgctgttggcttcagagatcaaacacctgccccgaagactcctaataggtcaagagagagagacccagacaagcaaactcaaaataaagagaaaaggaaacgaagaagctccctctcaccaccctcttctgcctatgagcggggaacaaaaaggccagatgacagatatgatacaccaacttctaaaaagaaagtacgaattaaagaccgcaataaactttctacagaggaacgccggaagttgtttgagcaagaggtggctcaacgggaggctcagaaacaacagcaacagatgcagaacctgggaatgacatcaccactgccctatgactctcttggttataatgccccgcatcatccctttgctggttacccaccaggttatcccatgcaggcctatgtggatcccagcaaccctaatgctggaaaggtgctcctgcccacacccagcatggacccagtgtgttctcctgctccttatgatcatgctcagcccttggtgggacattctacagaacccctttctgcccctccaccagtaccagtggtgccacatgtggcagctcctgtggaagtttccagttcccagtatgtggcccagagtgatggtgtagtacaccaagactccagcgttgctgtcttgccagtgccggcccccggcccagttcagggacagaattatagtgtttgggattcaaaccaacagtctgtcagtgtacagcagcagtactctcctgcacagtctcaagcaaccatatattatcaaggacagacatgtccaacagtctatggtgtgacatcaccttattcacagacaactccaccaattgtacagagttatgcccagccaagtcttcagtatatccaggggcaacagattttcacagctcatccacaaggagtggtggtacagccagccgcagcagtgactacaatagttgcaccagggcagcctcagcccttgcagccatctgaaatggttgtgacaaataatctcttggatctgccgcccccctctcctcccaaaccaaaaaccattgtcttacctcccaactggaagacagctcgagatccagaagggaagatttattactaccatgtgatcacaaggcagactcagtgggatcctcctacttgggaaagcccaggagatgatgccagccttgagcatgaagctgagatggacctgggaactccaacatatgatgaaaaccccatgaaggcctcgaaaaagcccaagacagcagaagcagacacctccagtgaactagcaaagaaaagcaaagaagtattcagaaaagagatgtcccagttcatcgtccagtgcctgaacccttaccggaaacctgactgcaaagtgggaagaattaccacaactgaagactttaaacatctggctcgcaagctgactcacggtgttatgaataaggagctgaagtactgtaagaatcctgaggacctggagtgcaatgagaatgtgaaacacaaaaccaaggagtacattaagaagtacatgcagaagtttggggctgtttacaaacccaaagaggacactgaattagagtgactgttgggccagggtgggaggatgggtggtcaggtaagacagactctagggagaggaaatcctgtgggcctttctgtcccacccctgtcagcactgtgctactgatgatacatcaccctggggaattcaaccctgcagatgtcaactgaaggccacaaaaatgaactccatctacaagtgattacctagttgtgagctgttggcatgtggttagaagccatcagaggtgcaagggcttagaaaagaccctggccagacctgactccactcttaaacctgggtcttctccttggcggtgctgtcagcgcacagacccatgcgcatccccacccacaaccctttaccctgatgatctgtattatattttaatgtatatgtgaatatattgaaaataatttgttttttcctggtttttgtttggttttcgttttgcttttagcctctacatgctaggatcacaggaagactttgtaaggacagtttaagttctcctgcaaggtttaatttgttatcatgtaaatattctaaagcaggctgccttgtggttttggccagccttgtgctatgttgataagattgatttactgcttaaaatcactttactttatccaatttttactgaactttttatg

SEQ ID NO: 9316 - protein, 1378 aa, Homo sapiens
MKMEIGDTLSTAEESSPPKSRVELGKIHFKKHLLHVTSRPLLATTTAVASPPTHAAPLPAVIAESTTVDSPPSSPPPPPPPAQATTLSSPAPVTEPVALPHTPITVLMAAPVPLPVDVAVRSLKEPPIIIVPESLEADTKQDTISNSLEEHVTQILNEQADISSKKEDSHIGKDEEIPDSSKISLSCKKTGSKKKSSQSEGIFLGSESDEDSVRTSSSQRSHDLKFSASIEKERDFKKSSAPLKSEDLGKPSRSKTDRDDKYFSYSKLERDTRYVSSRCRSERERRRSRSHSRSERGSRTNLSYSRSERSHYYDSDRRYHRSSPYRERTRYSRPYTDNRARESSDSEEEYKKTYSRRTSSHSSSYRDLRTSSYSKSDRDCKTETSYLEMERRGKYSSKLERESKRTSENEAIKRCCSPPNELGFRRGSSYSKHDSSASRYKSTLSKPIPKSDKFKNSFCCTELNEEIKQSHSFSLQTPCSKGSELRMINKNPEREKAGSPAPSNRLNDSPTLKKLDELPIFKSEFITHDSHDSIKELDSLSKVKNDQLRSFCPIELNINGSPGAESDLATFCTSKTDAVLMTSDDSVTGSELSPLVKACMLSSNGFQNISRCKEKDLDDTCMLHKKSESPFRETEPLVSPHQDKLMSMPVMTVDYSKTVVKEPVDTRVSCCKTKDSDIYCTLNDSNPSLCNSEAENIEPSVMKISSNSFMNVHLESKPVICDSRNLTDHSKFACEEYKQSIGSTSSASVNHFDDLYQPIGSSGIASSLQSLPPGIKVDSLTLLKCGENTSPVLDAVLKSKKSSEFLKHAGKETIVEVGSDLPDSGKGFASRENRRNNGLSGKCLQEAQEEGNSILPERRGRPEISLDERGEGGHVHTSDDSEVVFSSCDLNLTMEDSDGVTYALKCDSSGHAPEIVSTVHEDYSGSSESSNDESDSEDTDSDDSSIPRNRLQSVVVVPKNSTLPMEETSPCSSRSSQSYRHYSDHWEDERLESRRHLYEEKFESIASKACPQTDKFFLHKGTEKNPEISFTQSSRKQIDNRLPELSHPQSDGVDSTSHTDVKSDPLGHPNSEETVKAKIPSRQQEELPIYSSDFEDVPNKSWQQTTFQNRPDSRLGKTELSFSSSCEIPHVDGLHSSEELRNLGWDFSQEKPSTTYQQPDSSYGACGGHKYQQNAEQYGGTRDYWQGNGYWDPRSGRPPGTGVVYDRTQGQVPDSLTDDREEEENWDQQDGSHFSDQSDKFLLSLQKDKGSVQAPEISSNSIKDTLAVNEKKDFSKNLEKNDIKDRGPLKKRRQEIESDSESDGELQDRKKVRVEVEQGETSVPPGSALVGPSCVMDDFRDPQRWKECAKQGKMPCYFDLIEENVYLTERMKYLWVLY

SEQ ID NO: 9317 - DNA, 7501 bp, Homo sapiens
caacactctcatcaccagcaccagtaacagagccagtggccttgccacatacaccaataacagttctaatggcagcaccagtacccttaccagtagatgtagcagttagatctctgaaagaaccaccaattataattgtaccagaatctttagaagcagatactaagcaggacactatatctaatagtttagaagaacacgtaactcaaatattgaatgagcaagcagatatttcctcaaaaaaagaagattcccatattgggaaggatgaagaaattccagatagttctaagattagtctgagctgtaaaaaaacaggttctaagaagaaatcctcacaatctgaaggcatctttcttggttcagaatctgatgaagattctgtacggacttcttcaagtcaaagatcacatgatttaaaattttcagcaagcattgaaaaggaaagagattttaaaaagagctcagcacctttaaaaagtgaggatctagggaaaccttcacgatctaaaacagacagagatgataaatattttagctattcaaaacttgaaagagatactcggtatgtatcttcccgatgtagatcagaaagagagcgacggcggagcagatctcactctaggtctgagagaggctctagaactaatttatcctattccaggtcagaacgatctcattattatgactctgatcgtcgctaccataggagctccccttatcgagagaggacgcgctattctcggccatacacagataacagagcacgagagagttctgactcagaagaagagtataagaagacatactcaaggcgtacctcatctcattcctcttcttacagagacctaaggacatcatcctattctaaatctgatcgggactgtaaaactgagacctcttacttagagatggaaagaagaggcaagtattcttcaaaactagaaagagaatctaaaaggacttcagaaaatgaagcaattaaaagatgttgttctccccctaatgaactgggattccgacgagggtcatcatattctaagcatgacagtagtgcttcccgttataaatctaccctttcaaaacctatacccaagtctgataaatttaaaaattctttctgttgtacagaattaaatgaagaaatcaaacagtctcattcttttagtttacagacaccttgttcaaaaggtagtgaattaagaatgattaataaaaatcctgaaagagaaaaggctgggtctccagctccatcaaatcgattaaatgattcacctactttaaaaaagctagatgaattgcctatttttaagtccgaatttataacacatgatagccatgatagtattaaggaattagactctttatctaaagtgaagaatgatcaattaagaagtttttgtcccatagaattaaatataaatggatctcctggggcagaatctgatttggcaacattttgcacttctaaaactgatgctgttttaatgacttctgatgatagtgtgactggatcggaattatcccctttggtcaaagcatgcatgctttcatcaaatggatttcagaatattagtaggtgcaaagaaaaagacttggatgatacctgcatgctgcataagaagtcagaaagcccatttagagaaacagaacctctggtgtcaccacaccaagataaactcatgtctatgccagttatgactgtggattattccaaaacagtagttaaagaaccagttgatacgagggtttcttgctgcaaaaccaaagattcagacatatactgtactttgaacgatagcaacccttctttgtgtaactctgaagctgaaaatattgagccttcagttatgaagatttcttcaaatagctttatgaatgtgcatttggaatcaaaaccagttatatgtgatagtagaaatttgacagatcactcaaaatttgcatgtgaagaatataagcagagcatcggtagcactagttcagcttctgttaatcattttgatgatttatatcaacctattgggagttcaggtattgcttcatctcttcagagtcttccaccaggaataaaggtggacagtctaactctcttgaaatgcggagagaacacatctccagttctggatgcagtgctaaagagtaaaaaaagttcagagtttttaaagcatgcagggaaagaaacaatagtagaagtaggtagtgaccttcctgattcaggaaagggatttgcttccagggagaacaggcgtaataatgggttatctgggaaatgtttgcaagaggctcaagaagaagggaattccatattgcctgaaagaagaggaagaccagaaatctctttagatgaaagaggagaaggaggacatgtgcatacttctgatgactcagaagttgtattttcttcttgtgatttgaatttaaccatggaagacagtgatggtgtaacttatgcattaaagtgtgacagtagtggtcatgccccagaaattgtgtctacagttcatgaagattattctggctcttctgaaagttcaaatgatgaaagtgattcagaagatacagattcggatgatagcagtattccaagaaaccgtctccagtctgttgtggttgtgccaaagaattctactttgcccatggaagaaacaagtccttgttcttctcggagcagtcaaagttatagacactattctgaccattgggaagatgagagattggagtcaaggagacatttgtatgaggaaaaatttgaaagtatagcaagtaaagcctgtcctcaaactgataagtttttccttcataaaggaacagagaagaatccggaaatttcttttacacagtccagtagaaaacaaatagataatcgcctgcctgaactttctcatcctcagagtgatggggttgatagtacaagtcatacagatgtgaaatctgaccctctgggtcacccaaattcagaggaaaccgtgaaagccaaaataccttctaggcagcaagaagagctgccaatttattcttctgattttgaagatgtcccaaataagtcttggcaacagaccactttccaaaacaggccagatagtagactgggaaaaacagaattgagtttttcttcctcttgtgagataccacatgtggatggcttgcactcatcagaagagctcagaaacttaggttgggacttctctcaagaaaagccttctaccacgtatcagcaacctgacagtagctatggagcttgtggtggacacaagtatcagcaaaatgcagaacagtatggtgggacacgtgattactggcaaggcaatggttactgggatccaagatcaggtagacctcctggaactggggttgtgtatgatcgaactcaaggacaagtaccagattccctaacagatgatcgtgaagaagaggagaattgggatcaacaggatggatcccatttttcagaccagtccgataaatttcttctatcccttcagaaagacaaggggtcagtgcaagcacctgaaataagcagcaattccattaaggacactttagctgtgaatgaaaagaaagatttttcaaaaaacttagaaaaaaatgatatcaaagatagagggcctcttaaaaaaaggaggcaggaaatagagagtgattctgaaagtgatggtgagcttcaggacagaaagaaagttagagtggaggtagagcagggagagacatcagtgcccccaggttcagcactggttgggccctcctgtgtcatggatgacttcagggacccacagcgatggaaggaatgtgccaagcaagggaaaatgccatgttactttgatcttattgaagaaaatgtttatttaacagaaagaaagaagaataaatctcatcgagatattaagcgaatgcagtgtgagtgtacacctctttctaaagatgaaagagctcaaggtgaaatagcatgtggggaagattgtcttaatcgtcttctcatgattgaatgttcttctcggtgtccaaatggggattattgttccaatagacggtttcagagaaaacagcatgcagatgtggaagtcatactcacagaaaagaaaggctggggcttgagagctgccaaagaccttccttcgaacacctttgtcctagaatattgtggagaggtactcgatcataaagagtttaaagctcgagtgaaggagtatgcacgaaacaaaaacatccattactatttcatggccctgaagaatgatgagataatagatgccactcaaaaaggaaattgctctcgtttcatgaatcacagctgtgaaccaaattgtgaaacccaaaaatggactgtgaacggacaactgagggttgggttttttaccaccaaactggttccttcaggctcagagttaacgtttgactatcagttccagagatatggaaaagaagcccagaaatgtttctgcggatcagccaattgccggggttacctgggaggagaaaacagagtcagcatcagagcagcaggagggaaaatgaagaaggaacgatctcgtaagaaggattcagtggatggagagctagaagctctgatggaaaatggtgagggtctctctgataaaaaccaggtgctcagcttatcccggctaatggttagaattgaaactttggagcagaaacttacctgtctggaactcatacagaacacacactcacagtcctgcctgaagtcctttctggaacgtcatgggctgtctttgttgtggatctggatggcagagctaggtgacggccgggaaagtaaccagaagcttcaggaagagattataaagactttggaacacttgcccattcctactaaaaatatgttggaggaaagcaaagtacttccaattattcaacgctggtctcagactaagactgctgtccctccgttgagtgaaggagatgggtattctagtgagaatacatcgcgtgctcatacaccactcaacacacctgatccttccaccaagctgagcacagaagctgacacagacactcccaagaaactaatgtttcgcagactgaaaattataagtgaaaatagcatggacagtgcaatctctgatgcaaccagtgagctagaaggcaaggatggcaaagaggatcttgatcaattagaaaatgtccctgtagaggaagaggaagaattgcagtcacaacagctactcccacaacagctgcctgaatgcaaagttgatagtgaaaccaacatagaagctagtaagctacctacatctgaaccagaagctgacgctgaaatagagcccaaagagagcaacggcacaaaactagaagaacctattaatgaagaaacaccatcccaagatgaagaggagggtgtgtctgatgtggagagtgaaaggagccaagaacagccagataaaacagtggatataagtgatttggccaccaaactcctggacagttggaaagacctaaaggaggtatatcgaattccaaagaaaagtcaaactgaaaaggaaaacacaacaactgaacgaggaagggatgctgttggcttcagagatcaaacacctgccccgaagactcctaataggtcaagagagagagacccagacaagcaaactcaaaataaagagaaaaggaaacgaagaagctccctctcaccaccctcttctgcctatgagcggggaacaaaaaggccagatgacagatatgatacaccaacttctaaaaagaaagtacgaattaaagaccgcaataaactttctacagaggaacgccggaagttgtttgagcaagaggtggctcaacgggaggctcagaaacaacagcaacagatgcagaacctgggaatgacatcaccactgccctatgactctcttggttataatgccccgcatcatccctttgctggttacccaccaggttatcccatgcaggcctatgtggatcccagcaaccctaatgctggaaaggtgctcctgcccacacccagcatggacccagtgtgttctcctgctccttatgatcatgctcagcccttggtgggacattctacagaacccctttctgcccctccaccagtaccagtggtgccacatgtggcagctcctgtggaagtttccagttcccagtatgtggcccagagtgatggtgtagtacaccaagactccagcgttgctgtcttgccagtgccggcccccggcccagttcagggacagaattatagtgtttgggattcaaaccaacagtctgtcagtgtacagcagcagtactctcctgcacagtctcaagcaaccatatattatcaaggacagacatgtccaacagtctatggtgtgacatcaccttattcacagacaactccaccaattgtacagagttatgcccagccaagtcttcagtatatccaggggcaacagattttcacagctcatccacaaggagtggtggtacagccagccgcagcagtgactacaatagttgcaccagggcagcctcagcccttgcagccatctgaaatggttgtgacaaataatctcttggatctgccgcccccctctcctcccaaaccaaaaaccattgtcttacctcccaactggaagacagctcgagatccagaagggaagatttattactaccatgtgatcacaaggcagactcagtgggatcctcctacttgggaaagcccaggagatgatgccagccttgagcatgaagctgagatggacctgggaactccaacatatgatgaaaaccccatgaaggcctcgaaaaagcccaagacagcagaagcagacacctccagtgaactagcaaagaaaagcaaagaagtattcagaaaagagatgtcccagttcatcgtccagtgcctgaacccttaccggaaacctgactgcaaagtgggaagaattaccacaactgaagactttaaacatctggctcgcaagctgactcacggtgttatgaataaggagctgaagtactgtaagaatcctgaggacctggagtgcaatgagaatgtgaaacacaaaaccaaggagtacattaagaagtacatgcagaagtttggggctgtttacaaacccaaagaggacactgaattagagtgactgttgggccagggtgggaggatgggtggtcaggtaagacagactctagggagaggaaatcctgtgggcctttctgtcccacccctgtcagcactgtgctactgatgatacatcaccctggggaattcaaccctgcagatgtcaactgaaggccacaaaaatgaactccatctacaagtgattacctagttgtgagctgttggcatgtggttagaagccatcagaggtgcaagggcttagaaaagaccctggccagacctgactccactcttaaacctgggtcttctccttggcggtgctgtcagcgcacagacccatgcgcatccccacccacaaccctttaccctgatgatctgtattatattttaatgtatatgtgaatatattgaaaataatttgttttt

SEQ ID NO: 9318 - protein, 2342 aa, Homo sapiens; identical to SEQ ID NO: 9312

SEQ ID NO: 9319 - DNA, 8053 bp, Homo sapiens
gggcgagcgcctccgtccccggatgtgagctccggctgcccgcggtcccgagccagcggcggcgcgggcggcggcggcgggcaccgggcaccgcggcgggcgggcagacgggcgggcatggggggagcgccgagcggccccggcggccgggccggcatcaccgcggcgtctctccgctagaggaggggacaagccagttctcctttgcagcaaaaaattacatgtatatattattaagataatatatacattggattttatttttttaaaaagtttattttgctccatttttgaaaaagagagagcttgggtggcgagcggttttttttttaaatcaattatccttattttctgttatttgtccccgtccctccccacccccctgctgaagcgagaataagggcagggaccgcggctcctacctcttggtgatccccttccccattccgcccccgcctcaacgcccagcacagtgccctgcacacagtagtcgctcaataaatgttcgtggatgatgatgatgatgatgatgaaaaaaatgcagcatcaacggcagcagcaagcggaccacgcgaacgaggcaaactatgcaagaggcaccagacttcctctttctggtgaaggaccaacttctcagccgaatagctccaagcaaactgtcctgtcttggcaagctgcaatcgatgctgctagacaggccaaggctgcccaaactatgagcacctctgcacccccacctgtaggatctctctcccaaagaaaacgtcagcaatacgccaagagcaaaaaacagggtaactcgtccaacagccgacctgcccgcgcccttttctgtttatcactcaataaccccatccgaagagcctgcattagtatagtggaatggaaaccatttgacatatttatattattggctatttttgccaattgtgtggccttagctatttacatcccattccctgaagatgattctaattcaacaaatcataacttggaaaaagtagaatatgccttcctgattatttttacagtcgagacatttttgaagattatagcgtatggattattgctacatcctaatgcttatgttaggaatggatggaatttactggattttgttatagtaatagtaggattgtttagtgtaattttggaacaattaaccaaagaaacagaaggcgggaaccactcaagcggcaaatctggaggctttgatgtcaaagccctccgtgcctttcgagtgttgcgaccacttcgactagtgtcaggagtgcccagtttacaagttgtcctgaactccattataaaagccatggttcccctccttcacatagcccttttggtattatttgtaatcataatctatgctattataggattggaactttttattggaaaaatgcacaaaacatgtttttttgctgactcagatatcgtagctgaagaggacccagctccatgtgcgttctcagggaatggacgccagtgtactgccaatggcacggaatgtaggagtggctgggttggcccgaacggaggcatcaccaactttgataactttgcctttgccatgcttactgtgtttcagtgcatcaccatggagggctggacagatgtgctctactggatgaatgatgctatgggatttgaattgccctgggtgtattttgtcagtctcgtcatctttgggtcatttttcgtactaaatcttgtacttggtgtattgagcggagaattctcaaaggaaagagagaaggcaaaagcacggggagatttccagaagctccgggagaagcagcagctggaggaggatctaaagggctacttggattggatcacccaagctgaggacatcgatccggagaatgaggaagaaggaggagaggaaggcaaacgaaatactagcatgcccaccagcgagactgagtctgtgaacacagagaacgtcagcggtgaaggcgagaaccgaggctgctgtggaagtctctgtcaagccatctcaaaatccaaactcagccgacgctggcgtcgctggaaccgattcaatcgcagaagatgtagggccgccgtgaagtctgtcacgttttactggctggttatcgtcctggtgtttctgaacaccttaaccatttcctctgagcactacaatcagccagattggttgacacagattcaagatattgccaacaaagtcctcttggctctgttcacctgcgagatgctggtaaaaatgtacagcttgggcctccaagcatatttcgtctctcttttcaaccggtttgattgcttcgtggtgtgtggtggaatcactgagacgatcttggtggaactggaaatcatgtctcccctggggatctctgtgtttcggtgtgtgcgcctcttaagaatcttcaaagtgaccaggcactggacttccctgagcaacttagtggcatccttattaaactccatgaagtccatcgcttcgctgttgcttctgctttttctcttcattatcatcttttccttgcttgggatgcagctgtttggcggcaagtttaattttgatgaaacgcaaaccaagcggagcacctttgacaatttccctcaagcacttctcacagtgttccagatcctgacaggcgaagactggaatgctgtgatgtacgatggcatcatggcttacgggggcccatcctcttcaggaatgatcgtctgcatctacttcatcatcctcttcatttgtggtaactatattctactgaatgtcttcttggccatcgctgtagacaatttggctgatgctgaaagtctgaacactgctcagaaagaagaagcggaagaaaaggagaggaaaaagattgccagaaaagagagcctagaaaataaaaagaacaacaaaccagaagtcaaccagatagccaacagtgacaacaaggttacaattgatgactatagagaagaggatgaagacaaggacccctatccgccttgcgatgtgccagtaggggaagaggaagaggaagaggaggaggatgaacctgaggttcctgccggaccccgtcctcgaaggatctcggagttgaacatgaaggaaaaaattgcccccatccctgaagggagcgctttcttcattcttagcaagaccaacccgatccgcgtaggctgccacaagctcatcaaccaccacatcttcaccaacctcatccttgtcttcatcatgctgagcagcgctgccctggccgcagaggaccccatccgcagccactccttccggaacacgatactgggttactttgactatgccttcacagccatctttactgttgagatcctgttgaagatgacaacttttggagctttcctccacaaaggggccttctgcaggaactacttcaatttgctggatatgctggtggttggggtgtctctggtgtcatttgggattcaatccagtgccatctccgttgtgaagattctgagggtcttaagggtcctgcgtcccctcagggccatcaacagagcaaaaggacttaagcacgtggtccagtgcgtcttcgtggccatccggaccatcggcaacatcatgatcgtcaccaccctcctgcagttcatgtttgcctgtatcggggtccagttgttcaaggggaagttctatcgctgtacggatgaagccaaaagtaaccctgaagaatgcaggggacttttcatcctctacaaggatggggatgttgacagtcctgtggtccgtgaacggatctggcaaaacagtgatttcaacttcgacaacgtcctctctgctatgatggcgctcttcacagtctccacgtttgagggctggcctgcgttgctgtataaagccatcgactcgaatggagagaacatcggcccaatctacaaccaccgcgtggagatctccatcttcttcatcatctacatcatcattgtagctttcttcatgatgaacatctttgtgggctttgtcatcgttacatttcaggaacaaggagaaaaagagtataagaactgtgagctggacaaaaatcagcgtcagtgtgttgaatacgccttgaaagcacgtcccttgcggagatacatccccaaaaacccctaccagtacaagttctggtacgtggtgaactcttcgcctttcgaatacatgatgtttgtcctcatcatgctcaacacactctgcttggccatgcagcactacgagcagtccaagatgttcaatgatgccatggacattctgaacatggtcttcaccggggtgttcaccgtcgagatggttttgaaagtcatcgcatttaagcctaaggggtattttagtgacgcctggaacacgtttgactccctcatcgtaatcggcagcattatagacgtggccctcagcgaagcagacccaactgaaagtgaaaatgtccctgtcccaactgctacacctgggaactctgaagagagcaatagaatctccatcacctttttccgtcttttccgagtgatgcgattggtgaagcttctcagcaggggggaaggcatccggacattgctgtggacttttattaagtcctttcaggcgctcccgtatgtggccctcctcatagccatgctgttcttcatctatgcggtcattggcatgcagatgtttgggaaagttgccatgagagataacaaccagatcaataggaacaataacttccagacgtttccccaggcggtgctgctgctcttcaggtgtgcaacaggtgaggcctggcaggagatcatgctggcctgtctcccagggaagctctgtgaccctgagtcagattacaaccccggggaggagtatacatgtgggagcaactttgccattgtctatttcatcagtttttacatgctctgtgcatttctgatcatcaatctgtttgtggctgtcatcatggataatttcgactatctgacccgggactggtctattttggggcctcaccatttagatgaattcaaaagaatatggtcagaatatgaccctgaggcaaagggaaggataaaacaccttgatgtggtcactctgcttcgacgcatccagcctcccctggggtttgggaagttatgtccacacagggtagcgtgcaagagattagttgccatgaacatgcctctcaacagtgacgggacagtcatgtttaatgcaaccctgtttgctttggttcgaacggctcttaagatcaagaccgaagggaacctggagcaagctaatgaagaacttcgggctgtgataaagaaaatttggaagaaaaccagcatgaaattacttgaccaagttgtccctccagctggtgatgatgaggtaaccgtggggaagttctatgccactttcctgatacaggactactttaggaaattcaagaaacggaaagaacaaggactggtgggaaagtaccctgcgaagaacaccacaattgccctacaggcgggattaaggacactgcatgacattgggccagaaatccggcgtgctatatcgtgtgatttgcaagatgacgagcctgaggaaacaaaacgagaagaagaagatgatgtgttcaaaagaaatggtgccctgcttggaaaccatgtcaatcatgttaatagtgataggagagattcccttcagcagaccaataccacccaccgtcccctgcatgtccaaaggccttcaattccacctgcaagtgatactgagaaaccgctgtttcctccagcaggaaattcggtgtgtcataaccatcataaccataattccataggaaagcaagttcccacctcaacaaatgccaatctcaataatgccaatatgtccaaagctgcccatggaaagcggcccagcattgggaaccttgagcatgtgtctgaaaatgggcatcattcttcccacaagcatgaccgggagcctcagagaaggtccagtgtgaaaagaacccgctattatgaaacttacattaggtccgactcaggagatgaacagctcccaactatttgccgggaagacccagagatacatggctatttcagggacccccactgcttgggggagcaggagtatttcagtagtgaggaatgctacgaggatgacagctcgcccacctggagcaggcaaaactatggctactacagcagatacccaggcagaaacatcgactctgagaggccccgaggctaccatcatccccaaggattcttggaggacgatgactcgcccgtttgctatgattcacggagatctccaaggagacgcctactacctcccaccccagcatcccaccggagatcctccttcaactttgagtgcctgcgccggcagagcagccaggaagaggtcccgtcgtctcccatcttcccccatcgcacggccctgcctctgcatctaatgcagcaacagatcatggcagttgccggcctagattcaagtaaagcccagaagtactcaccgagtcactcgacccggtcgtgggccacccctccagcaacccctccctaccgggactggacaccgtgctacacccccctgatccaagtggagcagtcagaggccctggaccaggtgaacggcagcctgccgtccctgcaccgcagctcctggtacacagacgagcccgacatctcctaccggactttcacaccagccagcctgactgtccccagcagcttccggaacaaaaacagcgacaagcagaggagtgcggacagcttggtggaggcagtcctgatatccgaaggcttgggacgctatgcaagggacccaaaatttgtgtcagcaacaaaacacgaaatcgctgatgcctgtgacctcaccatcgacgagatggagagtgcagccagcaccctgcttaatgggaacgtgcgtccccgagccaacggggatgtgggccccctctcacaccggcaggactatgagctacaggactttggtcctggctacagcgacgaagagccagaccctgggagggatgaggaggacctggcggatgaaatgatatgcatcaccaccttgtagcccccagcgaggggcagactggctctggcctcaggtggggcgcaggagagccaggggaaaagtgcctcatagttaggaaagtttaggcactagttgggagtaatattcaattaattagacttttgtataagagatgtcatgcctcaagaaagccataaacctggtaggaacaggtcccaagcggttgagcctggcagagtaccatgcgctcggccccagctgcaggaaacagcaggccccgccctctcacagaggatgggtgaggaggccagacctgccctgccccattgtccagatgggcactgctgtggagtctgcttctcccatgtaccagggcaccaggcccacccaactgaaggcatggcggcggggtgcaggggaaagttaaaggtgatgacgatcatcacacctgtgtcgttacctcagccatcggtctagcatatcagtcactgggcccaacatatccatttttaaaccctttcccccaaatacactgcgtcctggttcctgtttagctgttctgaaatacggtgtgtaagtaagtcagaacccagctaccagtgattattgcgagggcaatgggacctcataaataaggttttctgtgatgtgacgccagtttacataagagaatatcactccgatggtcggtttctgactgtcacgctaagggcaactgtaaactggaataataatgcactcgcaaccaggtaaacttagatacactagtttgtttaaaattatagatttactgtacatgacttgtaatatactataatttgtatttgtaaagagatggtctatattttgtaattactgtattgtatttgaactgcagcaatatccatgggtcctaataattgtagttccccactaaaatctagaaattattagtatttttactcgggctatccagaagtagaagaaatagagccaattctcatttattcagcgaaaatcctctggggttaaaattttaagtttgaaagaacttgacactacagaaatttttctaaaatattttgagtcactataaacctatcatctttccacaag

SEQ ID NO: 9320 - protein, 2161 aa, Homo sapiens
MMMMMMMKKMQHQRQQQADHANEANYARGTRLPLSGEGPTSQPNSSKQTVLSWQAAIDAARQAKAAQTMSTSAPPPVGSLSQRKRQQYAKSKKQGNSSNSRPARALFCLSLNNPIRRACISIVEWKPFDIFILLAIFANCVALAIYIPFPEDDSNSTNHNLEKVEYAFLIIFTVETFLKIIAYGLLLHPNAYVRNGWNLLDFVIVIVGLFSVILEQLTKETEGGNHSSGKSGGFDVKALRAFRVLRPLRLVSGVPSLQVVLNSIIKAMVPLLHIALLVLFVIIIYAIIGLELFIGKMHKTCFFADSDIVAEEDPAPCAFSGNGRQCTANGTECRSGWVGPNGGITNFDNFAFAMLTVFQCITMEGWTDVLYWMNDAMGFELPWVYFVSLVIFGSFFVLNLVLGVLSGEFSKEREKAKARGDFQKLREKQQLEEDLKGYLDWITQAEDIDPENEEEGGEEGKRNTSMPTSETESVNTENVSGEGENRGCCGSLCQAISKSKLSRRWRRWNRFNRRRCRAAVKSVTFYWLVIVLVFLNTLTISSEHYNQPDWLTQIQDIANKVLLALFTCEMLVKMYSLGLQAYFVSLFNRFDCFVVCGGITETILVELEIMSPLGISVFRCVRLLRIFKVTRHWTSLSNLVASLLNSMKSIASLLLLLFLFIIIFSLLGMQLFGGKFNFDETQTKRSTFDNFPQALLTVFQILTGEDWNAVMYDGIMAYGGPSSSGMIVCIYFIILFICGNYILLNVFLAIAVDNLADAESLNTAQKEEAEEKERKKIARKESLENKKNNKPEVNQIANSDNKVTIDDYREEDEDKDPYPPCDVPVGEEEEEEEEDEPEVPAGPRPRRISELNMKEKIAPIPEGSAFFILSKTNPIRVGCHKLINHHIFTNLILVFIMLSSAALAAEDPIRSHSFRNTILGYFDYAFTAIFTVEILLKMTTFGAFLHKGAFCRNYFNLLDMLVVGVSLVSFGIQSSAISVVKILRVLRVLRPLRAINRAKGLKHVVQCVFVAIRTIGNIMIVTTLLQFMFACIGVQLFKGKFYRCTDEAKSNPEECRGLFILYKDGDVDSPVVRERIWQNSDFNFDNVLSAMMALFTVSTFEGWPALLYKAIDSNGENIGPIYNHRVEISIFFIIYIIIVAFFMMNIFVGFVIVTFQEQGEKEYKNCELDKNQRQCVEYALKARPLRRYIPKNPYQYKFWYVVNSSPFEYMMFVLIMLNTLCLAMQHYEQSKMFNDAMDILNMVFTGVFTVEMVLKVIAFKPKGYFSDAWNTFDSLIVIGSIIDVALSEADPTESENVPVPTATPGNSEESNRISITFFRLFRVMRLVKLLSRGEGIRTLLWTFIKSFQALPYVALLIAMLFFIYAVIGMQMFGKVAMRDNNQINRNNNFQTFPQAVLLLFRCATGEAWQEIMLACLPGKLCDPESDYNPGEEYTCGSNFAIVYFISFYMLCAFLIINLFVAVIMDNFDYLTRDWSILGPHHLDEFKRIWSEYDPEAKGRIKHLDVVTLLRRIQPPLGFGKLCPHRVACKRLVAMNMPLNSDGTVMFNATLFALVRTALKIKTEGNLEQANEELRAVIKKIWKKTSMKLLDQVVPPAGDDEVTVGKFYATFLIQDYFRKFKKRKEQGLVGKYPAKNTTIALQAGLRTLHDIGPEIRRAISCDLQDDEPEETKREEEDDVFKRNGALLGNHVNHVNSDRRDSLQQTNTTHRPLHVQRPSIPPASDTEKPLFPPAGNSVCHNHHNHNSIGKQVPTSTNANLNNANMSKAAHGKRPSIGNLEHVSENGHHSSHKHDREPQRRSSVKRTRYYETYIRSDSGDEQLPTICREDPEIHGYFRDPHCLGEQEYFSSEECYEDDSSPTWSRQNYGYYSRYPGRNIDSERPRGYHHPQGFLEDDDSPVCYDSRRSPRRRLLPPTPASHRRSSFNFECLRRQSSQEEVPSSPIFPHRTALPLHLMQQQIMAVAGLDSSKAQKYSPSHSTRSWATPPATPPYRDWTPCYTPLIQVEQSEALDQVNGSLPSLHRSSWYTDEPDISYRTFTPASLTVPSSFRNKNSDKQRSADSLVEAVLISEGLGRYARDPKFVSATKHEIADACDLTIDEMESAASTLLNGNVRPRANGDVGPLSHRQDYELQDFGPGYSDEEPDPGRDEEDLADEMICITTL

SEQ ID NO: 9321 - DNA, 8192 bp, Homo sapiens
gggcgagcgcctccgtccccggatgtgagctccggctgcccgcggtcccgagccagcggcggcgcgggcggcggcggcgggcaccgggcaccgcggcgggcgggcagacgggcgggcatggggggagcgccgagcggccccggcggccgggccggcatcaccgcggcgtctctccgctagaggaggggacaagccagttctcctttgcagcaaaaaattacatgtatatattattaagataatatatacattggattttatttttttaaaaagtttattttgctccatttttgaaaaagagagagcttgggtggcgagcggttttttttttaaatcaattatccttattttctgttatttgtccccgtccctccccacccccctgctgaagcgagaataagggcagggaccgcggctcctacctcttggtgatccccttccccattccgcccccgcctcaacgcccagcacagtgccctgcacacagtagtcgctcaataaatgttcgtggatgatgatgatgatgatgatgaaaaaaatgcagcatcaacggcagcagcaagcggaccacgcgaacgaggcaaactatgcaagaggcaccagacttcctctttctggtgaaggaccaacttctcagccgaatagctccaagcaaactgtcctgtcttggcaagctgcaatcgatgctgctagacaggccaaggctgcccaaactatgagcacctctgcacccccacctgtaggatctctctcccaaagaaaacgtcagcaatacgccaagagcaaaaaacagggtaactcgtccaacagccgacctgcccgcgcccttttctgtttatcactcaataaccccatccgaagagcctgcattagtatagtggaatggaaaccatttgacatatttatattattggctatttttgccaattgtgtggccttagctatttacatcccattccctgaagatgattctaattcaacaaatcataacttggaaaaagtagaatatgccttcctgattatttttacagtcgagacatttttgaagattatagcgtatggattattgctacatcctaatgcttatgttaggaatggatggaatttactggattttgttatagtaatagtaggattgtttagtgtaattttggaacaattaaccaaagaaacagaaggcgggaaccactcaagcggcaaatctggaggctttgatgtcaaagccctccgtgcctttcgagtgttgcgaccacttcgactagtgtcaggagtgcccagtttacaagttgtcctgaactccattataaaagccatggttcccctccttcacatagcccttttggtattatttgtaatcataatctatgctattataggattggaactttttattggaaaaatgcacaaaacatgtttttttgctgactcagatatcgtagctgaagaggacccagctccatgtgcgttctcagggaatggacgccagtgtactgccaatggcacggaatgtaggagtggctgggttggcccgaacggaggcatcaccaactttgataactttgcctttgccatgcttactgtgtttcagtgcatcaccatggagggctggacagatgtgctctactggatgaatgatgctatgggatttgaattgccctgggtgtattttgtcagtctcgtcatctttgggtcatttttcgtactaaatcttgtacttggtgtattgagcggagaattctcaaaggaaagagagaaggcaaaagcacggggagatttccagaagctccgggagaagcagcagctggaggaggatctaaagggctacttggattggatcacccaagctgaggacatcgatccggagaatgaggaagaaggaggagaggaaggcaaacgaaatactagcatgcccaccagcgagactgagtctgtgaacacagagaacgtcagcggtgaaggcgagaaccgaggctgctgtggaagtctctgtcaagccatctcaaaatccaaactcagccgacgctggcgtcgctggaaccgattcaatcgcagaagatgtagggccgccgtgaagtctgtcacgttttactggctggttatcgtcctggtgtttctgaacaccttaaccatttcctctgagcactacaatcagccagattggttgacacagattcaagatattgccaacaaagtcctcttggctctgttcacctgcgagatgctggtaaaaatgtacagcttgggcctccaagcatatttcgtctctcttttcaaccggtttgattgcttcgtggtgtgtggtggaatcactgagacgatcttggtggaactggaaatcatgtctcccctggggatctctgtgtttcggtgtgtgcgcctcttaagaatcttcaaagtgaccaggcactggacttccctgagcaacttagtggcatccttattaaactccatgaagtccatcgcttcgctgttgcttctgctttttctcttcattatcatcttttccttgcttgggatgcagctgtttggcggcaagtttaattttgatgaaacgcaaaccaagcggagcacctttgacaatttccctcaagcacttctcacagtgttccagatcctgacaggcgaagactggaatgctgtgatgtacgatggcatcatggcttacgggggcccatcctcttcaggaatgatcgtctgcatctacttcatcatcctcttcatttgtggtaactatattctactgaatgtcttcttggccatcgctgtagacaatttggctgatgctgaaagtctgaacactgctcagaaagaagaagcggaagaaaaggagaggaaaaagattgccagaaaagagagcctagaaaataaaaagaacaacaaaccagaagtcaaccagatagccaacagtgacaacaaggttacaattgatgactatagagaagaggatgaagacaaggacccctatccgccttgcgatgtgccagtaggggaagaggaagaggaagaggaggaggatgaacctgaggttcctgccggaccccgtcctcgaaggatctcggagttgaacatgaaggaaaaaattgcccccatccctgaagggagcgctttcttcattcttagcaagaccaacccgatccgcgtaggctgccacaagctcatcaaccaccacatcttcaccaacctcatccttgtcttcatcatgctgagcagcgctgccctggccgcagaggaccccatccgcagccactccttccggaacacgatactgggttactttgactatgccttcacagccatctttactgttgagatcctgttgaagatgacaacttttggagctttcctccacaaaggggccttctgcaggaactacttcaatttgctggatatgctggtggttggggtgtctctggtgtcatttgggattcaatccagtgccatctccgttgtgaagattctgagggtcttaagggtcctgcgtcccctcagggccatcaacagagcaaaaggacttaagcacgtggtccagtgcgtcttcgtggccatccggaccatcggcaacatcatgatcgtcaccaccctcctgcagttcatgtttgcctgtatcggggtccagttgttcaaggggaagttctatcgctgtacggatgaagccaaaagtaaccctgaagaatgcaggggacttttcatcctctacaaggatggggatgttgacagtcctgtggtccgtgaacggatctggcaaaacagtgatttcaacttcgacaacgtcctctctgctatgatggcgctcttcacagtctccacgtttgagggctggcctgcgttgctgtataaagccatcgactcgaatggagagaacatcggcccaatctacaaccaccgcgtggagatctccatcttcttcatcatctacatcatcattgtagctttcttcatgatgaacatctttgtgggctttgtcatcgttacatttcaggaacaaggagaaaaagagtataagaactgtgagctggacaaaaatcagcgtcagtgtgttgaatacgccttgaaagcacgtcccttgcggagatacatccccaaaaacccctaccagtacaagttctggtacgtggtgaactcttcgcctttcgaatacatgatgtttgtcctcatcatgctcaacacactctgcttggccatgcagcactacgagcagtccaagatgttcaatgatgccatggacattctgaacatggtcttcaccggggtgttcaccgtcgagatggttttgaaagtcatcgcatttaagcctaaggggtattttagtgacgcctggaacacgtttgactccctcatcgtaatcggcagcattatagacgtggccctcagcgaagcagacccaactgaaagtgaaaatgtccctgtcccaactgctacacctgggaactctgaagagagcaatagaatctccatcacctttttccgtcttttccgagtgatgcgattggtgaagcttctcagcaggggggaaggcatccggacattgctgtggacttttattaagtcctttcaggcgctcccgtatgtggccctcctcatagccatgctgttcttcatctatgcggtcattggcatgcagatgtttgggaaagttgccatgagagataacaaccagatcaataggaacaataacttccagacgtttccccaggcggtgctgctgctcttcaggtgtgcaacaggtgaggcctggcaggagatcatgctggcctgtctcccagggaagctctgtgaccctgagtcagattacaaccccggggaggagtatacatgtgggagcaactttgccattgtctatttcatcagtttttacatgctctgtgcatttctgatcatcaatctgtttgtggctgtcatcatggataatttcgactatctgacccgggactggtctattttggggcctcaccatttagatgaattcaaaagaatatggtcagaatatgaccctgaggcaaagggaaggataaaacaccttgatgtggtcactctgcttcgacgcatccagcctcccctggggtttgggaagttatgtccacacagggtagcgtgcaagagattagttgccatgaacatgcctctcaacagtgacgggacagtcatgtttaatgcaaccctgtttgctttggttcgaacggctcttaagatcaagaccgaagggaacctggagcaagctaatgaagaacttcgggctgtgataaagaaaatttggaagaaaaccagcatgaaattacttgaccaagttgtccctccagctggtgatgatgaggtaaccgtggggaagttctatgccactttcctgatacaggactactttaggaaattcaagaaacggaaagaacaaggactggtgggaaagtaccctgcgaagaacaccacaattgccctacaggcgggattaaggacactgcatgacattgggccagaaatccggcgtgctatatcgtgtgatttgcaagatgacgagcctgaggaaacaaaacgagaagaagaagatgatgtgttcaaaagaaatggtgccctgcttggaaaccatgtcaatcatgttaatagtgataggagagattcccttcagcagaccaataccacccaccgtcccctgcatgtccaaaggccttcaattccacctgcaagtgatactgagaaaccgctgtttcctccagcaggaaattcggtgtgtcataaccatcataaccataattccataggaaagcaagttcccacctcaacaaatgccaatctcaataatgccaatatgtccaaagctgcccatggaaagcggcccagcattgggaaccttgagcatgtgtctgaaaatgggcatcattcttcccacaagcatgaccgggagcctcagagaaggtccagtgtgaaaagaacccgctattatgaaacttacattaggtccgactcaggagatgaacagctcccaactatttgccgggaagacccagagatacatggctatttcagggacccccactgcttgggggagcaggagtatttcagtagtgaggaatgctacgaggatgacagctcgcccacctggagcaggcaaaactatggctactacagcagatacccaggcagaaacatcgactctgagaggccccgaggctaccatcatccccaaggattcttggaggacgatgactcgcccgtttgctatgattcacggagatctccaaggagacgcctactacctcccaccccagcatcccaccggagatcctccttcaactttgagtgcctgcgccggcagagcagccaggaagaggtcccgtcgtctcccatcttcccccatcgcacggccctgcctctgcatctaatgcagcaacagatcatggcagttgccggcctagattcaagtaaagcccagaagtactcaccgagtcactcgacccggtcgtgggccacccctccagcaacccctccctaccgggactggacaccgtgctacacccccctgatccaagtggagcagtcagaggccctggaccaggtgaacggcagcctgccgtccctgcaccgcagctcctggtacacagacgagcccgacatctcctaccggactttcacaccagccagcctgactgtccccagcagcttccggaacaaaaacagcgacaagcagaggagtgcggacagcttggtggaggcagtcctgatatccgaaggcttgggacgctatgcaagggacccaaaatttgtgtcagcaacaaaacacgaaatcgctgatgcctgtgacctcaccatcgacgagatggagagtgcagccagcaccctgcttaatgggaacgtgcgtccccgagccaacggggatgtgggccccctctcacaccggcaggactatgagctacaggactttggtcctggctacagcgacgaagagccagaccctgggagggatgaggaggacctggcggatgaaatgatatgcatcaccaccttgtagcccccagcgaggggcagactggctctggcctcaggtggggcgcaggagagccaggggaaaagtgcctcatagttaggaaagtttaggcactagttgggagtaatattcaattaattagacttttgtataagagatgtcatgcctcaagaaagccataaacctggtaggaacaggtcccaagcggttgagcctggcagagtaccatgcgctcggccccagctgcaggaaacagcaggccccgccctctcacagaggatgggtgaggaggccagacctgccctgccccattgtccagatgggcactgctgtggagtctgcttctcccatgtaccagggcaccaggcccacccaactgaaggcatggcggcggggtgcaggggaaagttaaaggtgatgacgatcatcacacctgtgtcgttacctcagccatcggtctagcatatcagtcactgggcccaacatatccatttttaaaccctttcccccaaatacactgcgtcctggttcctgtttagctgttctgaaatacggtgtgtaagtaagtcagaacccagctaccagtgattattgcgagggcaatgggacctcataaataaggttttctgtgatgtgacgccagtttacataagagaatatcactccgatggtcggtttctgactgtcacgctaagggcaactgtaaactggaataataatgcactcgcaaccaggtaaacttagatacactagtttgtttaaaattatagatttactgtacatgacttgtaatatactataatttgtatttgtaaagagatggtctatattttgtaattactgtattgtatttgaactgcagcaatatccatgggtcctaataattgtagttccccactaaaatctagaaattattagtatttttactcgggctatccagaagtagaagaaatagagccaattctcatttattcagcgaaaatcctctggggttaaaattttaagtttgaaagaacttgacactacagaaatttttctaaaatattttgagtcactataaacctatcatctttccacaagatataccagatgactatttgcagtcttttctttgggcaagagttccatgattttgatactgtacctttggatccaccatgggttgcaactgtctttggttttgtttgtttgacttgaaccaccctctggtaagtaagta

SEQ ID NO: 9322 - protein, 2161 aa, Homo sapiens; identical to SEQ ID NO: 9320

SEQ ID NO: 9323 - DNA, 7720 bp, Homo sapiens
agaataagggcagggaccgcggctcctacctcttggtgatccccttccccattccgcccccgcctcaacgcccagcacagtgccctgcacacagtagtcgctcaataaatgttcgtggatgatgatgatgatgatgatgaaaaaaatgcagcatcaacggcagcagcaagcggaccacgcgaacgaggcaaactatgcaagaggcaccagacttcctctttctggtgaaggaccaacttctcagccgaatagctccaagcaaactgtcctgtcttggcaagctgcaatcgatgctgctagacaggccaaggctgcccaaactatgagcacctctgcacccccacctgtaggatctctctcccaaagaaaacgtcagcaatacgccaagagcaaaaaacagggtaactcgtccaacagccgacctgcccgcgcccttttctgtttatcactcaataaccccatccgaagagcctgcattagtatagtggaatggaaaccatttgacatatttatattattggctatttttgccaattgtgtggccttagctatttacatcccattccctgaagatgattctaattcaacaaatcataacttggaaaaagtagaatatgccttcctgattatttttacagtcgagacatttttgaagattatagcgtatggattattgctacatcctaatgcttatgttaggaatggatggaatttactggattttgttatagtaatagtaggattgtttagtgtaattttggaacaattaaccaaagaaacagaaggcgggaaccactcaagcggcaaatctggaggctttgatgtcaaagccctccgtgcctttcgagtgttgcgaccacttcgactagtgtcaggagtgcccagtttacaagttgtcctgaactccattataaaagccatggttcccctccttcacatagcccttttggtattatttgtaatcataatctatgctattataggattggaactttttattggaaaaatgcacaaaacatgtttttttgctgactcagatatcgtagctgaagaggacccagctccatgtgcgttctcagggaatggacgccagtgtactgccaatggcacggaatgtaggagtggctgggttggcccgaacggaggcatcaccaactttgataactttgcctttgccatgcttactgtgtttcagtgcatcaccatggagggctggacagatgtgctctactgggtaaatgatgcgataggatgggaatggccatgggtgtattttgttagtctgatcatccttggctcatttttcgtccttaacctggttcttggtgtccttagtggagaattctcaaaggaaagagagaaggcaaaagcacggggagatttccagaagctccgggagaagcagcagctggaggaggatctaaagggctacttggattggatcacccaagctgaggacatcgatccggagaatgaggaagaaggaggagaggaaggcaaacgaaatactagcatgcccaccagcgagactgagtctgtgaacacagagaacgtcagcggtgaaggcgagaaccgaggctgctgtggaagtctctggtgctggtggagacggagaggcgcggccaaggcggggccctctgggtgtcggcggtggggtcaagccatctcaaaatccaaactcagccgacgctggcgtcgctggaaccgattcaatcgcagaagatgtagggccgccgtgaagtctgtcacgttttactggctggttatcgtcctggtgtttctgaacaccttaaccatttcctctgagcactacaatcagccagattggttgacacagattcaagatattgccaacaaagtcctcttggctctgttcacctgcgagatgctggtaaaaatgtacagcttgggcctccaagcatatttcgtctctcttttcaaccggtttgattgcttcgtggtgtgtggtggaatcactgagacgatcttggtggaactggaaatcatgtctcccctggggatctctgtgtttcggtgtgtgcgcctcttaagaatcttcaaagtgaccaggcactggacttccctgagcaacttagtggcatccttattaaactccatgaagtccatcgcttcgctgttgcttctgctttttctcttcattatcatcttttccttgcttgggatgcagctgtttggcggcaagtttaattttgatgaaacgcaaaccaagcggagcacctttgacaatttccctcaagcacttctcacagtgttccagatcctgacaggcgaagactggaatgctgtgatgtacgatggcatcatggcttacgggggcccatcctcttcaggaatgatcgtctgcatctacttcatcatcctcttcatttgtggtaactatattctactgaatgtcttcttggccatcgctgtagacaatttggctgatgctgaaagtctgaacactgctcagaaagaagaagcggaagaaaaggagaggaaaaagattgccagaaaagagagcctagaaaataaaaagaacaacaaaccagaagtcaaccagatagccaacagtgacaacaaggttacaattgatgactatagagaagaggatgaagacaaggacccctatccgccttgcgatgtgccagtaggggaagaggaagaggaagaggaggaggatgaacctgaggttcctgccggaccccgtcctcgaaggatctcggagttgaacatgaaggaaaaaattgcccccatccctgaagggagcgctttcttcattcttagcaagaccaacccgatccgcgtaggctgccacaagctcatcaaccaccacatcttcaccaacctcatccttgtcttcatcatgctgagcagcgctgccctggccgcagaggaccccatccgcagccactccttccggaacacgatactgggttactttgactatgccttcacagccatctttactgttgagatcctgttgaagatgacaacttttggagctttcctccacaaaggggccttctgcaggaactacttcaatttgctggatatgctggtggttggggtgtctctggtgtcatttgggattcaatccagtgccatctccgttgtgaagattctgagggtcttaagggtcctgcgtcccctcagggccatcaacagagcaaaaggacttaagcacgtggtccagtgcgtcttcgtggccatccggaccatcggcaacatcatgatcgtcaccaccctcctgcagttcatgtttgcctgtatcggggtccagttgttcaaggggaagttctatcgctgtacggatgaagccaaaagtaaccctgaagaatgcaggggacttttcatcctctacaaggatggggatgttgacagtcctgtggtccgtgaacggatctggcaaaacagtgatttcaacttcgacaacgtcctctctgctatgatggcgctcttcacagtctccacgtttgagggctggcctgcgttgctgtataaagccatcgactcgaatggagagaacatcggcccaatctacaaccaccgcgtggagatctccatcttcttcatcatctacatcatcattgtagctttcttcatgatgaacatctttgtgggctttgtcatcgttacatttcaggaacaaggagaaaaagagtataagaactgtgagctggacaaaaatcagcgtcagtgtgttgaatacgccttgaaagcacgtcccttgcggagatacatccccaaaaacccctaccagtacaagttctggtacgtggtgaactcttcgcctttcgaatacatgatgtttgtcctcatcatgctcaacacactctgcttggccatgcagcactacgagcagtccaagatgttcaatgatgccatggacattctgaacatggtcttcaccggggtgttcaccgtcgagatggttttgaaagtcatcgcatttaagcctaaggggtattttagtgacgcctggaacacgtttgactccctcatcgtaatcggcagcattatagacgtggccctcagcgaagcagacccaactgaaagtgaaaatgtccctgtcccaactgctacacctgggaactctgaagagagcaatagaatctccatcacctttttccgtcttttccgagtgatgcgattggtgaagcttctcagcaggggggaaggcatccggacattgctgtggacttttattaagtcctttcaggcgctcccgtatgtggccctcctcatagccatgctgttcttcatctatgcggtcattggcatgcagatgtttgggaaagttgccatgagagataacaaccagatcaataggaacaataacttccagacgtttccccaggcggtgctgctgctcttcaggtgtgcaacaggtgaggcctggcaggagatcatgctggcctgtctcccagggaagctctgtgaccctgagtcagattacaaccccggggaggagtatacatgtgggagcaactttgccattgtctatttcatcagtttttacatgctctgtgcatttctgatcatcaatctgtttgtggctgtcatcatggataatttcgactatctgacccgggactggtctattttggggcctcaccatttagatgaattcaaaagaatatggtcagaatatgaccctgaggcaaagggaaggataaaacaccttgatgtggtcactctgcttcgacgcatccagcctcccctggggtttgggaagttatgtccacacagggtagcgtgcaagagattagttgccatgaacatgcctctcaacagtgacgggacagtcatgtttaatgcaaccctgtttgctttggttcgaacggctcttaagatcaagaccgaagggaacctggagcaagctaatgaagaacttcgggctgtgataaagaaaatttggaagaaaaccagcatgaaattacttgaccaagttgtccctccagctggtgatgatgaggtaaccgtggggaagttctatgccactttcctgatacaggactactttaggaaattcaagaaacggaaagaacaaggactggtgggaaagtaccctgcgaagaacaccacaattgccctacaggcgggattaaggacactgcatgacattgggccagaaatccggcgtgctatatcgtgtgatttgcaagatgacgagcctgaggaaacaaaacgagaagaagaagatgatgtgttcaaaagaaatggtgccctgcttggaaaccatgtcaatcatgttaatagtgataggagagattcccttcagcagaccaataccacccaccgtcccctgcatgtccaaaggccttcaattccacctgcaagtgatactgagaaaccgctgtttcctccagcaggaaattcggtgtgtcataaccatcataaccataattccataggaaagcaagttcccacctcaacaaatgccaatctcaataatgccaatatgtccaaagctgcccatggaaagcggcccagcattgggaaccttgagcatgtgtctgaaaatgggcatcattcttcccacaagcatgaccgggagcctcagagaaggtccagtgtgaaaagaacccgctattatgaaacttacattaggtccgactcaggagatgaacagctcccaactatttgccgggaagacccagagatacatggctatttcagggacccccactgcttgggggagcaggagtatttcagtagtgaggaatgctacgaggatgacagctcgcccacctggagcaggcaaaactatggctactacagcagatacccaggcagaaacatcgactctgagaggccccgaggctaccatcatccccaaggattcttggaggacgatgactcgcccgtttgctatgattcacggagatctccaaggagacgcctactacctcccaccccagcatcccaccggagatcctccttcaactttgagtgcctgcgccggcagagcagccaggaagaggtcccgtcgtctcccatcttcccccatcgcacggccctgcctctgcatctaatgcagcaacagatcatggcagttgccggcctagattcaagtaaagcccagaagtactcaccgagtcactcgacccggtcgtgggccacccctccagcaacccctccctaccgggactggacaccgtgctacacccccctgatccaagtggagcagtcagaggccctggaccaggtgaacggcagcctgccgtccctgcaccgcagctcctggtacacagacgagcccgacatctcctaccggactttcacaccagccagcctgactgtccccagcagcttccggaacaaaaacagcgacaagcagaggagtgcggacagcttggtggaggcagtcctgatatccgaaggcttgggacgctatgcaagggacccaaaatttgtgtcagcaacaaaacacgaaatcgctgatgcctgtgacctcaccatcgacgagatggagagtgcagccagcaccctgcttaatgggaacgtgcgtccccgagccaacggggatgtgggccccctctcacaccggcaggactatgagctacaggactttggtcctggctacagcgacgaagagccagaccctgggagggatgaggaggacctggcggatgaaatgatatgcatcaccaccttgtagcccccagcgaggggcagactggctctggcctcaggtggggcgcaggagagccaggggaaaagtgcctcatagttaggaaagtttaggcactagttgggagtaatattcaattaattagacttttgtataagagatgtcatgcctcaagaaagccataaacctggtaggaacaggtcccaagcggttgagcctggcagagtaccatgcgctcggccccagctgcaggaaacagcaggccccgccctctcacagaggatgggtgaggaggccagacctgccctgccccattgtccagatgggcactgctgtggagtctgcttctcccatgtaccagggcaccaggcccacccaactgaaggcatggcggcggggtgcaggggaaagttaaaggtgatgacgatcatcacacctgtgtcgttacctcagccatcggtctagcatatcagtcactgggcccaacatatccatttttaaaccctttcccccaaatacactgcgtcctggttcctgtttagctgttctgaaatacggtgtgtaagtaagtcagaacccagctaccagtgattattgcgagggcaatgggacctcataaataaggttttctgtgatgtgacgccagtttacataagagaatatcactccgatggtcggtttctgactgtcacgctaagggcaactgtaaactggaataataatgcactcgcaaccaggtaaacttagatacactagtttgtttaaaattatagatttactgtacatgacttgtaatatactataatttgtatttgtaaagagatggtctatattttgtaattactgtattgtatttgaactgcagcaatatccatgggtcctaataattgtagttccccactaaaatctagaaattattagtatttttactcgggctatccagaagtagaagaaatagagccaattctcatttattcagcgaaaatcctctggggttaaaattttaagtttgaaagaacttgacactacagaaatttttctaaaatattttgagtcactataaacctatcatctttccacaag

SEQ ID NO: 9324 - protein, 2181 aa, Homo sapiens; identical to SEQ ID NO: 782

SEQ ID NO: 9325 - DNA, 8192 bp, Homo sapiens
agaataagggcagggaccgcggctcctacctcttggtgatccccttccccattccgcccccgcctcaacgcccagcacagtgccctgcacacagtagtcgctcaataaatgttcgtggatgatgatgatgatgatgatgaaaaaaatgcagcatcaacggcagcagcaagcggaccacgcgaacgaggcaaactatgcaagaggcaccagacttcctctttctggtgaaggaccaacttctcagccgaatagctccaagcaaactgtcctgtcttggcaagctgcaatcgatgctgctagacaggccaaggctgcccaaactatgagcacctctgcacccccacctgtaggatctctctcccaaagaaaacgtcagcaatacgccaagagcaaaaaacagggtaactcgtccaacagccgacctgcccgcgcccttttctgtttatcactcaataaccccatccgaagagcctgcattagtatagtggaatggaaaccatttgacatatttatattattggctatttttgccaattgtgtggccttagctatttacatcccattccctgaagatgattctaattcaacaaatcataacttggaaaaagtagaatatgccttcctgattatttttacagtcgagacatttttgaagattatagcgtatggattattgctacatcctaatgcttatgttaggaatggatggaatttactggattttgttatagtaatagtaggattgtttagtgtaattttggaacaattaaccaaagaaacagaaggcgggaaccactcaagcggcaaatctggaggctttgatgtcaaagccctccgtgcctttcgagtgttgcgaccacttcgactagtgtcaggagtgcccagtttacaagttgtcctgaactccattataaaagccatggttcccctccttcacatagcccttttggtattatttgtaatcataatctatgctattataggattggaactttttattggaaaaatgcacaaaacatgtttttttgctgactcagatatcgtagctgaagaggacccagctccatgtgcgttctcagggaatggacgccagtgtactgccaatggcacggaatgtaggagtggctgggttggcccgaacggaggcatcaccaactttgataactttgcctttgccatgcttactgtgtttcagtgcatcaccatggagggctggacagatgtgctctactgggtaaatgatgcgataggatgggaatggccatgggtgtattttgttagtctgatcatccttggctcatttttcgtccttaacctggttcttggtgtccttagtggagaattctcaaaggaaagagagaaggcaaaagcacggggagatttccagaagctccgggagaagcagcagctggaggaggatctaaagggctacttggattggatcacccaagctgaggacatcgatccggagaatgaggaagaaggaggagaggaaggcaaacgaaatactagcatgcccaccagcgagactgagtctgtgaacacagagaacgtcagcggtgaaggcgagaaccgaggctgctgtggaagtctctggtgctggtggagacggagaggcgcggccaaggcggggccctctgggtgtcggcggtggggtcaagccatctcaaaatccaaactcagccgacgctggcgtcgctggaaccgattcaatcgcagaagatgtagggccgccgtgaagtctgtcacgttttactggctggttatcgtcctggtgtttctgaacaccttaaccatttcctctgagcactacaatcagccagattggttgacacagattcaagatattgccaacaaagtcctcttggctctgttcacctgcgagatgctggtaaaaatgtacagcttgggcctccaagcatatttcgtctctcttttcaaccggtttgattgcttcgtggtgtgtggtggaatcactgagacgatcttggtggaactggaaatcatgtctcccctggggatctctgtgtttcggtgtgtgcgcctcttaagaatcttcaaagtgaccaggcactggacttccctgagcaacttagtggcatccttattaaactccatgaagtccatcgcttcgctgttgcttctgctttttctcttcattatcatcttttccttgcttgggatgcagctgtttggcggcaagtttaattttgatgaaacgcaaaccaagcggagcacctttgacaatttccctcaagcacttctcacagtgttccagatcctgacaggcgaagactggaatgctgtgatgtacgatggcatcatggcttacgggggcccatcctcttcaggaatgatcgtctgcatctacttcatcatcctcttcatttgtggtaactatattctactgaatgtcttcttggccatcgctgtagacaatttggctgatgctgaaagtctgaacactgctcagaaagaagaagcggaagaaaaggagaggaaaaagattgccagaaaagagagcctagaaaataaaaagaacaacaaaccagaagtcaaccagatagccaacagtgacaacaaggttacaattgatgactatagagaagaggatgaagacaaggacccctatccgccttgcgatgtgccagtaggggaagaggaagaggaagaggaggaggatgaacctgaggttcctgccggaccccgtcctcgaaggatctcggagttgaacatgaaggaaaaaattgcccccatccctgaagggagcgctttcttcattcttagcaagaccaacccgatccgcgtaggctgccacaagctcatcaaccaccacatcttcaccaacctcatccttgtcttcatcatgctgagcagcgctgccctggccgcagaggaccccatccgcagccactccttccggaacacgatactgggttactttgactatgccttcacagccatctttactgttgagatcctgttgaagatgacaacttttggagctttcctccacaaaggggccttctgcaggaactacttcaatttgctggatatgctggtggttggggtgtctctggtgtcatttgggattcaatccagtgccatctccgttgtgaagattctgagggtcttaagggtcctgcgtcccctcagggccatcaacagagcaaaaggacttaagcacgtggtccagtgcgtcttcgtggccatccggaccatcggcaacatcatgatcgtcaccaccctcctgcagttcatgtttgcctgtatcggggtccagttgttcaaggggaagttctatcgctgtacggatgaagccaaaagtaaccctgaagaatgcaggggacttttcatcctctacaaggatggggatgttgacagtcctgtggtccgtgaacggatctggcaaaacagtgatttcaacttcgacaacgtcctctctgctatgatggcgctcttcacagtctccacgtttgagggctggcctgcgttgctgtataaagccatcgactcgaatggagagaacatcggcccaatctacaaccaccgcgtggagatctccatcttcttcatcatctacatcatcattgtagctttcttcatgatgaacatctttgtgggctttgtcatcgttacatttcaggaacaaggagaaaaagagtataagaactgtgagctggacaaaaatcagcgtcagtgtgttgaatacgccttgaaagcacgtcccttgcggagatacatccccaaaaacccctaccagtacaagttctggtacgtggtgaactcttcgcctttcgaatacatgatgtttgtcctcatcatgctcaacacactctgcttggccatgcagcactacgagcagtccaagatgttcaatgatgccatggacattctgaacatggtcttcaccggggtgttcaccgtcgagatggttttgaaagtcatcgcatttaagcctaaggggtattttagtgacgcctggaacacgtttgactccctcatcgtaatcggcagcattatagacgtggccctcagcgaagcagacccaactgaaagtgaaaatgtccctgtcccaactgctacacctgggaactctgaagagagcaatagaatctccatcacctttttccgtcttttccgagtgatgcgattggtgaagcttctcagcaggggggaaggcatccggacattgctgtggacttttattaagtcctttcaggcgctcccgtatgtggccctcctcatagccatgctgttcttcatctatgcggtcattggcatgcagatgtttgggaaagttgccatgagagataacaaccagatcaataggaacaataacttccagacgtttccccaggcggtgctgctgctcttcaggtgtgcaacaggtgaggcctggcaggagatcatgctggcctgtctcccagggaagctctgtgaccctgagtcagattacaaccccggggaggagtatacatgtgggagcaactttgccattgtctatttcatcagtttttacatgctctgtgcatttctgatcatcaatctgtttgtggctgtcatcatggataatttcgactatctgacccgggactggtctattttggggcctcaccatttagatgaattcaaaagaatatggtcagaatatgaccctgaggcaaagggaaggataaaacaccttgatgtggtcactctgcttcgacgcatccagcctcccctggggtttgggaagttatgtccacacagggtagcgtgcaagagattagttgccatgaacatgcctctcaacagtgacgggacagtcatgtttaatgcaaccctgtttgctttggttcgaacggctcttaagatcaagaccgaagggaacctggagcaagctaatgaagaacttcgggctgtgataaagaaaatttggaagaaaaccagcatgaaattacttgaccaagttgtccctccagctggtgatgatgaggtaaccgtggggaagttctatgccactttcctgatacaggactactttaggaaattcaagaaacggaaagaacaaggactggtgggaaagtaccctgcgaagaacaccacaattgccctacaggcgggattaaggacactgcatgacattgggccagaaatccggcgtgctatatcgtgtgatttgcaagatgacgagcctgaggaaacaaaacgagaagaagaagatgatgtgttcaaaagaaatggtgccctgcttggaaaccatgtcaatcatgttaatagtgataggagagattcccttcagcagaccaataccacccaccgtcccctgcatgtccaaaggccttcaattccacctgcaagtgatactgagaaaccgctgtttcctccagcaggaaattcggtgtgtcataaccatcataaccataattccataggaaagcaagttcccacctcaacaaatgccaatctcaataatgccaatatgtccaaagctgcccatggaaagcggcccagcattgggaaccttgagcatgtgtctgaaaatgggcatcattcttcccacaagcatgaccgggagcctcagagaaggtccagtgtgaaaagaacccgctattatgaaacttacattaggtccgactcaggagatgaacagctcccaactatttgccgggaagacccagagatacatggctatttcagggacccccactgcttgggggagcaggagtatttcagtagtgaggaatgctacgaggatgacagctcgcccacctggagcaggcaaaactatggctactacagcagatacccaggcagaaacatcgactctgagaggccccgaggctaccatcatccccaaggattcttggaggacgatgactcgcccgtttgctatgattcacggagatctccaaggagacgcctactacctcccaccccagcatcccaccggagatcctccttcaactttgagtgcctgcgccggcagagcagccaggaagaggtcccgtcgtctcccatcttcccccatcgcacggccctgcctctgcatctaatgcagcaacagatcatggcagttgccggcctagattcaagtaaagcccagaagtactcaccgagtcactcgacccggtcgtgggccacccctccagcaacccctccctaccgggactggacaccgtgctacacccccctgatccaagtggagcagtcagaggccctggaccaggtgaacggcagcctgccgtccctgcaccgcagctcctggtacacagacgagcccgacatctcctaccggactttcacaccagccagcctgactgtccccagcagcttccggaacaaaaacagcgacaagcagaggagtgcggacagcttggtggaggcagtcctgatatccgaaggcttgggacgctatgcaagggacccaaaatttgtgtcagcaacaaaacacgaaatcgctgatgcctgtgacctcaccatcgacgagatggagagtgcagccagcaccctgcttaatgggaacgtgcgtccccgagccaacggggatgtgggccccctctcacaccggcaggactatgagctacaggactttggtcctggctacagcgacgaagagccagaccctgggagggatgaggaggacctggcggatgaaatgatatgcatcaccaccttgtagcccccagcgaggggcagactggctctggcctcaggtggggcgcaggagagccaggggaaaagtgcctcatagttaggaaagtttaggcactagttgggagtaatattcaattaattagacttttgtataagagatgtcatgcctcaagaaagccataaacctggtaggaacaggtcccaagcggttgagcctggcagagtaccatgcgctcggccccagctgcaggaaacagcaggccccgccctctcacagaggatgggtgaggaggccagacctgccctgccccattgtccagatgggcactgctgtggagtctgcttctcccatgtaccagggcaccaggcccacccaactgaaggcatggcggcggggtgcaggggaaagttaaaggtgatgacgatcatcacacctgtgtcgttacctcagccatcggtctagcatatcagtcactgggcccaacatatccatttttaaaccctttcccccaaatacactgcgtcctggttcctgtttagctgttctgaaatacggtgtgtaagtaagtcagaacccagctaccagtgattattgcgagggcaatgggacctcataaataaggttttctgtgatgtgacgccagtttacataagagaatatcactccgatggtcggtttctgactgtcacgctaagggcaactgtaaactggaataataatgcactcgcaaccaggtaaacttagatacactagtttgtttaaaattatagatttactgtacatgacttgtaatatactataatttgtatttgtaaagagatggtctatattttgtaattactgtattgtatttgaactgcagcaatatccatgggtcctaataattgtagttccccactaaaatctagaaattattagtatttttactcgggctatccagaagtagaagaaatagagccaattctcatttattcagcgaaaatcctctggggttaaaattttaagtttgaaagaacttgacactacagaaatttttctaaaatattttgagtcactataaacctatcatctttccacaagatataccagatgactatttgcagtcttttctttgggcaagagttccatgattttgatactgtacctttggatccaccatgggttgcaactgtctttggttttgtttgtttgacttgaaccaccctctggtaagtaagtaagtgaattacagagcaggtccagctggctgctctgccccttgggtatccatagttacggttttctctgtggcccacccagggtgttttttgcatcgctggtgcagaaatgcataggtggatgagatatagctgctcttgtcctctggggactggtggtgctgcttaagaaataaggggtgctggggacagaggagcaacgtggtgatctataggattggagtgtcggggtctgtacaaatcgtattgttgccttttacaaaactgctgtactgtatgttctctttgagggcttttatatgcaattgaatgagggctgaagttttcattagaat

SEQ ID NO: 9326 - protein, 2181 aa, Homo sapiens; identical to SEQ ID NO: 782

SEQ ID NO: 9327 - DNA, 2380 bp, Homo sapiens
ggcatgggcagtggcagaattggccctggtagagagcagagctgatgccatccttttggcaaatagctgacattttatggtgtggtgctgggtgagccccctgtgaggggtgaacagatgtggacaggacttgggtccaggcactagagaaatggtgcagcctgtaagaatgccagtttgtaagtactgactttggaaaagatcatcgcctctatcagacacttagggtcctggtctggcaattttggcctgatgtgatgccacaagacccaacagagagagacacagagtccaggataatgttgacagtggtgtagccctttaggagaaatggcgctccctgcggctggtattaggttaccattggcaccgaaggaaccaggaggataagaatatccataatttcagagctgccctggcacagtacctgccctgtcggaggctctcactggcaaatgacagctctgtgcaaggagcactcccaagtataaaaattattacacagttttattctgaagaacattttgcattttaataaaaaaggatttatgtcaggaaagagtcatttacaaaccttgaagtgtttttgcctggatcagagtaagaatgtcttaagaagaggtttgtaaggtcttcataacaaagtggtgtttgttatttacaaaaaaaaaaaaaaaaaaaaaaattaacaggttgtctgtatactattaaaaattttggaccaaaattgctacctatcatctatctttttgattgcagggaatccctgccaaggtaacctgacagtcggcctaattctgttgacagaaaatgaagccttgacggttctaattatccaaaagtgggttttcatcaggacgtacagtcagagtgtgagtgcattctaatgaaaacttcagccctcattcaattgcatataaaagccctcaaagagaacatacagtacagcagttttgtaaaaggcaacaatacgatttgtacagaccccgacactccaatcctatagatcaccacgttgctcctctgtccccagcaccccttatttcttaagcagcaccaccagtccccagaggacaagagcagctatatctcatccacctatgcatttctgcaccagcgatgcaaaaaacaccctgggtgggccacagagaaaaccgtaactatggatacccaaggggcagagcagccagctggacctgctctgtaattcacttacttacttaccagagggtggttcaagtcaaacaaacaaaaccaaagacagttgcaacccatggtggatccaaaggtacagtatcaaaatcatggaactcttgcccaaagaaaagactgcaaatagtcatctggtatatcttgtggaaagatgataggtttatagtgactcaaaatattttagaaaaatttctgtagtgtcaagttctttcaaacttaaaattttaaccccagaggattttcgctgaataaatgagaattggctctatttcttctacttctggatagcccgagtaaaaatactaataatttctagattttagtggggaactacaattattaggacccatggatattgctgcagttcaaatacaatacagtaattacaaaatatagaccatctctttacaaatacaaattatagtatattacaagtcatgtacagtaaatctataattttaaacaaactagtgtatctaagtttacctggttgcgagtgcattattattccagtttacagttgcccttagcgtgacagtcagaaaccgaccatcggagtgatattctcttatgtaaactggcgtcacatcacagaaaaccttatttatgaggtcccattgccctcgcaataatcactggtagctgggttctgacttacttacacaccgtatttcagaacagctaaacaggaaccaggacgcagtgtatttgggggaaagggtttaaaaatggatatgttgggcccagtgactgatatgctagaccgatggctgaggtaacgacacaggtgtgatgatcgtcatcacctttaactttcccctgcaccccgccgccatgccttcagttgggtgggcctggtgccctggtacatgggagaagcagactccacagcagtgcccatctggacaatggggcagggcaggtctggcctcctcacccatcctctgtgagagggcggggcctgctgtttcctgcagctggggccgagcgcatggtactctgccaggctcaaccgcttgggacctgttcctaccaggtttatggctttcttgaggcatgacatctcttatacaaaagtctaattaattgaatattactcccaactagtgcctaaactttcctaactatgaggcacttttcccctggctctcctgcgccccacctgagg

SEQ ID NO: 9328 - protein, 96 aa, Homo sapiens
MQKTPWVGHRENRNYGYPRGRAASWTCSVIHLLTYQRVVQVKQTKPKTVATHGGSKGTVSKSWNSCPKKRLQIVIWYILWKDDRFIVTQNILEKFL

SEQ ID NO: 9329 - DNA, 854 bp, Homo sapiens
ttgctcctctgtccccagcaccccttatttcttaagcagcaccaccagtccccagaggacaagagcagctatatctcatccacctatgcatttctgcaccagcgatgcaaaaaacaccctgggtgggccacagagaaaaccgtaactatggatacccaaggggcagagcagccagctggacctgctctgtaattcacttacttacttaccagagggtggttcaagtcaaacaaacaaaaccaaagacagttgcaacccatggtggatccaaaggtacagtatcaaaatcatggaactcttgcccaaagaaaagactgcaaatagtcatctggtatatcttgtggaaagatgataggtttatagtgactcaaaatattttagaaaaatttctgtagtgtcaagttctttcaaacttaaaattttaaccccagaggattttcgctgaataaatgagaattggctctatttcttctacttctggatagcccgagtaaaaatactaataatttctagattttagtggggaactacaattattaggacccatggatattgctgcagttcaaatacaatacagtaattacaaaatatagaccatctctttacaaatacaaattatagtatattacaagtcatgtacagtaaatctataattttaaacaaactagtgtatctaagtttacctggttgcgagtgcattattattccagtttacagttgcccttagcgtgacagtcagaaaccgaccatcggagtgatattctcttatgtaaactggcgtcacatcacagaaaaccttattgtatttgggggaaagggtttaaaaatggatatgttgggcccagtgactgata

SEQ ID NO: 9330 - protein, 96 aa, Homo sapiens; identical to SEQ ID NO: 9328

SEQ ID NO: 9331 - DNA, 723 bp, Homo sapiens
ggcatgggcagtggcagaattggccctggtagagagcagagctgatgccatccttttggcaaatagctgacattttatggtgtggtgctgggtgagccccctgtgaggggtgaacagatgtggacaggacttgggtccaggcactagagaaatggtgcagcctgtaagaatgccagtttgtaagtactgactttggaaaagatcatcgcctctatcagacacttagggtcctggtctggcaattttggcctgatgtgatgccacaagacccaacagagagagacacagagtccaggataatgttgacagtggtgtagccctttaggagaaatggcgctccctgcggctggtattaggttaccattggcaccgaaggaaccaggaggataagaatatccataatttcagagctgccctggcacagtacctgccctgtcggaggctctcactggcaaatgacagctctgtgcaaggagcactcccaagtataaaaattattacacagttttattctgaagaacattttgcattttaataaaaaaggatttatgtcaggaaagagtcatttacaaaccttgaagtgtttttgcctggatcagagtaagaatgtcttaagaagaggtttgtaaggtcttcataacaaagtggtgtttgttatttacaaaaaaaaaaaaaaaaaaaaaaattaacaggttgtctgtatactattaaaaattttggacc

SEQ ID NO: 9332 - protein, 69 aa, Homo sapiens
EKWRSLRLVLGYHWHRRNQEDKNIHNFRAALAQYLPCRRLSLANDSSVQGALPSIKIITQFYSEEHFAF

SEQ ID NO: 9333 - DNA, 1112 bp, Homo sapiens
aagccctggctccgttccgagggaaagagctccagccaggaagccacattcagtcagataaagagatagatgcctttgtgcgggcaaaagccgacagcgcctaccacccctcgtgcacctgtaagatgggccagccctccgatcccactgccgtggtggatccgcagacaagggtcctcggggtggaaaacctcagggtcgtcgatgcctccatcatgcctagcatggtcagcggcaacctgaacgcccccacaatcatgatcgcagagaaggcagctgacattatcaaggggcagcctgcactctgggacaaagatgtccctgtctacaagcccaggacgctggccacccagcgctaagacagttgctgctggaggatgaccagggaagccccctgataagccaagagggccagcacagcccttgctcccaggctcctgcctgaaactatctagcacactaggacccaggtggtaccctactcagtggctgagaattggataaagtcttgggaaatgagacaagtactgggcagtgaatccagctccttttccccagcctttccctgtgggccatttggggaaggccagcattcagcctgagatgttcctccctgcctcctggagggacagaaggggaggatggttaactcctgccgcatcctttttcttgtgttcacgtggcattctctaacccagggcagtggttccttcccaggccatgcacagaggctgggtgcctgccagacccacggagggttcgcgaaggaaggggcatcctccttcttgagctgcaagctttagctgaggcagtaagtcacacagtagttagttcagcctgggctggcacataagtccccagtgtccctgttgagaggggaaagttgcctgctggttgaaaaactggcttttcctttctcgctgcctaatttcactctcagagtgaggcaggtaactggggctccactgggtcactctgagagggttgtggctctggttcttattaaaccagggccaggtgcagggctcacacctgtaatcccagcactttgggaaggtcacctgatggcaccactgcactccagcctgggtgacagggtgagaccctgtctc

SEQ ID NO: 9334 - protein, 77 aa, Homo sapiens [sequence omitted]

SEQ ID NO: 9335 - DNA, 2388 bp, Homo sapiens
gccgtgtccgagcgctggcggagcacgggccgccgcggcgcgcgcctacccccgcgcacacgtgcatgcagtgagccaggtgcatcagctgcacccgccctcgggcttcgcgcgcctccgctggagcccagctagcctcgcggctccggggccgaccgggtcggaactgctgcgtccccattccggacgcagagagcgcgcggggcgccggcgccgccggttaaagtgccgcggggcaggggccgggccgcggccacccgctcctcccgctccggtcccgactgtcgggctctcggccgagtcgccccggacaatcacaaagagtgtgtaggccagccccggtcacagagtgcaccgtatcctgtcacttctggatgtgagggagaagtgagtcatctcattcccctccgtggatcagaggacttggactagatagaagcatgtggtgtctcctacgaggcctgggccggcctggagccctggcacggggagccctggggcagcagcaatccctgggtgcccgggccctggccagcgcaggctctgagagccgggacgagtacagctatgtggtggtgggcgcgggctcggcgggctgcgtgctggctgggaggctcacggaggaccccgccgagcgcgtgctgctgctggaggccgggcccaaggacgtgctcgcggggagcaagcggctctcgtggaagatccacatgcccgcggccctggtggccaacctgtgcgacgacaggtacaactggtgctaccacacagaggtgcagcggggcctggacggccgcgtgctgtactggccacgcggccgcgtctggggtggctcctcatccctcaatgccatggtctacgtccgtgggcacgccgaggactacgagcgctggcagcgccagggcgcccgcggctgggactacgcgcactgcctgccctacttccgcaaggcgcagggccacgagctgggcgccagccggtaccggggcgccgatggcccgctgcgggtgtcccggggcaagaccaaccacccgctgcactgcgcattcctggaggccacgcagcaggccggctacccgctcaccgaggacatgaatggcttccagcaggagggcttcggctggatggacatgaccatccatgaaggcaaacggtggagcgcggcctgtgcctacctgcacccagcactgagccgcaccaacctcaaggccgaggccgagacgcttgtgagcagggtgctatttgagggcacccgtgcagtgggcgtggagtatgtcaagaatggccagagccacagggcttatgccagcaaggaggtgattctgagtggaggtgccatcaactctccacagctgctcatgctctctggcatcgggaatgctgatgacctcaagaaactgggcatccctgtggtgtgccacctacctggggttggccagaacctgcaagaccacctggagatctacattcagcaggcatgcacccgccctatcaccctccattcagcacagaagcccctgcggaaggtctgcattggtctggagtggctctggaaattcacaggggagggagccactgcccatctggaaacaggtgggttcatccgcagccagcctggggtcccccacccggacatccagttccatttcctgccatcccaagtgattgaccacgggcgggtccccacccagcaggaggcttaccaggtacatgtggggcccatgcggggcacgagtgtgggctggctcaaactgagaagtgccaatccccaagaccaccctgtgatccagcccaactacttgtcaacagaaactgatattgaggatttccgtctgtgtgtgaagctcaccagagaaatttttgcacaggaagccctggctccgttccgagggaaagagctccagccaggaagccacattcagtcagataaagagatagatgcctttgtgcgggcaaaagccgacagcgcctaccacccctcgtgcacctgtaagatgggccagccctccgatcccactgccgtggtggatccgcagacaagggtcctcggggtggaaaacctcagggtcgtcgatgcctccatcatgcctagcatggtcagcggcaacctgaacgcccccacaatcatgatcgcagagaaggcagctgacattatcaaggggcagcctgcactctgggacaaagatgtccctgtctacaagcccaggacgctggccacccagcgctaagacagttgctgctggaggatgaccagggaagccccctgataagccaagagggccagcacagcccttgctcccaggctcctgcctgaaactatctagcacactaggacccaggtggtaccctactcagtggctgagaattggataaagtcttgggaaatgagac

SEQ ID NO: 9336 - protein, 594 aa, Homo sapiens
MWCLLRGLGRPGALARGALGQQQSLGARALASAGSESRDEYSYVVVGAGSAGCVLAGRLTEDPAERVLLLEAGPKDVLAGSKRLSWKIHMPAALVANLCDDRYNWCYHTEVQRGLDGRVLYWPRGRVWGGSSSLNAMVYVRGHAEDYERWQRQGARGWDYAHCLPYFRKAQGHELGASRYRGADGPLRVSRGKTNHPLHCAFLEATQQAGYPLTEDMNGFQQEGFGWMDMTIHEGKRWSAACAYLHPALSRTNLKAEAETLVSRVLFEGTRAVGVEYVKNGQSHRAYASKEVILSGGAINSPQLLMLSGIGNADDLKKLGIPVVCHLPGVGQNLQDHLEIYIQQACTRPITLHSAQKPLRKVCIGLEWLWKFTGEGATAHLETGGFIRSQPGVPHPDIQFHFLPSQVIDHGRVPTQQEAYQVHVGPMRGTSVGWLKLRSANPQDHPVIQPNYLSTETDIEDFRLCVKLTREIFAQEALAPFRGKELQPGSHIQSDKEIDAFVRAKADSAYHPSCTCKMGQPSDPTAVVDPQTRVLGVENLRVVDASIMPSMVSGNLNAPTIMIAEKAADIIKGQPALWDKDVPVYKPRTLATQR

SEQ ID NO: 9337 - DNA, 518 bp, Homo sapiens
gcttggctgctttcctacagcccagcagagcctcccaggagcacaaccgtctgaatacccagccctgtggtgggctgaggggagtgcagtgcagtggcccagggcatggattgccctcctcaccactgaccacatccatcctgggacttctctgtgccacttactgggacctcaacaggctaatagtgagatgagctgtggaaagcccacatccctggctgagggctccacgcccttgcctcccaccatgtgctgagcttggcctgaggctggcgctgcgtcatgctggccaaggggacacatgcaggggatgaggctgcacgtggcctacagcaaacccaacctgcgcagtctgagatgtggatgctgagctcatacacctgtgccaggaccaacagaaggcaccccctgggaatgttctagatccagacctggtgatggttacccaggcatacacacagatcaaaaccaacatgatggacacttcgtatgtctgttgcacctcaattaaaatgttt

SEQ ID NO: 9338 - protein, 46 aa, Homo sapiens
MLAKGTHAGDEAARGLQQTQPAQSEMWMLSSYTCARTNRRHPLGMF

SEQ ID NO: 9339 - DNA, 2044 bp, Homo sapiens
agcgcagcgtgcgggtggcctggatcccgcgcagtggcccggcgatgtcgctcgtgctgctaagcctggccgcgctgtgcaggagcgccgtaccccgagagccgaccgttcaatgtggctctgaaactgggccatctccagagtggatgctacaacatgatctaatccccggagacttgagggacctccgagtagaacctgttacaactagtgttgcaacaggggactattcaattttgatgaatgtaagctgggtactccgggcagatgccagcatccgcttgttgaaggccaccaagatttgtgtgacgggcaaaagcaacttccagtcctacagctgtgtgaggtgcaattacacagaggccttccagactcagaccagaccctctggtggtaaatggacattttcctacatcggcttccctgtagagctgaacacagtctatttcattggggcccataatattcctaatgcaaatatgaatgaagatggcccttccatgtctgtgaatttcacctcaccaggctgcctagaccacataatgaaatataaaaaaaagtgtgtcaaggccggaagcctgtgggatccgaacatcactgcttgtaagaagaatgaggagacagtagaagtgaacttcacaaccactcccctgggaaacagatacatggctcttatccaacacagcactatcatcgggttttctcaggtgtttgagccacaccagaagaaacaaacgcgagcttcagtggtgattccagtgactggggatagtgaaggtgctacggtgcagctgactccatattttcctacttgtggcagcgactgcatccgacataaaggaacagttgtgctctgcccacaaacaggcgtccctttccctctggataacaacaaaagcaagccgggaggctggctgcctctcctcctgctgtctctgctggtggccacatgggtgctggtggcagggatctatctaatgtggaggcacgaaaggatcaagaagacttccttttctaccaccacactactgccccccattaaggttcttgtggtttacccatctgaaatatgtttccatcacacaatttgttacttcactgaatttcttcaaaaccattgcagaagtgaggtcatccttgaaaagtggcagaaaaagaaaatagcagagatgggtccagtgcagtggcttgccactcaaaagaaggcagcagacaaagtcgtcttccttctttccaatgacgtcaacagtgtgtgcgatggtacctgtggcaagagcgagggcagtcccagtgagaactctcaagacctcttcccccttgcctttaaccttttctgcagtgatctaagaagccagattcatctgcacaaatacgtggtggtctactttagagagattgatacaaaagacgattacaatgctctcagtgtctgccccaagtaccacctcatgaaggatgccactgctttctgtgcagaacttctccatgtcaagcagcaggtgtcagcaggaaaaagatcacaagcctgccacgatggctgctgctccttgtagcccacccatgagaagcaagagaccttaaaggcttcctatcccaccaattacagggaaaaaacgtgtgatgatcctgaagcttactatgcagcctacaaacagccttagtaattaaaacattttataccaataaaattttcaaatattgctaactaatgtagcattaactaacgattggaaactacatttacaacttcaaagctgttttatacatagaaatcaattacagttttaattgaaaactataaccattttgataatgcaacaataaagcatcttcagccaaacatctagtcttccatagaccatgcattgcagtgtacccagaactgtttagctaatattctatgtttaattaatgaatactaactctaagaacccctcactgattcactcaatagcatcttaagtgaaaaaccttctattacatgcaaaaaatcattgtttttaagataacaaaagtagggaataaacaagctgaacccactttt

SEQ ID NO: 9340 - protein, 502 aa, Homo sapiens; identical to SEQ ID NO: 786

SEQ ID NO: 9341 - DNA, 3072 bp, Homo sapiens
agcgcagcgtgcgggtggcctggatcccgcgcagtggcccggcgatgtcgctcgtgctgctaagcctggccgcgctgtgcaggagcgccgtaccccgagagccgaccgttcaatgtggctctgaaactgggccatctccagagtggatgctacaacatgatctaatccccggagacttgagggacctccgagtagaacctgttacaactagtgttgcaacaggggactattcaattttgatgaatgtaagctgggtactccgggcagatgccagcatccgcttgttgaaggccaccaagatttgtgtgacgggcaaaagcaacttccagtcctacagctgtgtgaggtgcaattacacagaggccttccagactcagaccagaccctctggtggtaaatggacattttcctacatcggcttccctgtagagctgaacacagtctatttcattggggcccataatattcctaatgcaaatatgaatgaagatggcccttccatgtctgtgaatttcacctcaccaggctgcctagaccacataatgaaatataaaaaaaagtgtgtcaaggccggaagcctgtgggatccgaacatcactgcttgtaagaagaatgaggagacagtagaagtgaacttcacaaccactcccctgggaaacagatacatggctcttatccaacacagcactatcatcgggttttctcaggtgtttgagccacaccagaagaaacaaacgcgagcttcagtggtgattccagtgactggggatagtgaaggtgctacggtgcaggtaaagttcagtgagctgctctggggagggaagggacatagaagactgttccatcattcattgcttttaaggatgagttctctcttgtcaaatgcacttctgccagcagacaccagttaagtggcgttcatgggggctctttcgctgcagcctccaccgtgctgaggtcaggaggccgacgtggcagttgtggtcccttttgcttgtattaatggctgctgaccttccaaagcactttttattttcattttctgtcacagacactcagggatagcagtaccattttacttccgcaagcctttaactgcaagatgaagctgcaaagggtttgaaatgggaaggtttgagttccaggcagcgtatgaactctggagaggggctgccagtcctctctgggccgcagcggacccagctggaacacaggaagttggagcagtaggtgctccttcacctctcagtatgtctctttcaactctagtttttgaggtggggacacaggaggtccagtgggacacagccactccccaaagagtaaggagcttccatgcttcattccctggcataaaaagtgctcaaacacaccagagggggcaggcaccagccagggtatgatggctactacccttttctggagaaccatagacttcccttactacagggacttgcatgtcctaaagcactggctgaaggaagccaagaggatcactgctgctccttttttctagaggaaatgtttgtctacgtggtaagatatgacctagcccttttaggtaagcgaactggtatgttagtaacgtgtacaaagtttaggttcagaccccgggagtcttgggcacgtgggtctcgggtcactggttttgactttagggctttgttacagatgtgtgaccaaggggaaaatgtgcatgacaacactagaggtatgggcgaagccagaaagaagggaagttttggctgaagtaggagtcttggtgagattttgctctgatgcatggtgtgaactttctgagcctcttgtttttcctcagctgactccatattttcctacttgtggcagcgactgcatccgacataaaggaacagttgtgctctgcccacaaacaggcgtccctttccctctggataacaacaaaagcaagccgggaggctggctgcctctcctcctgctgtctctgctggtggccacatgggtgctggtggcagggatctatctaatgtggaggcacgaaaggatcaagaagacttccttttctaccaccacactactgccccccattaaggttcttgtggtttacccatctgaaatatgtttccatcacacaatttgttacttcactgaatttcttcaaaaccattgcagaagtgaggtcatccttgaaaagtggcagaaaaagaaaatagcagagatgggtccagtgcagtggcttgccactcaaaagaaggcagcagacaaagtcgtcttccttctttccaatgacgtcaacagtgtgtgcgatggtacctgtggcaagagcgagggcagtcccagtgagaactctcaagacctcttcccccttgcctttaaccttttctgcagtgatctaagaagccagattcatctgcacaaatacgtggtggtctactttagagagattgatacaaaagacgattacaatgctctcagtgtctgccccaagtaccacctcatgaaggatgccactgctttctgtgcagaacttctccatgtcaagcagcaggtgtcagcaggaaaaagatcacaagcctgccacgatggctgctgctccttgtagcccacccatgagaagcaagagaccttaaaggcttcctatcccaccaattacagggaaaaaacgtgtgatgatcctgaagcttactatgcagcctacaaacagccttagtaattaaaacattttataccaataaaattttcaaatattgctaactaatgtagcattaactaacgattggaaactacatttacaacttcaaagctgttttatacatagaaatcaattacagttttaattgaaaactataaccattttgataatgcaacaataaagcatcttcagccaaacatctagtcttccatagaccatgcattgcagtgtacccagaactgtttagctaatattctatgtttaattaatgaatactaactctaagaacccctcactgattcactcaatagcatcttaagtgaaaaaccttctattacatgcaaaaaatcattgtttttaagataacaaaagtagggaataaacaagctgaacccactttt

SEQ ID NO: 9342 - protein, 296 aa, Homo sapiens [sequence omitted]

SEQ ID NO: 9343 - DNA, 1567 bp, Homo sapiens
agcgtgcgggtggcctggatcccgcgcagtggcccggcgatgtcgctcgtgctgctaagcctggccgcgctgtgcaggagcgccgtaccccgagagccgaccgttcaatgtggctctgaaactgtggacattttcctacatcggcttccctgtagagctgaacacagtctatttcattggggcccataatattcctaatgcaaatatgaatgaagatggcccttccatgtctgtgaatttcacctcaccaggctgcctagaccacataatgaaatataaaaaaaagtgtgtcaaggccggaagcctgtgggatccgaacatcactgcttgtaagaagaatgaggagacagtagaagtgaacttcacaaccactcccctgggaaacagatacatggctcttatccaacacagcactatcatcgggttttctcaggtgtttgagccacaccagaagaaacaaacgcgagcttcagtggtgattccagtgactggggatagtgaaggtgctacggtgcagctgactccatattttcctacttgtggcagcgactgcatccgacataaaggaacagttgtgctctgcccacaaacaggcgtccctttccctctggataacaacaaaagcaagccgggaggctggctgcctctcctcctgctgtctctgctggtggccacatgggtgctggtggcagggatctatctaatgtggaggcacgaaaggatcaagaagacttccttttctaccaccacactactgccccccattaaggttcttgtggtttacccatctgaaatatgtttccatcacacaatttgttacttcactgaatttcttcaaaaccattgcagaagtgaggtcatccttgaaaagtggcagaaaaagaaaatagcagagatgggtccagtgcagtggcttgccactcaaaagaaggcagcagacaaagtcgtcttccttctttccaatgacgtcaacagtgtgtgcgatggtacctgtggcaagagcgagggcagtcccagtgagaactctcaagacctcttcccccttgcctttaaccttttctgcagtgatctaagaagccagattcatctgcacaaatacgtggtggtctactttagagagattgatacaaaagacgattacaatgctctcagtgtctgccccaagtaccacctcatgaaggatgccactgctttctgtgcagaacttctccatgtcaagcagcaggtgtcagcaggaaaaagatcacaagcctgccacgatggctgctgctccttgtagcccacccatgagaagcaagagaccttaaaggcttcctatcccaccaattacagggaaaaaacgtgtgatgatcctgaagcttactatgcagcctacaaacagccttagtaattaaaacattttataccaataaaattttcaaatattgctaactaatgtagcattaactaacgattggaaactacatttacaacttcaaagctgttttatacatagaaatcaattacagttttaattgaaaactataaccattttgataatgcaacaataaagcatcttcagccaaac

SEQ ID NO: 9344 - protein, 357 aa, Homo sapiens [sequence omitted]

SEQ ID NO: 9345 - DNA, 1770 bp, Homo sapiens
agcgtgcgggtggcctggatcccgcgcagtggcccggcgatgtcgctcgtgctgctaagcctggccgcgctgtgcaggagcgccgtaccccgagagccgaccgttcaatgtggctctgaaactgtggacattttcctacatcggcttccctgtagagctgaacacagtctatttcattggggcccataatattcctaatgcaaatatgaatgaagatggcccttccatgtctgtgaatttcacctcaccaggctgcctagaccacataatgaaatataaaaaaaagtgtgtcaaggccggaagcctgtgggatccgaacatcactgcttgtaagaagaatgaggagacagtagaagtgaacttcacaaccactcccctgggaaacagatacatggctcttatccaacacagcactatcatcgggttttctcaggtgtttgagccacaccagaagaaacaaacgcgagcttcagtggtgattccagtgactggggatagtgaaggtgctacggtgcagctgactccatattttcctacttgtggcagcgactgcatccgacataaaggaacagttgtgctctgcccacaaacaggcgtccctttccctctggataacaacaaaagcaagccgggaggctggctgcctctcctcctgctgtctctgctggtggccacatgggtgctggtggcagggatctatctaatgtggaggcacgaaaggatcaagaagacttccttttctaccaccacactactgccccccattaaggttcttgtggtttacccatctgaaatatgtttccatcacacaatttgttacttcactgaatttcttcaaaaccattgcagaagtgaggtcatccttgaaaagtggcagaaaaagaaaatagcagagatgggtccagtgcagtggcttgccactcaaaagaaggcagcagacaaagtcgtcttccttctttccaatgacgtcaacagtgtgtgcgatggtacctgtggcaagagcgagggcagtcccagtgagaactctcaagacctcttcccccttgcctttaaccttttctgcagtgatctaagaagccagattcatctgcacaaatacgtggtggtctactttagagagattgatacaaaagacgattacaatgctctcagtgtctgccccaagtaccacctcatgaaggatgccactgctttctgtgcagaacttctccatgtcaagcagcaggtgtcagcaggaaaaagatcacaagcctgccacgatggctgctgctccttgtagcccacccatgagaagcaagagaccttaaaggcttcctatcccaccaattacagggaaaaaacgtgtgatgatcctgaagcttactatgcagcctacaaacagccttagtaattaaaacattttataccaataaaattttcaaatattgctaactaatgtagcattaactaacgattggaaactacatttacaacttcaaagctgttttatacatagaaatcaattacagttttaattgaaaactataaccattttgataatgcaacaataaagcatcttcagccaaacatctagtcttccatagaccatgcattgcagtgtacccagaactgtttagctaatattctatgtttaattaatgaatactaactctaagaacccctcactgattcactcaatagcatcttaagtgaaaaaccttctattacatgcaaaaaatcattgtttttaagataacaaaagtagggaataaacaagctgaacccactttt

SEQ ID NO: 9346 - protein, 357 aa, Homo sapiens [sequence omitted]

SEQ ID NO: 9347 - DNA, 2188 bp, Homo sapiens
agcgtgcgggtggcctggatcccgcgcagtggcccggcgatgtcgctcgtgctgctaagcctggccgcgctgtgcaggagcgccgtaccccgagagccgaccgttcaatgtggctctgaaactgtggacattttcctacatcggcttccctgtagagctgaacacagtctatttcattggggcccataatattcctaatgcaaatatgaatgaagatggcccttccatgtctgtgaatttcacctcaccaggctgcctagaccacataatgaaatataaaaaaaagtgtgtcaaggccggaagcctgtgggatccgaacatcactgcttgtaagaagaatgaggagacagtagaagtgaacttcacaaccactcccctgggaaacagatacatggctcttatccaacacagcactatcatcgggttttctcaggtgtttgagccacaccagaagaaacaaacgcgagcttcagtggtgattccagtgactggggatagtgaaggtgctacggtgcagctgactccatattttcctacttgtggcagcgactgcatccgacataaaggaacagttgtgctctgcccacaaacaggcgtccctttccctctggataacaacaaaagcaagccgggaggctggctgcctctcctcctgctgtctctgctggtggccacatgggtgctggtggcagggatctatctaatgtggaggcacgaaaggatcaagaagacttccttttctaccaccacactactgccccccattaaggttcttgtggtttacccatctgaaatatgtttccatcacacaatttgttacttcactgaatttcttcaaaaccattgcagaagtgaggtcatccttgaaaagtggcagaaaaagaaaatagcagagatgggtccagtgcagtggcttgccactcaaaagaaggcagcagacaaagtcgtcttccttctttccaatgacgtcaacagtgtgtgcgatggtacctgtggcaagagcgagggcagtcccagtgagaactctcaagacctcttcccccttgcctttaaccttttctgcagtgatctaagaagccagattcatctgcacaaatacgtggtggtctactttagagagattgatacaaaagacgattacaatgctctcagtgtctgccccaagtaccacctcatgaaggatgccactgctttctgtgcagaacttctccatgtcaagcagcaggtgtcagcaggaaaaagatcacaagcctgccacgatggctgctgctccttgtagcccacccatgagaagcaagagaccttaaaggcttcctatcccaccaattacagggaaaaaacgtgtgatgatcctgaagcttactatgcagcctacaaacagccttagtaattaaaacattttataccaataaaattttcaaatattgctaactaatgtagcattaactaacgattggaaactacatttacaacttcaaagctgttttatacatagaaatcaattacagttttaattgaaaactataaccattttgataatgcaacaataaagcatcttcagccaaacatctagtcttccatagaccatgcattgcagtgtacccagaactgtttagctaatattctatgtttaattaatgaatactaactctaagaacccctcactgattcactcaatagcatcttaagtgaaaaaccttctattacatgcaaaaaatcattgtttttaagataacaaaagtagggaataaacaagctgaacccacttttactggaccaaatgatctattatatgtgtaaccacttgtatgatttggtatttgcataagaccttccctctacaaactagattcatatcttgattcttgtacaggtgccttttaacatgaacaacaaaatacccacaaacttgtctacttttgcctaaagttacctattagaggtcactgtcagagttctcagtttcttagttactatttaacttttcatgttcaaaatgaaaataattcttaagttgaaagccctcttgaagtaacctttttataaatgagttattataatggtttacttaaataaaaaacaggggtgggtgcagtggctcatgcctccaatcccagcactttggcaaggccaaggcaaaaggatcgctcaagaccaggctacgtcacaaagcgagacctccatctct

SEQ ID NO: 9348 - protein, 357 aa, Homo sapiens [sequence omitted]

SEQ ID NO: 9349 - DNA, 1819 bp, Homo sapiens
gatcccgcgcagtggcccggcgatgtcgctcgtgctgctaagcctggccgcgctgtgcaggagcgccgtaccccgagagccgaccgttcaatgtggctctgaaactgggccatctccagagtggatgctacaacatgatctaatccccggagacttgagggacctccgagtagaacctgttacaactagtgttgcaacaggggactattcaattttgatgaatgtaagctgggtactccgggcagatgccagcatccgcttgttgaaggccaccaagatttgtgtgacgggcaaaagcaacttccagtcctacagctgtgtgaggtgcaattacacagaggccttccagactcagaccagaccctctggtggtaaatggacattttcctacatcggcttccctgtagagctgaacacagtctatttcattggggcccataatattcctaatgcaaatatgaatgaagatggcccttccatgtctgtgaatttcacctcaccaggctgcctagaccacataatgaaatataaaaaaaagtgtgtcaaggccggaagcctgtgggatccgaacatcactgcttgtaagaagaatgaggagacagtagaagtgaacttcacaaccactcccctgggaaacagatacatggctcttatccaacacagcactatcatcgggttttctcaggtgtttgagccacaccagaagaaacaaacgcgagcttcagtggtgattccagtgactggggatagtgaaggtgctacggtgcagctgactccatattttcctacttgtggcagcgactgcatccgacataaaggaacagttgtgctctgcccacaaacaggcgtccctttccctctggataacaacaaaagcaagccgggaggctggctgcctctcctcctgctgtctctgctggtggccacatgggtgctggtggcagggatctatctaatgtggaggcacgaaaggatcaagaagacttccttttctaccaccacactactgccccccattaaggttcttgtggtttacccatctgaaatatgtttccatcacacaatttgttacttcactgaatttcttcaaaaccattgcagaagtgaggtcatccttgaaaagtggcagaaaaagaaaatagcagagatgggtccagtgcagtggcttgccactcaaaagaaggcagcagacaaagtcgtcttccttctttccaatgacgtcaacagtgtgtgcgatggtacctgtggcaagagcgagggcagtcccagtgagaactctcaagacctcttcccccttgcctttaaccttttctgcagtgatctaagaagccagattcatctgcacaaatacgtggtggtctactttagagagattgatacaaaagacgattacaatgctctcagtgtctgccccaagtaccacctcatgaaggatgccactgctttctgtgcagaacttctccatgtcaagcagcaggtgtcagcaggaaaaagatcacaagcctgccacgatggctgctgctccttgtagcccacccatgagaagcaagagaccttaaaggcttcctatcccaccaattacagggaaaaaacgtgtgatgatcctgaagcttactatgcagcctacaaacagccttagtaattaaaacattttataccaataaaattttcaaatattgctaactaatgtagcattaactaacgattggaaactacatttacaacttcaaagctgttttatacatagaaatcaattacagttttaattgaaaactataaccattttgataatgcaacaataaagcatcttcagccaaac

SEQ ID NO: 9350 - protein, 502 aa, Homo sapiens; identical to SEQ ID NO: 786

SEQ ID NO: 9351 - DNA, 2847 bp, Homo sapiens
gatcccgcgcagtggcccggcgatgtcgctcgtgctgctaagcctggccgcgctgtgcaggagcgccgtaccccgagagccgaccgttcaatgtggctctgaaactgggccatctccagagtggatgctacaacatgatctaatccccggagacttgagggacctccgagtagaacctgttacaactagtgttgcaacaggggactattcaattttgatgaatgtaagctgggtactccgggcagatgccagcatccgcttgttgaaggccaccaagatttgtgtgacgggcaaaagcaacttccagtcctacagctgtgtgaggtgcaattacacagaggccttccagactcagaccagaccctctggtggtaaatggacattttcctacatcggcttccctgtagagctgaacacagtctatttcattggggcccataatattcctaatgcaaatatgaatgaagatggcccttccatgtctgtgaatttcacctcaccaggctgcctagaccacataatgaaatataaaaaaaagtgtgtcaaggccggaagcctgtgggatccgaacatcactgcttgtaagaagaatgaggagacagtagaagtgaacttcacaaccactcccctgggaaacagatacatggctcttatccaacacagcactatcatcgggttttctcaggtgtttgagccacaccagaagaaacaaacgcgagcttcagtggtgattccagtgactggggatagtgaaggtgctacggtgcaggtaaagttcagtgagctgctctggggagggaagggacatagaagactgttccatcattcattgcttttaaggatgagttctctcttgtcaaatgcacttctgccagcagacaccagttaagtggcgttcatgggggctctttcgctgcagcctccaccgtgctgaggtcaggaggccgacgtggcagttgtggtcccttttgcttgtattaatggctgctgaccttccaaagcactttttattttcattttctgtcacagacactcagggatagcagtaccattttacttccgcaagcctttaactgcaagatgaagctgcaaagggtttgaaatgggaaggtttgagttccaggcagcgtatgaactctggagaggggctgccagtcctctctgggccgcagcggacccagctggaacacaggaagttggagcagtaggtgctccttcacctctcagtatgtctctttcaactctagtttttgaggtggggacacaggaggtccagtgggacacagccactccccaaagagtaaggagcttccatgcttcattccctggcataaaaagtgctcaaacacaccagagggggcaggcaccagccagggtatgatggctactacccttttctggagaaccatagacttcccttactacagggacttgcatgtcctaaagcactggctgaaggaagccaagaggatcactgctgctccttttttctagaggaaatgtttgtctacgtggtaagatatgacctagcccttttaggtaagcgaactggtatgttagtaacgtgtacaaagtttaggttcagaccccgggagtcttgggcacgtgggtctcgggtcactggttttgactttagggctttgttacagatgtgtgaccaaggggaaaatgtgcatgacaacactagaggtatgggcgaagccagaaagaagggaagttttggctgaagtaggagtcttggtgagattttgctctgatgcatggtgtgaactttctgagcctcttgtttttcctcagctgactccatattttcctacttgtggcagcgactgcatccgacataaaggaacagttgtgctctgcccacaaacaggcgtccctttccctctggataacaacaaaagcaagccgggaggctggctgcctctcctcctgctgtctctgctggtggccacatgggtgctggtggcagggatctatctaatgtggaggcacgaaaggatcaagaagacttccttttctaccaccacactactgccccccattaaggttcttgtggtttacccatctgaaatatgtttccatcacacaatttgttacttcactgaatttcttcaaaaccattgcagaagtgaggtcatccttgaaaagtggcagaaaaagaaaatagcagagatgggtccagtgcagtggcttgccactcaaaagaaggcagcagacaaagtcgtcttccttctttccaatgacgtcaacagtgtgtgcgatggtacctgtggcaagagcgagggcagtcccagtgagaactctcaagacctcttcccccttgcctttaaccttttctgcagtgatctaagaagccagattcatctgcacaaatacgtggtggtctactttagagagattgatacaaaagacgattacaatgctctcagtgtctgccccaagtaccacctcatgaaggatgccactgctttctgtgcagaacttctccatgtcaagcagcaggtgtcagcaggaaaaagatcacaagcctgccacgatggctgctgctccttgtagcccacccatgagaagcaagagaccttaaaggcttcctatcccaccaattacagggaaaaaacgtgtgatgatcctgaagcttactatgcagcctacaaacagccttagtaattaaaacattttataccaataaaattttcaaatattgctaactaatgtagcattaactaacgattggaaactacatttacaacttcaaagctgttttatacatagaaatcaattacagttttaattgaaaactataaccattttgataatgcaacaataaagcatcttcagccaaac

SEQ ID NO: 9352 - protein, 296 aa, Homo sapiens [sequence omitted]

SEQ ID NO: 9353 - DNA, 2440 bp, Homo sapiens
gatcccgcgcagtggcccggcgatgtcgctcgtgctgctaagcctggccgcgctgtgcaggagcgccgtaccccgagagccgaccgttcaatgtggctctgaaactgggccatctccagagtggatgctacaacatgatctaatccccggagacttgagggacctccgagtagaacctgttacaactagtgttgcaacaggggactattcaattttgatgaatgtaagctgggtactccgggcagatgccagcatccgcttgttgaaggccaccaagatttgtgtgacgggcaaaagcaacttccagtcctacagctgtgtgaggtgcaattacacagaggccttccagactcagaccagaccctctggtggtaaatggacattttcctacatcggcttccctgtagagctgaacacagtctatttcattggggcccataatattcctaatgcaaatatgaatgaagatggcccttccatgtctgtgaatttcacctcaccaggctgcctagaccacataatgaaatataaaaaaaagtgtgtcaaggccggaagcctgtgggatccgaacatcactgcttgtaagaagaatgaggagacagtagaagtgaacttcacaaccactcccctgggaaacagatacatggctcttatccaacacagcactatcatcgggttttctcaggtgtttgagccacaccagaagaaacaaacgcgagcttcagtggtgattccagtgactggggatagtgaaggtgctacggtgcagctgactccatattttcctacttgtggcagcgactgcatccgacataaaggaacagttgtgctctgcccacaaacaggcgtccctttccctctggataacaacaaaagcaagccgggaggctggctgcctctcctcctgctgtctctgctggtggccacatgggtgctggtggcagggatctatctaatgtggaggcacgaaaggatcaagaagacttccttttctaccaccacactactgccccccattaaggttcttgtggtttacccatctgaaatatgtttccatcacacaatttgttacttcactgaatttcttcaaaaccattgcagaagtgaggtcatccttgaaaagtggcagaaaaagaaaatagcagagatgggtccagtgcagtggcttgccactcaaaagaaggcagcagacaaagtcgtcttccttctttccaatgacgtcaacagtgtgtgcgatggtacctgtggcaagagcgagggcagtcccagtgagaactctcaagacctcttcccccttgcctttaaccttttctgcagtgatctaagaagccagattcatctgcacaaatacgtggtggtctactttagagagattgatacaaaagacgattacaatgctctcagtgtctgccccaagtaccacctcatgaaggatgccactgctttctgtgcagaacttctccatgtcaagcagcaggtgtcagcaggaaaaagatcacaagcctgccacgatggctgctgctccttgtagcccacccatgagaagcaagagaccttaaaggcttcctatcccaccaattacagggaaaaaacgtgtgatgatcctgaagcttactatgcagcctacaaacagccttagtaattaaaacattttataccaataaaattttcaaatattgctaactaatgtagcattaactaacgattggaaactacatttacaacttcaaagctgttttatacatagaaatcaattacagttttaattgaaaactataaccattttgataatgcaacaataaagcatcttcagccaaacatctagtcttccatagaccatgcattgcagtgtacccagaactgtttagctaatattctatgtttaattaatgaatactaactctaagaacccctcactgattcactcaatagcatcttaagtgaaaaaccttctattacatgcaaaaaatcattgtttttaagataacaaaagtagggaataaacaagctgaacccacttttactggaccaaatgatctattatatgtgtaaccacttgtatgatttggtatttgcataagaccttccctctacaaactagattcatatcttgattcttgtacaggtgccttttaacatgaacaacaaaatacccacaaacttgtctacttttgcctaaagttacctattagaggtcactgtcagagttctcagtttcttagttactatttaacttttcatgttcaaaatgaaaataattcttaagttgaaagccctcttgaagtaacctttttataaatgagttattataatggtttacttaaataaaaaacaggggtgggtgcagtggctcatgcctccaatcccagcactttggcaaggccaaggcaaaaggatcgctcaagaccaggctacgtcacaaagcgagacctccatctct

SEQ ID NO: 9354 - protein, 502 aa, Homo sapiens; identical to SEQ ID NO: 786

SEQ ID NO: 9355 - DNA, 3468 bp, Homo sapiens
gatcccgcgcagtggcccggcgatgtcgctcgtgctgctaagcctggccgcgctgtgcaggagcgccgtaccccgagagccgaccgttcaatgtggctctgaaactgggccatctccagagtggatgctacaacatgatctaatccccggagacttgagggacctccgagtagaacctgttacaactagtgttgcaacaggggactattcaattttgatgaatgtaagctgggtactccgggcagatgccagcatccgcttgttgaaggccaccaagatttgtgtgacgggcaaaagcaacttccagtcctacagctgtgtgaggtgcaattacacagaggccttccagactcagaccagaccctctggtggtaaatggacattttcctacatcggcttccctgtagagctgaacacagtctatttcattggggcccataatattcctaatgcaaatatgaatgaagatggcccttccatgtctgtgaatttcacctcaccaggctgcctagaccacataatgaaatataaaaaaaagtgtgtcaaggccggaagcctgtgggatccgaacatcactgcttgtaagaagaatgaggagacagtagaagtgaacttcacaaccactcccctgggaaacagatacatggctcttatccaacacagcactatcatcgggttttctcaggtgtttgagccacaccagaagaaacaaacgcgagcttcagtggtgattccagtgactggggatagtgaaggtgctacggtgcaggtaaagttcagtgagctgctctggggagggaagggacatagaagactgttccatcattcattgcttttaaggatgagttctctcttgtcaaatgcacttctgccagcagacaccagttaagtggcgttcatgggggctctttcgctgcagcctccaccgtgctgaggtcaggaggccgacgtggcagttgtggtcccttttgcttgtattaatggctgctgaccttccaaagcactttttattttcattttctgtcacagacactcagggatagcagtaccattttacttccgcaagcctttaactgcaagatgaagctgcaaagggtttgaaatgggaaggtttgagttccaggcagcgtatgaactctggagaggggctgccagtcctctctgggccgcagcggacccagctggaacacaggaagttggagcagtaggtgctccttcacctctcagtatgtctctttcaactctagtttttgaggtggggacacaggaggtccagtgggacacagccactccccaaagagtaaggagcttccatgcttcattccctggcataaaaagtgctcaaacacaccagagggggcaggcaccagccagggtatgatggctactacccttttctggagaaccatagacttcccttactacagggacttgcatgtcctaaagcactggctgaaggaagccaagaggatcactgctgctccttttttctagaggaaatgtttgtctacgtggtaagatatgacctagcccttttaggtaagcgaactggtatgttagtaacgtgtacaaagtttaggttcagaccccgggagtcttgggcacgtgggtctcgggtcactggttttgactttagggctttgttacagatgtgtgaccaaggggaaaatgtgcatgacaacactagaggtatgggcgaagccagaaagaagggaagttttggctgaagtaggagtcttggtgagattttgctctgatgcatggtgtgaactttctgagcctcttgtttttcctcagctgactccatattttcctacttgtggcagcgactgcatccgacataaaggaacagttgtgctctgcccacaaacaggcgtccctttccctctggataacaacaaaagcaagccgggaggctggctgcctctcctcctgctgtctctgctggtggccacatgggtgctggtggcagggatctatctaatgtggaggcacgaaaggatcaagaagacttccttttctaccaccacactactgccccccattaaggttcttgtggtttacccatctgaaatatgtttccatcacacaatttgttacttcactgaatttcttcaaaaccattgcagaagtgaggtcatccttgaaaagtggcagaaaaagaaaatagcagagatgggtccagtgcagtggcttgccactcaaaagaaggcagcagacaaagtcgtcttccttctttccaatgacgtcaacagtgtgtgcgatggtacctgtggcaagagcgagggcagtcccagtgagaactctcaagacctcttcccccttgcctttaaccttttctgcagtgatctaagaagccagattcatctgcacaaatacgtggtggtctactttagagagattgatacaaaagacgattacaatgctctcagtgtctgccccaagtaccacctcatgaaggatgccactgctttctgtgcagaacttctccatgtcaagcagcaggtgtcagcaggaaaaagatcacaagcctgccacgatggctgctgctccttgtagcccacccatgagaagcaagagaccttaaaggcttcctatcccaccaattacagggaaaaaacgtgtgatgatcctgaagcttactatgcagcctacaaacagccttagtaattaaaacattttataccaataaaattttcaaatattgctaactaatgtagcattaactaacgattggaaactacatttacaacttcaaagctgttttatacatagaaatcaattacagttttaattgaaaactataaccattttgataatgcaacaataaagcatcttcagccaaacatctagtcttccatagaccatgcattgcagtgtacccagaactgtttagctaatattctatgtttaattaatgaatactaactctaagaacccctcactgattcactcaatagcatcttaagtgaaaaaccttctattacatgcaaaaaatcattgtttttaagataacaaaagtagggaataaacaagctgaacccacttttactggaccaaatgatctattatatgtgtaaccacttgtatgatttggtatttgcataagaccttccctctacaaactagattcatatcttgattcttgtacaggtgccttttaacatgaacaacaaaatacccacaaacttgtctacttttgcctaaagttacctattagaggtcactgtcagagttctcagtttcttagttactatttaacttttcatgttcaaaatgaaaataattcttaagttgaaagccctcttgaagtaacctttttataaatgagttattataatggtttacttaaataaaaaacaggggtgggtgcagtggctcatgcctccaatcccagcactttggcaaggccaaggcaaaaggatcgctcaagaccaggctacgtcacaaagcgagacctccatctct

SEQ ID NO: 9356 - protein, 296 aa, Homo sapiens [sequence omitted]

SEQ ID NO: 9357 - DNA, 1295 bp, Homo sapiens
agcactggctgaaggaagccaagaggatcactgctgctccttttttctagaggaaatgtttgtctacgtggtaagatatgacctagcccttttaggtaagcgaactggtatgttagtaacgtgtacaaagtttaggttcagaccccgggagtcttgggcacgtgggtctcgggtcactggttttgactttagggctttgttacagatgtgtgaccaaggggaaaatgtgcatgacaacactagagctgactccatattttcctacttgtggcagcgactgcatccgacataaaggaacagttgtgctctgcccacaaacaggcgtccctttccctctggataacaacaaaagcaagccgggaggctggctgcctctcctcctgctgtctctgctggtggccacatgggtgctggtggcagggatctatctaatgtggaggcacgaaaggatcaagaagacttccttttctaccaccacactactgccccccattaaggttcttgtggtttacccatctgaaatatgtttccatcacacaatttgttacttcactgaatttcttcaaaaccattgcagaagtgaggtcatccttgaaaagtggcagaaaaagaaaatagcagagatgggtccagtgcagtggcttgccactcaaaagaaggcagcagacaaagtcgtcttccttctttccaatgacgtcaacagtgtgtgcgatggtacctgtggcaagagcgagggcagtcccagtgagaactctcaagacctcttcccccttgcctttaaccttttctgcagtgatctaagaagccagattcatctgcacaaatacgtggtggtctactttagagagattgatacaaaagacgattacaatgctctcagtgtctgccccaagtaccacctcatgaaggatgccactgctttctgtgcagaacttctccatgtcaagcagcaggtgtcagcaggaaaaagatcacaagcctgccacgatggctgctgctccttgtagcccacccatgagaagcaagagaccttaaaggcttcctatcccaccaattacagggaaaaaacgtgtgatgatcctgaagcttactatgcagcctacaaacagccttagtaattaaaacattttataccaataaaattttcaaatattgctaactaatgtagcattaactaacgattggaaactacatttacaacttcaaagctgttttatacatagaaatcaattacagttttaattgaaaactataaccattttgataatgcaacaataaagcatcttcagccaaac

SEQ ID NO: 9358 - protein, 260 aa, Homo sapiens
MCMTTLELTPYFPTCGSDCIRHKGTVVLCPQTGVPFPLDNNKSKPGGWLPLLLLSLLVATWVLVAGIYLMWRHERIKKTSFSTTTLLPPIKVLVVYPSEICFHHTICYFTEFLQNHCRSEVILEKWQKKKIAEMGPVQWLATQKKAADKVVFLLSNDVNSVCDGTCGKSEGSPSENSQDLFPLAFNLFCSDLRSQIHLHKYVVVYFREIDTKDDYNALSVCPKYHLMKDATAFCAELLHVKQQVSAGKRSQACHDGCCSL

SEQ ID NO: 9359 - DNA, 1498 bp, Homo sapiens
agcactggctgaaggaagccaagaggatcactgctgctccttttttctagaggaaatgtttgtctacgtggtaagatatgacctagcccttttaggtaagcgaactggtatgttagtaacgtgtacaaagtttaggttcagaccccgggagtcttgggcacgtgggtctcgggtcactggttttgactttagggctttgttacagatgtgtgaccaaggggaaaatgtgcatgacaacactagagctgactccatattttcctacttgtggcagcgactgcatccgacataaaggaacagttgtgctctgcccacaaacaggcgtccctttccctctggataacaacaaaagcaagccgggaggctggctgcctctcctcctgctgtctctgctggtggccacatgggtgctggtggcagggatctatctaatgtggaggcacgaaaggatcaagaagacttccttttctaccaccacactactgccccccattaaggttcttgtggtttacccatctgaaatatgtttccatcacacaatttgttacttcactgaatttcttcaaaaccattgcagaagtgaggtcatccttgaaaagtggcagaaaaagaaaatagcagagatgggtccagtgcagtggcttgccactcaaaagaaggcagcagacaaagtcgtcttccttctttccaatgacgtcaacagtgtgtgcgatggtacctgtggcaagagcgagggcagtcccagtgagaactctcaagacctcttcccccttgcctttaaccttttctgcagtgatctaagaagccagattcatctgcacaaatacgtggtggtctactttagagagattgatacaaaagacgattacaatgctctcagtgtctgccccaagtaccacctcatgaaggatgccactgctttctgtgcagaacttctccatgtcaagcagcaggtgtcagcaggaaaaagatcacaagcctgccacgatggctgctgctccttgtagcccacccatgagaagcaagagaccttaaaggcttcctatcccaccaattacagggaaaaaacgtgtgatgatcctgaagcttactatgcagcctacaaacagccttagtaattaaaacattttataccaataaaattttcaaatattgctaactaatgtagcattaactaacgattggaaactacatttacaacttcaaagctgttttatacatagaaatcaattacagttttaattgaaaactataaccattttgataatgcaacaataaagcatcttcagccaaacatctagtcttccatagaccatgcattgcagtgtacccagaactgtttagctaatattctatgtttaattaatgaatactaactctaagaacccctcactgattcactcaatagcatcttaagtgaaaaaccttctattacatgcaaaaaatcattgtttttaagataacaaaagtagggaataaacaagctgaacccactttt

SEQ ID NO: 9360 - protein, 260 aa, Homo sapiens; identical to SEQ ID NO: 9358

SEQ ID NO: 9361 - DNA, 1916 bp, Homo sapiens
agcactggctgaaggaagccaagaggatcactgctgctccttttttctagaggaaatgtttgtctacgtggtaagatatgacctagcccttttaggtaagcgaactggtatgttagtaacgtgtacaaagtttaggttcagaccccgggagtcttgggcacgtgggtctcgggtcactggttttgactttagggctttgttacagatgtgtgaccaaggggaaaatgtgcatgacaacactagagctgactccatattttcctacttgtggcagcgactgcatccgacataaaggaacagttgtgctctgcccacaaacaggcgtccctttccctctggataacaacaaaagcaagccgggaggctggctgcctctcctcctgctgtctctgctggtggccacatgggtgctggtggcagggatctatctaatgtggaggcacgaaaggatcaagaagacttccttttctaccaccacactactgccccccattaaggttcttgtggtttacccatctgaaatatgtttccatcacacaatttgttacttcactgaatttcttcaaaaccattgcagaagtgaggtcatccttgaaaagtggcagaaaaagaaaatagcagagatgggtccagtgcagtggcttgccactcaaaagaaggcagcagacaaagtcgtcttccttctttccaatgacgtcaacagtgtgtgcgatggtacctgtggcaagagcgagggcagtcccagtgagaactctcaagacctcttcccccttgcctttaaccttttctgcagtgatctaagaagccagattcatctgcacaaatacgtggtggtctactttagagagattgatacaaaagacgattacaatgctctcagtgtctgccccaagtaccacctcatgaaggatgccactgctttctgtgcagaacttctccatgtcaagcagcaggtgtcagcaggaaaaagatcacaagcctgccacgatggctgctgctccttgtagcccacccatgagaagcaagagaccttaaaggcttcctatcccaccaattacagggaaaaaacgtgtgatgatcctgaagcttactatgcagcctacaaacagccttagtaattaaaacattttataccaataaaattttcaaatattgctaactaatgtagcattaactaacgattggaaactacatttacaacttcaaagctgttttatacatagaaatcaattacagttttaattgaaaactataaccattttgataatgcaacaataaagcatcttcagccaaacatctagtcttccatagaccatgcattgcagtgtacccagaactgtttagctaatattctatgtttaattaatgaatactaactctaagaacccctcactgattcactcaatagcatcttaagtgaaaaaccttctattacatgcaaaaaatcattgtttttaagataacaaaagtagggaataaacaagctgaacccacttttactggaccaaatgatctattatatgtgtaaccacttgtatgatttggtatttgcataagaccttccctctacaaactagattcatatcttgattcttgtacaggtgccttttaacatgaacaacaaaatacccacaaacttgtctacttttgcctaaagttacctattagaggtcactgtcagagttctcagtttcttagttactatttaacttttcatgttcaaaatgaaaataattcttaagttgaaagccctcttgaagtaacctttttataaatgagttattataatggtttacttaaataaaaaacaggggtgggtgcagtggctcatgcctccaatcccagcactttggcaaggccaaggcaaaaggatcgctcaagaccaggctacgtcacaaagcgagacctccatctct

SEQ ID NO: 9362 - protein, 260 aa, Homo sapiens; identical to SEQ ID NO: 9358

SEQ ID NO: 9363 - DNA, 1255 bp, Homo sapiens
tctacgtggtaagatatgacctagcccttttaggtaagcgaactggtatgttagtaacgtgtacaaagtttaggttcagaccccgggagtcttgggcacgtgggtctcgggtcactggttttgactttagggctttgttacagatgtgtgaccaaggggaaaatgtgcatgacaacactagaggtatgggcgaagccagaaagaagggaagttttggctgaagtaggagtcttgcgactgcatccgacataaaggaacagttgtgctctgcccacaaacaggcgtccctttccctctggataacaacaaaagcaagccgggaggctggctgcctctcctcctgctgtctctgctggtggccacatgggtgctggtggcagggatctatctaatgtggaggcacgaaaggatcaagaagacttccttttctaccaccacactactgccccccattaaggttcttgtggtttacccatctgaaatatgtttccatcacacaatttgttacttcactgaatttcttcaaaaccattgcagaagtgaggtcatccttgaaaagtggcagaaaaagaaaatagcagagatgggtccagtgcagtggcttgccactcaaaagaaggcagcagacaaagtcgtcttccttctttccaatgacgtcaacagtgtgtgcgatggtacctgtggcaagagcgagggcagtcccagtgagaactctcaagacctcttcccccttgcctttaaccttttctgcagtgatctaagaagccagattcatctgcacaaatacgtggtggtctactttagagagattgatacaaaagacgattacaatgctctcagtgtctgccccaagtaccacctcatgaaggatgccactgctttctgtgcagaacttctccatgtcaagcagcaggtgtcagcaggaaaaagatcacaagcctgccacgatggctgctgctccttgtagcccacccatgagaagcaagagaccttaaaggcttcctatcccaccaattacagggaaaaaacgtgtgatgatcctgaagcttactatgcagcctacaaacagccttagtaattaaaacattttataccaataaaattttcaaatattgctaactaatgtagcattaactaacgattggaaactacatttacaacttcaaagctgttttatacatagaaatcaattacagttttaattgaaaactataaccattttgataatgcaacaataaagcatcttcagccaaac

SEQ ID NO: 9364 - protein, 191 aa, Homo sapiens [sequence omitted]

SEQ ID NO: 9365 - DNA, 1458 bp, Homo sapiens
tctacgtggtaagatatgacctagcccttttaggtaagcgaactggtatgttagtaacgtgtacaaagtttaggttcagaccccgggagtcttgggcacgtgggtctcgggtcactggttttgactttagggctttgttacagatgtgtgaccaaggggaaaatgtgcatgacaacactagaggtatgggcgaagccagaaagaagggaagttttggctgaagtaggagtcttgcgactgcatccgacataaaggaacagttgtgctctgcccacaaacaggcgtccctttccctctggataacaacaaaagcaagccgggaggctggctgcctctcctcctgctgtctctgctggtggccacatgggtgctggtggcagggatctatctaatgtggaggcacgaaaggatcaagaagacttccttttctaccaccacactactgccccccattaaggttcttgtggtttacccatctgaaatatgtttccatcacacaatttgttacttcactgaatttcttcaaaaccattgcagaagtgaggtcatccttgaaaagtggcagaaaaagaaaatagcagagatgggtccagtgcagtggcttgccactcaaaagaaggcagcagacaaagtcgtcttccttctttccaatgacgtcaacagtgtgtgcgatggtacctgtggcaagagcgagggcagtcccagtgagaactctcaagacctcttcccccttgcctttaaccttttctgcagtgatctaagaagccagattcatctgcacaaatacgtggtggtctactttagagagattgatacaaaagacgattacaatgctctcagtgtctgccccaagtaccacctcatgaaggatgccactgctttctgtgcagaacttctccatgtcaagcagcaggtgtcagcaggaaaaagatcacaagcctgccacgatggctgctgctccttgtagcccacccatgagaagcaagagaccttaaaggcttcctatcccaccaattacagggaaaaaacgtgtgatgatcctgaagcttactatgcagcctacaaacagccttagtaattaaaacattttataccaataaaattttcaaatattgctaactaatgtagcattaactaacgattggaaactacatttacaacttcaaagctgttttatacatagaaatcaattacagttttaattgaaaactataaccattttgataatgcaacaataaagcatcttcagccaaacatctagtcttccatagaccatgcattgcagtgtacccagaactgtttagctaatattctatgtttaattaatgaatactaactctaagaacccctcactgattcactcaatagcatcttaagtgaaaaaccttctattacatgcaaaaaatcattgtttttaagataacaaaagtagggaataaacaagctgaacccactttt

SEQ ID NO: 9366 - protein, 191 aa, Homo sapiens [sequence omitted]

SEQ ID NO: 9367 - DNA, 1876 bp, Homo sapiens
tctacgtggtaagatatgacctagcccttttaggtaagcgaactggtatgttagtaacgtgtacaaagtttaggttcagaccccgggagtcttgggcacgtgggtctcgggtcactggttttgactttagggctttgttacagatgtgtgaccaaggggaaaatgtgcatgacaacactagaggtatgggcgaagccagaaagaagggaagttttggctgaagtaggagtcttgcgactgcatccgacataaaggaacagttgtgctctgcccacaaacaggcgtccctttccctctggataacaacaaaagcaagccgggaggctggctgcctctcctcctgctgtctctgctggtggccacatgggtgctggtggcagggatctatctaatgtggaggcacgaaaggatcaagaagacttccttttctaccaccacactactgccccccattaaggttcttgtggtttacccatctgaaatatgtttccatcacacaatttgttacttcactgaatttcttcaaaaccattgcagaagtgaggtcatccttgaaaagtggcagaaaaagaaaatagcagagatgggtccagtgcagtggcttgccactcaaaagaaggcagcagacaaagtcgtcttccttctttccaatgacgtcaacagtgtgtgcgatggtacctgtggcaagagcgagggcagtcccagtgagaactctcaagacctcttcccccttgcctttaaccttttctgcagtgatctaagaagccagattcatctgcacaaatacgtggtggtctactttagagagattgatacaaaagacgattacaatgctctcagtgtctgccccaagtaccacctcatgaaggatgccactgctttctgtgcagaacttctccatgtcaagcagcaggtgtcagcaggaaaaagatcacaagcctgccacgatggctgctgctccttgtagcccacccatgagaagcaagagaccttaaaggcttcctatcccaccaattacagggaaaaaacgtgtgatgatcctgaagcttactatgcagcctacaaacagccttagtaattaaaacattttataccaataaaattttcaaatattgctaactaatgtagcattaactaacgattggaaactacatttacaacttcaaagctgttttatacatagaaatcaattacagttttaattgaaaactataaccattttgataatgcaacaataaagcatcttcagccaaacatctagtcttccatagaccatgcattgcagtgtacccagaactgtttagctaatattctatgtttaattaatgaatactaactctaagaacccctcactgattcactcaatagcatcttaagtgaaaaaccttctattacatgcaaaaaatcattgtttttaagataacaaaagtagggaataaacaagctgaacccacttttactggaccaaatgatctattatatgtgtaaccacttgtatgatttggtatttgcataagaccttccctctacaaactagattcatatcttgattcttgtacaggtgccttttaacatgaacaacaaaatacccacaaacttgtctacttttgcctaaagttacctattagaggtcactgtcagagttctcagtttcttagttactatttaacttttcatgttcaaaatgaaaataattcttaagttgaaagccctcttgaagtaacctttttataaatgagttattataatggtttacttaaataaaaaacaggggtgggtgcagtggctcatgcctccaatcccagcactttggcaaggccaaggcaaaaggatcgctcaagaccaggctacgtcacaaagcgagacctccatctct

SEQ ID NO: 9368 - protein, 191 aa, Homo sapiens [sequence omitted]

SEQ ID NO: 9369 - DNA, 6111 bp, Homo sapiens
gcgcgccgggacgccgagggctgggaggtgcggagcgccaggagccaggcggagcccccgcagggacaccgctccgatctcccgcacgccccaccgtctggttgtgtgcgctcctgcccgggctctggcctcagcttccccgaccataaaacgaccacggttcaacaactttaaggattggtcgagccacagacactcttcctgccagcattcctcacgtcattgcccgaagacacaaacaacaagggcagcccctatacaaggacagttggctcctaagggagggactaaataaaccagaaagtaatgaacaaagacaaaatggccttaaaatggtggatcaagcaatatggtctaaaaagatgtccaatggtacaagacgcattcctgtgtcccctgaacaggcacgctcctacaataagcagatgcgacctgcaattttagatcactgttcgggaaataagtggacaaacacatctcatcaccctgagtatttagtaggagaagaggccttgtatgttaatccactggactgttacaatattcactggcctatcagaagaggtcagttaaatattcacccaggccctgggggctctcttacagctgttctggcagatattgaagtaatatggtctcatgcgatacaaaaatacttggaaatcccactgaaagatttaaagtattatagatgtatcttgttaattcctgatatctataataagcagcatgtgaaagaactagtgaatatgatactaatgaagatgggtttttcagggattgtggtccatcaggagtctgtgtgtgccacctatggaagtggcttaagcagcacgtgtattgtagacgttggggaccagaagacaagtgtatgctgtgtggaggatggggtgtctcatcggaatactcggctttgtctggcatacggaggatctgatgtgtcaagatgtttttactggctaatgcagcgagctgggttcccttacagagaatgccagttaacaaataaaatggattgtcttcttctgcaacaccttaaagaaactttttgtcatttagatcaggacatctctgggcttcaggaccatgagtttcagattcgacatcctgattctcctgccctgctttaccagtttcgattaggagatgaaaaactgcaggctccaatggctttgttttaccccgcaacttttggaatcgttggacagaaaatgacgactttgcagcacagatctcagggcgatcctgaggatcctcacgatgaacattacctgctggccacacagagcaaacaagaacagtctgcaaaagctactgctgaccgaaagtctgcatccaaacctattggatttgaaggggatcttcgtggccagtcctctgatcttccagaaagactccattcccaggaggtagatttggggtctgcacagggagatggcctgatggccggcaacgattccgaggaggccctcactgcactgatgtccaggaagactgccatctcgctgtttgaaggaaaagccctgggcctggataaagccatcctccatagcatagactgctgttcatctgacgacaccaaaaagaagatgtacagctccatcctagtggtgggaggtggtttgatgtttcataaagctcaagaatttctgcagcacagaattctcaacaaaatgccaccatccttcaggcgaattattgaaaatgtggatgtgatcacaaggcctaaggacatggacccccggctgattgcatggaaaggaggggcagtgttggcttgtttggatacaacacaggaactgtggatttatcagcgagagtggcagcgctttggtgtccgcatgttacgagagcgggctgcgtttgtgtggtgaatggggaggaaatgtcactgccgaagaccaaaaacaagcttcttggtataaaagactcttacagaatatgtgtattgtaatttattgatctggatgcttaagtgtcatggacagtaaatgaatttgaactttatgttgaggacatgacattggtttgaaaatataaactgcttttgagcagtttagtcagggcatttgagaataaataggaactttctcttcagttgtaaactctcttgccctctctcagggtctcataaactccccagtgatgtaaacgttgctattgaaggttctcatgtggtgaagcccttcatttaagttggcttgaatctcatcagcaggcagcctcatgcaaccatgagggatagtatgtgacgagggagaactgtccactcatgccattttctctcttgtctagtatttcattaggatctaaagttgtctgagttaaatgcacttatgtgactcatgtgtcctcttagaatcccaaatagggggaaaaagttttggtggtttttgttttttttttcattttctgttggattacagaaaaagaatgggacccattcaggtctcgatttccaaaggtaaagatggaaggctgggcagactggcttttgttacctgacatgccgtagggtgagcttagaggaagaaagaaaacaatttttatttggccaaaacagaacaaatgctgaaaaggaaatcttgtttttttcctaaagccaaatagaaatgatttgggtataatttaagagtccttgtgttgtacagatatggtgactgatgtagttattaatactaccaacttagtcatcaagcctcaattttcctttacctgaaggattaagtgaaagcttttggagttcatgatgttcagtatgatcagttaaccttaacctctgagcatcctgaagcaaaatctaaataatgcagctattaccactggtggtccaggctctggtgaagccctctgagcccaggaggaagagaaagcattgtccagaggtaggaacacagtctgggagcccagagctctgggaggagtgggaaaatgctgcttcctgctgcttgcttctaggcacctgcttccgccatctcacttaccatggctagagatgggggtgagactggggaaggacaaaagcagggaacagataagtgatggaaatcagaagggaatatagaaagaactctggatgtggagaaatgccggtacctgagcattttgtatcaatgggagtaccctctgtaactgctcagtaggttacaaatgaagagtccaccagtattagaaacaatttaaacttgccagtaccaactgggatgtgtgccttcaatttgaaaattgtatgttttattttttaaatttgttaacagcattaatttatagagtattgatgtcatttatgtttctgaggtgtttcaacacaattttggatcagctgcctgtttgcaaaaacataatatatttctgttaaacagttcttcacctaacagcatattgctcttataactggtagagctgtttcaaaggaagttggtttctggtccaagttttgacctaaaccatgtccatcttctattaccagcacttacaagcactgtgaaaactgatcatgacaaataagtaaaatttgctacattaaacatattgcctcagccattactaagcgtccacttgtaaagctggacacagtttttactttatgcttcattttgattttttatccgtaagacataaattagaaggcatgaggtggccctttaaggataatctgcaaatatacacattttaatagtcatccatctgaaatcgatccacattccagagaagattcagtattgtgctgtgtgaaataagcattcccagaaaaaaaacatttatgctaataatacaacataacctctgcattaaagaaaaagatgcttttaggccaggcgccgtggctcacacctgtaatccctgcactttgagaggctgaggtgggtggatcatgaggtcaggagatcaagaccatcctggctaacagggtgaaaccccgtctctactaaaaatataaaaagttagctgggtgtggtggtgggtgcctgtagtcccagctactcaggaggctgaggcaggagaatggcgtgaacccggaaggcagaggttgtagtgagccgaggtcacgccactgcactccagcctgggtgacagagtgaaactctgtctcaaaaaaaaaaaatttaaaaaatttaaaaaagatgcttttagaagagtaaaaagttggaagacaaaatgtgcatcttttatgttctgtcattctgtgggggttttttcgtttgtttgttttagacagggtctgctctcacccaggatggagtgcagtggcacaatcaccgtttactgcacccttgacctccagggctcaagtgatcctcccatctcagcctccctagtagctgggaccacaggcttacaccatcacactcagctaattttttaaatcttttgtagagatggaggtctcgctttgtgacgtagcctggtcttgagcgatccttttgccttggccttgccaaagtgctgggattggaggcatgagccactgcacccacccctgttttttatttaagtaaaccattataataactcatttataaaaaggttacttcaagagggctttcaacttaagaattattttcattttgaacatgaaaagttaaatagtaactaagaaactgagaactctgacagtgacctctaataggtaactttaggcaaaagtagacaagtttgtgggtattttgttgttcatgttaaaaggcacctgtacaagaatcaagatatgaatctagtttgtagagggaaggtcttatgcaaataccaaatcatacaagtggttacacatataatagatcatttggtccagtaaaagtgggttcagcttgtttattccctacttttgttatcttaaaaacaatgattttttgcatgtaatagaaggtttttcacttaagatgctattgagtgaatcagtgaggggttcttagagttagtattcattaattaaacatagaatattagctaaacagttctgggtacactgcaatgcatggtctatggaagactagatgtttggctgaagatgctttattgttgcattatcaaaatggttatagttttcaattaaaactgtaattgatttctatgtataaaacagctttgaagttgtaaatgtagtttccaatcgttagttaatgctacattagttagcaatatttgaaaattttattggtataaaatgttttaattactaaggctgtttgtaggctgcatagtaagcttcaggatcatcacacgttttttccctgtaattggtgggataggaagcctttaaggtctcttgcttctcatgggtgggctacaaggagcagcagccatcgtggcaggcttgtgatctttttcctgctgacacctgctgcttgacatggagaagttctgcacagaaagcagtggcatccttcatgaggtggtacttggggcagacactgagagcattgtaatcgtcttttgtatcaatctctctaaagtagaccaccacgtatttgtgcagatgaatctggcttcttagatcactgcagaaaaggttaaaggcaagggggaagaggtcttgagagttctcactgggactgccctcgctcttgccacaggtaccatcgcacacactgttgacgtcattggaaagaaggaagacgactttgtctgctgccttcttttgagtggcaagccactgcactggacccatctctgctattttctttttctgccacttttcaaggatgacctcacttctgcaatggttttgaagaaattcagtgaagtaacaaattgtgtgatggaaacatatttcagatgggtaaaccacaagaaccttaatggggggcagtagtgtggtggtagaaaaggaagtcttcttgatcctttctgtgagaggagaaaagcatttgttatctgtgaacagcaaacagcaggctttcactctgtaaaccatccctgacaaatgatcccttgctagagaatgtcagctgagcaccaagggccttgttagtgacagcaaggaaaaacatcctgatgttccttttgaacacatcacctgaaacacactgatgcttaaaccttaacttttttttttttggagacatagtctcactctgtcgcccaggctggagtgcagtggcgtgacctcgg

SEQ ID NO: 9370 - protein, 513 aa, Homo sapiens
MVDQAIWSKKMSNGTRRIPVSPEQARSYNKQMRPAILDHCSGNKWTNTSHHPEYLVGEEALYVNPLDCYNIHWPIRRGQLNIHPGPGGSLTAVLADIEVIWSHAIQKYLEIPLKDLKYYRCILLIPDIYNKQHVKELVNMILMKMGFSGIVVHQESVCATYGSGLSSTCIVDVGDQKTSVCCVEDGVSHRNTRLCLAYGGSDVSRCFYWLMQRAGFPYRECQLTNKMDCLLLQHLKETFCHLDQDISGLQDHEFQIRHPDSPALLYQFRLGDEKLQAPMALFYPATFGIVGQKMTTLQHRSQGDPEDPHDEHYLLATQSKQEQSAKATADRKSASKPIGFEGDLRGQSSDLPERLHSQEVDLGSAQGDGLMAGNDSEEALTALMSRKTAISLFEGKALGLDKAILHSIDCCSSDDTKKKMYSSILVVGGGLMFHKAQEFLQHRILNKMPPSFRRIIENVDVITRPKDMDPRLIAWKGGAVLACLDTTQELWIYQREWQRFGVRMLRERAAFVW

SEQ ID NO: 9371 - DNA, 6187 bp, Homo sapiens
gcgcggtggcccttccatcccggcagtcgtggctgcagcgctgaggcgagaggttggtgggtgtctccggccataatgacccaggctgagaagggtgatacggagaacggaaaggagaagggcggcgagaaggagaaggagcagcgcggcgtgaagcggcccatcgtgcccgcgctggtgccggagtcgctgcaagagcaaatccagagcaacttcatcattgtcatacatccaggttcaacaactttaaggattggtcgagccacagacactcttcctgccagcattcctcacgtcattgcccgaagacacaaacaacaagggcagcccctatacaaggacagttggctcctaagggagggactaaataaaccagaaagtaatgaacaaagacaaaatggccttaaaatggtggatcaagcaatatggtctaaaaagatgtccaatggtacaagacgcattcctgtgtcccctgaacaggcacgctcctacaataagcagatgcgacctgcaattttagatcactgttcgggaaataagtggacaaacacatctcatcaccctgagtatttagtaggagaagaggccttgtatgttaatccactggactgttacaatattcactggcctatcagaagaggtcagttaaatattcacccaggccctgggggctctcttacagctgttctggcagatattgaagtaatatggtctcatgcgatacaaaaatacttggaaatcccactgaaagatttaaagtattatagatgtatcttgttaattcctgatatctataataagcagcatgtgaaagaactagtgaatatgatactaatgaagatgggtttttcagggattgtggtccatcaggagtctgtgtgtgccacctatggaagtggcttaagcagcacgtgtattgtagacgttggggaccagaagacaagtgtatgctgtgtggaggatggggtgtctcatcggaatactcggctttgtctggcatacggaggatctgatgtgtcaagatgtttttactggctaatgcagcgagctgggttcccttacagagaatgccagttaacaaataaaatggattgtcttcttctgcaacaccttaaagaaactttttgtcatttagatcaggacatctctgggcttcaggaccatgagtttcagattcgacatcctgattctcctgccctgctttaccagtttcgattaggagatgaaaaactgcaggctccaatggctttgttttaccccgcaacttttggaatcgttggacagaaaatgacgactttgcagcacagatctcagggcgatcctgaggatcctcacgatgaacattacctgctggccacacagagcaaacaagaacagtctgcaaaagctactgctgaccgaaagtctgcatccaaacctattggatttgaaggggatcttcgtggccagtcctctgatcttccagaaagactccattcccaggaggtagatttggggtctgcacagggagatggcctgatggccggcaacgattccgaggaggccctcactgcactgatgtccaggaagactgccatctcgctgtttgaaggaaaagccctgggcctggataaagccatcctccatagcatagactgctgttcatctgacgacaccaaaaagaagatgtacagctccatcctagtggtgggaggtggtttgatgtttcataaagctcaagaatttctgcagcacagaattctcaacaaaatgccaccatccttcaggcgaattattgaaaatgtggatgtgatcacaaggcctaaggacatggacccccggctgattgcatggaaaggaggggcagtgttggcttgtttggatacaacacaggaactgtggatttatcagcgagagtggcagcgctttggtgtccgcatgttacgagagcgggctgcgtttgtgtggtgaatggggaggaaatgtcactgccgaagaccaaaaacaagcttcttggtataaaagactcttacagaatatgtgtattgtaatttattgatctggatgcttaagtgtcatggacagtaaatgaatttgaactttatgttgaggacatgacattggtttgaaaatataaactgcttttgagcagtttagtcagggcatttgagaataaataggaactttctcttcagttgtaaactctcttgccctctctcagggtctcataaactccccagtgatgtaaacgttgctattgaaggttctcatgtggtgaagcccttcatttaagttggcttgaatctcatcagcaggcagcctcatgcaaccatgagggatagtatgtgacgagggagaactgtccactcatgccattttctctcttgtctagtatttcattaggatctaaagttgtctgagttaaatgcacttatgtgactcatgtgtcctcttagaatcccaaatagggggaaaaagttttggtggtttttgttttttttttcattttctgttggattacagaaaaagaatgggacccattcaggtctcgatttccaaaggtaaagatggaaggctgggcagactggcttttgttacctgacatgccgtagggtgagcttagaggaagaaagaaaacaatttttatttggccaaaacagaacaaatgctgaaaaggaaatcttgtttttttcctaaagccaaatagaaatgatttgggtataatttaagagtccttgtgttgtacagatatggtgactgatgtagttattaatactaccaacttagtcatcaagcctcaattttcctttacctgaaggattaagtgaaagcttttggagttcatgatgttcagtatgatcagttaaccttaacctctgagcatcctgaagcaaaatctaaataatgcagctattaccactggtggtccaggctctggtgaagccctctgagcccaggaggaagagaaagcattgtccagaggtaggaacacagtctgggagcccagagctctgggaggagtgggaaaatgctgcttcctgctgcttgcttctaggcacctgcttccgccatctcacttaccatggctagagatgggggtgagactggggaaggacaaaagcagggaacagataagtgatggaaatcagaagggaatatagaaagaactctggatgtggagaaatgccggtacctgagcattttgtatcaatgggagtaccctctgtaactgctcagtaggttacaaatgaagagtccaccagtattagaaacaatttaaacttgccagtaccaactgggatgtgtgccttcaatttgaaaattgtatgttttattttttaaatttgttaacagcattaatttatagagtattgatgtcatttatgtttctgaggtgtttcaacacaattttggatcagctgcctgtttgcaaaaacataatatatttctgttaaacagttcttcacctaacagcatattgctcttataactggtagagctgtttcaaaggaagttggtttctggtccaagttttgacctaaaccatgtccatcttctattaccagcacttacaagcactgtgaaaactgatcatgacaaataagtaaaatttgctacattaaacatattgcctcagccattactaagcgtccacttgtaaagctggacacagtttttactttatgcttcattttgattttttatccgtaagacataaattagaaggcatgaggtggccctttaaggataatctgcaaatatacacattttaatagtcatccatctgaaatcgatccacattccagagaagattcagtattgtgctgtgtgaaataagcattcccagaaaaaaaacatttatgctaataatacaacataacctctgcattaaagaaaaagatgcttttaggccaggcgccgtggctcacacctgtaatccctgcactttgagaggctgaggtgggtggatcatgaggtcaggagatcaagaccatcctggctaacagggtgaaaccccgtctctactaaaaatataaaaagttagctgggtgtggtggtgggtgcctgtagtcccagctactcaggaggctgaggcaggagaatggcgtgaacccggaaggcagaggttgtagtgagccgaggtcacgccactgcactccagcctgggtgacagagtgaaactctgtctcaaaaaaaaaaaatttaaaaaatttaaaaaagatgcttttagaagagtaaaaagttggaagacaaaatgtgcatcttttatgttctgtcattctgtgggggttttttcgtttgtttgttttagacagggtctgctctcacccaggatggagtgcagtggcacaatcaccgtttactgcacccttgacctccagggctcaagtgatcctcccatctcagcctccctagtagctgggaccacaggcttacaccatcacactcagctaattttttaaatcttttgtagagatggaggtctcgctttgtgacgtagcctggtcttgagcgatccttttgccttggccttgccaaagtgctgggattggaggcatgagccactgcacccacccctgttttttatttaagtaaaccattataataactcatttataaaaaggttacttcaagagggctttcaacttaagaattattttcattttgaacatgaaaagttaaatagtaactaagaaactgagaactctgacagtgacctctaataggtaactttaggcaaaagtagacaagtttgtgggtattttgttgttcatgttaaaaggcacctgtacaagaatcaagatatgaatctagtttgtagagggaaggtcttatgcaaataccaaatcatacaagtggttacacatataatagatcatttggtccagtaaaagtgggttcagcttgtttattccctacttttgttatcttaaaaacaatgattttttgcatgtaatagaaggtttttcacttaagatgctattgagtgaatcagtgaggggttcttagagttagtattcattaattaaacatagaatattagctaaacagttctgggtacactgcaatgcatggtctatggaagactagatgtttggctgaagatgctttattgttgcattatcaaaatggttatagttttcaattaaaactgtaattgatttctatgtataaaacagctttgaagttgtaaatgtagtttccaatcgttagttaatgctacattagttagcaatatttgaaaattttattggtataaaatgttttaattactaaggctgtttgtaggctgcatagtaagcttcaggatcatcacacgttttttccctgtaattggtgggataggaagcctttaaggtctcttgcttctcatgggtgggctacaaggagcagcagccatcgtggcaggcttgtgatctttttcctgctgacacctgctgcttgacatggagaagttctgcacagaaagcagtggcatccttcatgaggtggtacttggggcagacactgagagcattgtaatcgtcttttgtatcaatctctctaaagtagaccaccacgtatttgtgcagatgaatctggcttcttagatcactgcagaaaaggttaaaggcaagggggaagaggtcttgagagttctcactgggactgccctcgctcttgccacaggtaccatcgcacacactgttgacgtcattggaaagaaggaagacgactttgtctgctgccttcttttgagtggcaagccactgcactggacccatctctgctattttctttttctgccacttttcaaggatgacctcacttctgcaatggttttgaagaaattcagtgaagtaacaaattgtgtgatggaaacatatttcagatgggtaaaccacaagaaccttaatggggggcagtagtgtggtggtagaaaaggaagtcttcttgatcctttctgtgagaggagaaaagcatttgttatctgtgaacagcaaacagcaggctttcactctgtaaaccatccctgacaaatgatcccttgctagagaatgtcagctgagcaccaagggccttgttagtgacagcaaggaaaaacatcctgatgttccttttgaacacatcacctgaaacacactgatgcttaaaccttaacttttttttttttggagacatagtctcactctgtcgcccaggctggagtgcagtggcgtgacctcgg

SEQ ID NO: 9372 - protein, 624 aa, Homo sapiens; identical to SEQ ID NO: 790

SEQ ID NO: 9373 - DNA, 5095 bp, Homo sapiens
gcgcgccgggacgccgagggctgggaggtgcggagcgccaggagccaggcggagcccccgcagggacaccgctccgatctcccgcacgccccaccgtctggttgtgtgcgctcctgcccgggctctggcctcagcttccccgaccataaaacgaccacggttcaacaactttaaggattggtcgagccacagacactcttcctgccagcattcctcacgtcattgcccgaagacacaaacaacaagggcagcccctatacaaggacagttggctcctaagggagggactaaataaaccagaaagtaatgaacaaagacaaaatggccttaaaatggtggatcaagcaatatggtctaaaaagatgtccaatggtacaagacgcattcctgtgtcccctgaacaggcacgctcctacaataagcagatgcgacctgcaattttagatcactgttcgggaaataagtggacaaacacatctcatcaccctgagtatttagtaggagaagaggccttgtatgttaatccactggactgttacaatattcactggcctatcagaagaggtcagttaaatattcacccaggccctgggggctctcttacagctgttctggcagatattgaagtaatatggtctcatgcgatacaaaaatacttggaaatcccactgaaagatttaaagtattatagatgtatcttgttaattcctgatatctataataagcagcatgtgaaagaactagtgaatatgatactaatgaagatgggtttttcagggattgtggtccatcaggagtctgtgtgtgccacctatggaagtggcttaagcagcacgtgtattgtagacgttggggaccagaagacaagtgtatgctgtgtggaggatggggtgtctcatcggaatactcggctttgtctggcatacggaggatctgatgtgtcaagatgtttttactggctaatgcagcgagctgggttcccttacagagaatgccagttaacaaataaaatggattgtcttcttctgcaacaccttaaagaaactttttgtcatttagatcaggacatctctgggcttcaggaccatgagtttcagattcgacatcctgattctcctgccctgctttaccagtttcgattaggagatgaaaaactgcaggctccaatggctttgttttaccccgcaacttttggaatcgttggacagaaaatgacgactttgcagcacagatctcagggcgatcctgaggatcctcacgatgaacattacctgctggccacacagagcaaacaagaacagtctgcaaaagctactgctgaccgaaagtctgcatccaaacctattggatttgaaggggatcttcgtggccagtcctctgatcttccagaaagactccattcccaggaggtagatttggggtctgcacagggagatggcctgatggccggcaacgattccgaggaggccctcactgcactgatgtccaggaagactgccatctcgctgtttgaaggaaaagccctgggcctggataaagccatcctccatagcatagactgctgttcatctgacgacaccaaaaagaagatgtacagctccatcctagtggtgggaggtggtttgatgtttcataaagctcaagaatttctgcagcacagaattctcaacaaaatgccaccatccttcaggcgaattattgaaaatgtggatgtgatcacaaggcctaaggacatggacccccggctgattgcatggaaaggaggggcagtgttggcttgtttggatacaacacaggaactgtggatttatcagcgagagtggcagcgctttggtgtccgcatgttacgagagcgggctgcgtttgtgtggtgaatggggaggaaatgtcactgccgaagaccaaaaacaagcttcttggtataaaagactcttacagaatatgtgtattgtaatttattgatctggatgcttaagtgtcatggacagtaaatgaatttgaactttatgttgaggacatgacattggtttgaaaatataaactgcttttgagcagtttagtcagggcatttgagaataaataggaactttctcttcagttgtaaactctcttgccctctctcagggtctcataaactccccagtgatgtaaacgttgctattgaaggttctcatgtggtgaagcccttcatttaagttggcttgaatctcatcagcaggcagcctcatgcaaccatgagggatagtatgtgacgagggagaactgtccactcatgccattttctctcttgtctagtatttcattaggatctaaagttgtctgagttaaatgcacttatgtgactcatgtgtcctcttagaatcccaaatagggggaaaaagttttggtggtttttgttttttttttcattttctgttggattacagaaaaagaatgggacccattcaggtctcgatttccaaaggtaaagatggaaggctgggcagactggcttttgttacctgacatgccgtagggtgagcttagaggaagaaagaaaacaatttttatttggccaaaacagaacaaatgctgaaaaggaaatcttgtttttttcctaaagccaaatagaaatgatttgggtataatttaagagtccttgtgttgtacagatatggtgactgatgtagttattaatactaccaacttagtcatcaagcctcaattttcctttacctgaaggattaagtgaaagcttttggagttcatgatgttcagtatgatcagttaaccttaacctctgagcatcctgaagcaaaatctaaataatgcagctattaccactggtggtccaggctctggtgaagccctctgagcccaggaggaagagaaagcattgtccagaggtaggaacacagtctgggagcccagagctctgggaggagtgggaaaatgctgcttcctgctgcttgcttctaggcacctgcttccgccatctcacttaccatggctagagatgggggtgagactggggaaggacaaaagcagggaacagataagtgatggaaatcagaagggaatatagaaagaactctggatgtggagaaatgccggtacctgagcattttgtatcaatgggagtaccctctgtaactgctcagtaggttacaaatgaagagtccaccagtattagaaacaatttaaacttgccagtaccaactgggatgtgtgccttcaatttgaaaattgtatgttttattttttaaatttgttaacagcattaatttatagagtattgatgtcatttatgtttctgaggtgtttcaacacaattttggatcagctgcctgtttgcaaaaacataatatatttctgttaaacagttcttcacctaacagcatattgctcttataactggtagagctgtttcaaaggaagttggtttctggtccaagttttgacctaaaccatgtccatcttctattaccagcacttacaagcactgtgaaaactgatcatgacaaataagtaaaatttgctacattaaacatattgcctcagccattactaagcgtccacttgtaaagctggacacagtttttactttatgcttcattttgattttttatccgtaagacataaattagaaggcatgaggtggccctttaaggataatctgcaaatatacacattttaatagtcatccatctgaaatcgatccacattccagagaagattcagtattgtgctgtgtgaaataagcattcccagaaaaaaaacatttatgctaataatacaacataacctctgcattaaagaaaaagatgcttttaggccaggcgccgtggctcacacctgtaatccctgcactttgagaggctgaggtgggtggatcatgaggtcaggagatcaagaccatcctggctaacagggtgaaaccccgtctctactaaaaatataaaaagttagctgggtgtggtggtgggtgcctgtagtcccagctactcaggaggctgaggcaggagaatggcgtgaacccggaaggcagaggttgtagtgagccgaggtcacgccactgcactccagcctgggtgacagagtgaaactctgtctcaaaaaaaaaaaatttaaaaaatttaaaaaagatgcttttagaagagtaaaaagttggaagacaaaatgtgcatcttttatgttctgtcattctgtgggggttttttcgtttgtttgttttagacagggtctgctctcacccaggatggagtgcagtggcacaatcaccgtttactgcacccttgacctccagggctcaagtgatcctcccatctcagcctccctagtagctgggaccacaggcttacaccatcacactcagctaattttttaaatcttttgtagagatggaggtctcgctttgtgacgtagcctggtcttgagcgatccttttgccttggccttgccaaagtgctgggattggaggcatgagccactgcacccacccctgttttttatttaagtaaaccattataataactcatttataaaaaggttacttcaagagggctttcaacttaagaattattttcattttgaacatgaaaagttaaatagtaactaagaaactgagaactctgacagtgacctctaataggtaactttaggcaaaagtagacaagtttgtgggtattttgttgttcatgttaaaaggcacctgtacaagaatcaagatatgaatctagtttgtagagggaaggtcttatgcaaataccaaatcatacaagtggttacacatataatagatcatttggtccagtaaaagtgggttcagcttgtttattccctacttttgttatcttaaaaacaatgattttttgcatgtaatagaaggtttttcacttaagatgctattgagtgaatcagtgaggggttcttagagttagtattcattaattaaacatagaatattagctaaacagttctgggtacactgcaatgcatggtctatggaagactagatgtttggctgaagatgctttattgttgcattatcaaaatggttatagttttcaattaaaactgtaattgatttctatgtataaaacagctttgaagttgt

SEQ ID NO: 9374 - protein, 513 aa, Homo sapiens; identical to SEQ ID NO: 9370

SEQ ID NO: 9375 - DNA, 5171 bp, Homo sapiens
gcgcggtggcccttccatcccggcagtcgtggctgcagcgctgaggcgagaggttggtgggtgtctccggccataatgacccaggctgagaagggtgatacggagaacggaaaggagaagggcggcgagaaggagaaggagcagcgcggcgtgaagcggcccatcgtgcccgcgctggtgccggagtcgctgcaagagcaaatccagagcaacttcatcattgtcatacatccaggttcaacaactttaaggattggtcgagccacagacactcttcctgccagcattcctcacgtcattgcccgaagacacaaacaacaagggcagcccctatacaaggacagttggctcctaagggagggactaaataaaccagaaagtaatgaacaaagacaaaatggccttaaaatggtggatcaagcaatatggtctaaaaagatgtccaatggtacaagacgcattcctgtgtcccctgaacaggcacgctcctacaataagcagatgcgacctgcaattttagatcactgttcgggaaataagtggacaaacacatctcatcaccctgagtatttagtaggagaagaggccttgtatgttaatccactggactgttacaatattcactggcctatcagaagaggtcagttaaatattcacccaggccctgggggctctcttacagctgttctggcagatattgaagtaatatggtctcatgcgatacaaaaatacttggaaatcccactgaaagatttaaagtattatagatgtatcttgttaattcctgatatctataataagcagcatgtgaaagaactagtgaatatgatactaatgaagatgggtttttcagggattgtggtccatcaggagtctgtgtgtgccacctatggaagtggcttaagcagcacgtgtattgtagacgttggggaccagaagacaagtgtatgctgtgtggaggatggggtgtctcatcggaatactcggctttgtctggcatacggaggatctgatgtgtcaagatgtttttactggctaatgcagcgagctgggttcccttacagagaatgccagttaacaaataaaatggattgtcttcttctgcaacaccttaaagaaactttttgtcatttagatcaggacatctctgggcttcaggaccatgagtttcagattcgacatcctgattctcctgccctgctttaccagtttcgattaggagatgaaaaactgcaggctccaatggctttgttttaccccgcaacttttggaatcgttggacagaaaatgacgactttgcagcacagatctcagggcgatcctgaggatcctcacgatgaacattacctgctggccacacagagcaaacaagaacagtctgcaaaagctactgctgaccgaaagtctgcatccaaacctattggatttgaaggggatcttcgtggccagtcctctgatcttccagaaagactccattcccaggaggtagatttggggtctgcacagggagatggcctgatggccggcaacgattccgaggaggccctcactgcactgatgtccaggaagactgccatctcgctgtttgaaggaaaagccctgggcctggataaagccatcctccatagcatagactgctgttcatctgacgacaccaaaaagaagatgtacagctccatcctagtggtgggaggtggtttgatgtttcataaagctcaagaatttctgcagcacagaattctcaacaaaatgccaccatccttcaggcgaattattgaaaatgtggatgtgatcacaaggcctaaggacatggacccccggctgattgcatggaaaggaggggcagtgttggcttgtttggatacaacacaggaactgtggatttatcagcgagagtggcagcgctttggtgtccgcatgttacgagagcgggctgcgtttgtgtggtgaatggggaggaaatgtcactgccgaagaccaaaaacaagcttcttggtataaaagactcttacagaatatgtgtattgtaatttattgatctggatgcttaagtgtcatggacagtaaatgaatttgaactttatgttgaggacatgacattggtttgaaaatataaactgcttttgagcagtttagtcagggcatttgagaataaataggaactttctcttcagttgtaaactctcttgccctctctcagggtctcataaactccccagtgatgtaaacgttgctattgaaggttctcatgtggtgaagcccttcatttaagttggcttgaatctcatcagcaggcagcctcatgcaaccatgagggatagtatgtgacgagggagaactgtccactcatgccattttctctcttgtctagtatttcattaggatctaaagttgtctgagttaaatgcacttatgtgactcatgtgtcctcttagaatcccaaatagggggaaaaagttttggtggtttttgttttttttttcattttctgttggattacagaaaaagaatgggacccattcaggtctcgatttccaaaggtaaagatggaaggctgggcagactggcttttgttacctgacatgccgtagggtgagcttagaggaagaaagaaaacaatttttatttggccaaaacagaacaaatgctgaaaaggaaatcttgtttttttcctaaagccaaatagaaatgatttgggtataatttaagagtccttgtgttgtacagatatggtgactgatgtagttattaatactaccaacttagtcatcaagcctcaattttcctttacctgaaggattaagtgaaagcttttggagttcatgatgttcagtatgatcagttaaccttaacctctgagcatcctgaagcaaaatctaaataatgcagctattaccactggtggtccaggctctggtgaagccctctgagcccaggaggaagagaaagcattgtccagaggtaggaacacagtctgggagcccagagctctgggaggagtgggaaaatgctgcttcctgctgcttgcttctaggcacctgcttccgccatctcacttaccatggctagagatgggggtgagactggggaaggacaaaagcagggaacagataagtgatggaaatcagaagggaatatagaaagaactctggatgtggagaaatgccggtacctgagcattttgtatcaatgggagtaccctctgtaactgctcagtaggttacaaatgaagagtccaccagtattagaaacaatttaaacttgccagtaccaactgggatgtgtgccttcaatttgaaaattgtatgttttattttttaaatttgttaacagcattaatttatagagtattgatgtcatttatgtttctgaggtgtttcaacacaattttggatcagctgcctgtttgcaaaaacataatatatttctgttaaacagttcttcacctaacagcatattgctcttataactggtagagctgtttcaaaggaagttggtttctggtccaagttttgacctaaaccatgtccatcttctattaccagcacttacaagcactgtgaaaactgatcatgacaaataagtaaaatttgctacattaaacatattgcctcagccattactaagcgtccacttgtaaagctggacacagtttttactttatgcttcattttgattttttatccgtaagacataaattagaaggcatgaggtggccctttaaggataatctgcaaatatacacattttaatagtcatccatctgaaatcgatccacattccagagaagattcagtattgtgctgtgtgaaataagcattcccagaaaaaaaacatttatgctaataatacaacataacctctgcattaaagaaaaagatgcttttaggccaggcgccgtggctcacacctgtaatccctgcactttgagaggctgaggtgggtggatcatgaggtcaggagatcaagaccatcctggctaacagggtgaaaccccgtctctactaaaaatataaaaagttagctgggtgtggtggtgggtgcctgtagtcccagctactcaggaggctgaggcaggagaatggcgtgaacccggaaggcagaggttgtagtgagccgaggtcacgccactgcactccagcctgggtgacagagtgaaactctgtctcaaaaaaaaaaaatttaaaaaatttaaaaaagatgcttttagaagagtaaaaagttggaagacaaaatgtgcatcttttatgttctgtcattctgtgggggttttttcgtttgtttgttttagacagggtctgctctcacccaggatggagtgcagtggcacaatcaccgtttactgcacccttgacctccagggctcaagtgatcctcccatctcagcctccctagtagctgggaccacaggcttacaccatcacactcagctaattttttaaatcttttgtagagatggaggtctcgctttgtgacgtagcctggtcttgagcgatccttttgccttggccttgccaaagtgctgggattggaggcatgagccactgcacccacccctgttttttatttaagtaaaccattataataactcatttataaaaaggttacttcaagagggctttcaacttaagaattattttcattttgaacatgaaaagttaaatagtaactaagaaactgagaactctgacagtgacctctaataggtaactttaggcaaaagtagacaagtttgtgggtattttgttgttcatgttaaaaggcacctgtacaagaatcaagatatgaatctagtttgtagagggaaggtcttatgcaaataccaaatcatacaagtggttacacatataatagatcatttggtccagtaaaagtgggttcagcttgtttattccctacttttgttatcttaaaaacaatgattttttgcatgtaatagaaggtttttcacttaagatgctattgagtgaatcagtgaggggttcttagagttagtattcattaattaaacatagaatattagctaaacagttctgggtacactgcaatgcatggtctatggaagactagatgtttggctgaagatgctttattgttgcattatcaaaatggttatagttttcaattaaaactgtaattgatttctatgtataaaacagctttgaagttgt

SEQ ID NO: 9376 - protein, 624 aa, Homo sapiens; identical to SEQ ID NO: 790

SEQ ID NO: 9377 - DNA, 519 bp, Homo sapiens
gctgagtgtgatggtgtaagcctgtggtcccagctactagggaggctgagatgggattacaggtgtgagccacggcgcctggcctaaaagcatctttttctttaatgcagaggttatgttgtattattagcataaatgttttttttctgggaatgcttatttcacacagcacaatactgaatcttctctggaatgtggatcgatttcagatggatgactattaaaatgtgtatatttgcagattatccttaaagggccacctcatgccttctaatttatgtcttacggataaaaaatcaaaatgaagcataaagtaaaaactgtgtccagctttacaagtggacgcttagtaatggctgaggcaatatgtttaatgtagcaaattttacttatttgtcatgatcagttttcacagtgcttgtaagtgctggtaatagaagatggacatggtttaggtcaaaacttggaccagaaaccaacttcctttgaaacagctctaccagttataagagcaatatg

SEQ ID NO: 9378 - protein, 39 aa, Homo sapiens
MQRLCCIISINVFFLGMLISHSTILNLLWNVDRFQMDDY

SEQ ID NO: 9379 - DNA, 3524 bp, Homo sapiens
gcgcgccgggacgccgagggctgggaggtgcggagcgccaggagccaggcggagcccccgcagggacaccgctccgatctcccgcacgccccaccgtctggttgtgtgcgctcctgcccgggctctggcctcagcttccccgaccataaaacgaccacggttcaacaactttaaggattggtcgagccacagacactcttcctgccagcattcctcacgtcattgcccgaagacacaaacaacaagggcagcccctatacaaggacagttggctcctaagggagggactaaataaaccagaaagtaatgaacaaagacaaaatggccttaaaatggtggatcaagcaatatggtctaaaaagatgtccaatggtacaagacgcattcctgtgtcccctgaacaggcacgctcctacaataagcagatgcgacctgcaattttagatcactgttcgggaaataagtggacaaacacatctcatcaccctgagtatttagtaggagaagaggccttgtatgttaatccactggactgttacaatattcactggcctatcagaagaggtcagttaaatattcacccaggccctgggggctctcttacagctgttctggcagatattgaagtaatatggtctcatgcgatacaaaaatacttggaaatcccactgaaagatttaaagtattatagatgtatcttgttaattcctgatatctataataagcagcatgtgaaagaactagtgaatatgatactaatgaagatgggtttttcagggattgtggtccatcaggagtctgtgtgtgccacctatggaagtggcttaagcagcacgtgtattgtagacgttggggaccagaagacaagtgtatgctgtgtggaggatggggtgtctcatcggaatactcggctttgtctggcatacggaggatctgatgtgtcaagatgtttttactggctaatgcagcgagctgggttcccttacagagaatgccagttaacaaataaaatggattgtcttcttctgcaacaccttaaagaaactttttgtcatttagatcaggacatctctgggcttcaggaccatgagtttcagattcgacatcctgattctcctgccctgctttaccagtttcgattaggagatgaaaaactgcaggctccaatggctttgttttaccccgcaacttttggaatcgttggacagaaaatgacgactttgcagcacagatctcagggcgatcctgaggatcctcacgatgaacattacctgctggccacacagagcaaacaagaacagtctgcaaaagctactgctgaccgaaagtctgcatccaaacctattggatttgaaggggatcttcgtggccagtcctctgatcttccagaaagactccattcccaggaggtagatttggggtctgcacagggagatggcctgatggccggcaacgattccgaggaggccctcactgcactgatgtccaggaagactgccatctcgctgtttgaaggaaaagccctgggcctggataaagccatcctccatagcatagactgctgttcatctgacgacaccaaaaagaagatgtacagctccatcctagtggtgggaggtggtttgatgtttcataaagctcaagaatttctgcagcacagaattctcaacaaaatgccaccatccttcaggcgaattattgaaaatgtggatgtgatcacaaggcctaaggacatggacccccggctgattgcatggaaaggaggggcagtgttggcttgtttggatacaacacaggaactgtggatttatcagcgagagtggcagcgctttggtgtccgcatgttacgagagcgggctgcgtttgtgtggtgaatggggaggaaatgtcactgccgaagaccaaaaacaagcttcttggtataaaagactcttacagaatatgtgtattgtaatttattgatctggatgcttaagtgtcatggacagtaaatgaatttgaactttatgttgaggacatgacattggtttgaaaatataaactgcttttgagcagtttagtcagggcatttgagaataaataggaactttctcttcagttgtaaactctcttgccctctctcagggtctcataaactccccagtgatgtaaacgttgctattgaaggttctcatgtggtgaagcccttcatttaagttggcttgaatctcatcagcaggcagcctcatgcaaccatgagggatagtatgtgacgagggagaactgtccactcatgccattttctctcttgtctagtatttcattaggatctaaagttgtctgagttaaatgcacttatgtgactcatgtgtcctcttagaatcccaaatagggggaaaaagttttggtggtttttgttttttttttcattttctgttggattacagaaaaagaatgggacccattcaggtctcgatttccaaaggtaaagatggaaggctgggcagactggcttttgttacctgacatgccgtagggtgagcttagaggaagaaagaaaacaatttttatttggccaaaacagaacaaatgctgaaaaggaaatcttgtttttttcctaaagccaaatagaaatgatttgggtataatttaagagtccttgtgttgtacagatatggtgactgatgtagttattaatactaccaacttagtcatcaagcctcaattttcctttacctgaaggattaagtgaaagcttttggagttcatgatgttcagtatgatcagttaaccttaacctctgagcatcctgaagcaaaatctaaataatgcagctattaccactggtggtccaggctctggtgaagccctctgagcccaggaggaagagaaagcattgtccagaggtaggaacacagtctgggagcccagagctctgggaggagtgggaaaatgctgcttcctgctgcttgcttctaggcacctgcttccgccatctcacttaccatggctagagatgggggtgagactggggaaggacaaaagcagggaacagataagtgatggaaatcagaagggaatatagaaagaactctggatgtggagaaatgccggtacctgagcattttgtatcaatgggagtaccctctgtaactgctcagtaggttacaaatgaagagtccaccagtattagaaacaatttaaacttgccagtaccaactgggatgtgtgccttcaatttgaaaattgtatgttttattttttaaatttgttaacagcattaatttatagagtattgatgtcatttatgtttctgaggtgtttcaacacaattttggatcagctgcctgtttgcaaaaacataatatatttctgttaaacagttcttcacctaacagcatattgctcttataactggtagagctgtttcaaaggaagttggtttctggtccaagttttgacctaaaccatgtccatcttctattaccagcacttacaagcactgtgaaaactgatcatgacaaataagtaaaatttgctacatt

SEQ ID NO: 9380 - protein, 513 aa, Homo sapiens; identical to SEQ ID NO: 9370

SEQ ID NO: 9381 - DNA, 3600 bp, Homo sapiens
gcgcggtggcccttccatcccggcagtcgtggctgcagcgctgaggcgagaggttggtgggtgtctccggccataatgacccaggctgagaagggtgatacggagaacggaaaggagaagggcggcgagaaggagaaggagcagcgcggcgtgaagcggcccatcgtgcccgcgctggtgccggagtcgctgcaagagcaaatccagagcaacttcatcattgtcatacatccaggttcaacaactttaaggattggtcgagccacagacactcttcctgccagcattcctcacgtcattgcccgaagacacaaacaacaagggcagcccctatacaaggacagttggctcctaagggagggactaaataaaccagaaagtaatgaacaaagacaaaatggccttaaaatggtggatcaagcaatatggtctaaaaagatgtccaatggtacaagacgcattcctgtgtcccctgaacaggcacgctcctacaataagcagatgcgacctgcaattttagatcactgttcgggaaataagtggacaaacacatctcatcaccctgagtatttagtaggagaagaggccttgtatgttaatccactggactgttacaatattcactggcctatcagaagaggtcagttaaatattcacccaggccctgggggctctcttacagctgttctggcagatattgaagtaatatggtctcatgcgatacaaaaatacttggaaatcccactgaaagatttaaagtattatagatgtatcttgttaattcctgatatctataataagcagcatgtgaaagaactagtgaatatgatactaatgaagatgggtttttcagggattgtggtccatcaggagtctgtgtgtgccacctatggaagtggcttaagcagcacgtgtattgtagacgttggggaccagaagacaagtgtatgctgtgtggaggatggggtgtctcatcggaatactcggctttgtctggcatacggaggatctgatgtgtcaagatgtttttactggctaatgcagcgagctgggttcccttacagagaatgccagttaacaaataaaatggattgtcttcttctgcaacaccttaaagaaactttttgtcatttagatcaggacatctctgggcttcaggaccatgagtttcagattcgacatcctgattctcctgccctgctttaccagtttcgattaggagatgaaaaactgcaggctccaatggctttgttttaccccgcaacttttggaatcgttggacagaaaatgacgactttgcagcacagatctcagggcgatcctgaggatcctcacgatgaacattacctgctggccacacagagcaaacaagaacagtctgcaaaagctactgctgaccgaaagtctgcatccaaacctattggatttgaaggggatcttcgtggccagtcctctgatcttccagaaagactccattcccaggaggtagatttggggtctgcacagggagatggcctgatggccggcaacgattccgaggaggccctcactgcactgatgtccaggaagactgccatctcgctgtttgaaggaaaagccctgggcctggataaagccatcctccatagcatagactgctgttcatctgacgacaccaaaaagaagatgtacagctccatcctagtggtgggaggtggtttgatgtttcataaagctcaagaatttctgcagcacagaattctcaacaaaatgccaccatccttcaggcgaattattgaaaatgtggatgtgatcacaaggcctaaggacatggacccccggctgattgcatggaaaggaggggcagtgttggcttgtttggatacaacacaggaactgtggatttatcagcgagagtggcagcgctttggtgtccgcatgttacgagagcgggctgcgtttgtgtggtgaatggggaggaaatgtcactgccgaagaccaaaaacaagcttcttggtataaaagactcttacagaatatgtgtattgtaatttattgatctggatgcttaagtgtcatggacagtaaatgaatttgaactttatgttgaggacatgacattggtttgaaaatataaactgcttttgagcagtttagtcagggcatttgagaataaataggaactttctcttcagttgtaaactctcttgccctctctcagggtctcataaactccccagtgatgtaaacgttgctattgaaggttctcatgtggtgaagcccttcatttaagttggcttgaatctcatcagcaggcagcctcatgcaaccatgagggatagtatgtgacgagggagaactgtccactcatgccattttctctcttgtctagtatttcattaggatctaaagttgtctgagttaaatgcacttatgtgactcatgtgtcctcttagaatcccaaatagggggaaaaagttttggtggtttttgttttttttttcattttctgttggattacagaaaaagaatgggacccattcaggtctcgatttccaaaggtaaagatggaaggctgggcagactggcttttgttacctgacatgccgtagggtgagcttagaggaagaaagaaaacaatttttatttggccaaaacagaacaaatgctgaaaaggaaatcttgtttttttcctaaagccaaatagaaatgatttgggtataatttaagagtccttgtgttgtacagatatggtgactgatgtagttattaatactaccaacttagtcatcaagcctcaattttcctttacctgaaggattaagtgaaagcttttggagttcatgatgttcagtatgatcagttaaccttaacctctgagcatcctgaagcaaaatctaaataatgcagctattaccactggtggtccaggctctggtgaagccctctgagcccaggaggaagagaaagcattgtccagaggtaggaacacagtctgggagcccagagctctgggaggagtgggaaaatgctgcttcctgctgcttgcttctaggcacctgcttccgccatctcacttaccatggctagagatgggggtgagactggggaaggacaaaagcagggaacagataagtgatggaaatcagaagggaatatagaaagaactctggatgtggagaaatgccggtacctgagcattttgtatcaatgggagtaccctctgtaactgctcagtaggttacaaatgaagagtccaccagtattagaaacaatttaaacttgccagtaccaactgggatgtgtgccttcaatttgaaaattgtatgttttattttttaaatttgttaacagcattaatttatagagtattgatgtcatttatgtttctgaggtgtttcaacacaattttggatcagctgcctgtttgcaaaaacataatatatttctgttaaacagttcttcacctaacagcatattgctcttataactggtagagctgtttcaaaggaagttggtttctggtccaagttttgacctaaaccatgtccatcttctattaccagcacttacaagcactgtgaaaactgatcatgacaaataagtaaaatttgctacatt

SEQ ID NO: 9382 - protein, 624 aa, Homo sapiens; identical to SEQ ID NO: 790

SEQ ID NO: 9383 - DNA, 688 bp, Homo sapiens
cgtagggttcccctggctgcagtgtggagggtgggctggagggaaatctttgagaaggctattgcacttgctcaagcaagaggtgttggtggcttggcctagaattatggatgtggagaaaaaagcatggaggatgtcaactgtcttttcagcatctgacgacaccaaaaagaagatgtacagctccatcctagtggtgggaggtggtttgatgtttcataaagctcaagaatttctgcagcacagaattctcaacaaaatgccaccatccttcaggcgaattattgaaaatgtggatgtgatcacaaggcctaaggacatggacccccggctgattgcatggaaaggaggggcagtgttggcttgtttggatacaacacaggaactgtggatttatcagcgagagtggcagcgctttggtgtccgcatgttacgagagcgggctgcgtttgtgtggtgaatggggaggaaatgtcactgccgaagaccaaaaacaagcttcttggtataaaagactcttacagaatatgtgtattgtaatttattgatctggatgcttaagtgtcatggacagtaaatgaatttgaactttatgttgaggacatgacattggtttgaaaatataaactgcttttgagcagtttagtcagggcatttgagaataaataggaactttctcttcagttgt

SEQ ID NO: 9384 - protein, 117 aa, Homo sapiens
MDVEKKAWRMSTVFSASDDTKKKMYSSILVVGGGLMFHKAQEFLQHRILNKMPPSFRRIIENVDVITRPKDMDPRLIAWKGGAVLACLDTTQELWIYQREWQRFGVRMLRERAAFVW

SEQ ID NO: 9385 - DNA, 2102 bp, Homo sapiens
gcgcgccgggacgccgagggctgggaggtgcggagcgccaggagccaggcggagcccccgcagggacaccgctccgatctcccgcacgccccaccgtctggttgtgtgcgctcctgcccgggctctggcctcagcttccccgaccataaaacgaccacggttcaacaactttaaggattggtcgagccacagacactcttcctgccagcattcctcacgtcattgcccgaagacacaaacaacaagggcagcccctatacaaggacagttggctcctaagggagggactaaataaaccagaaagtaatgaacaaagacaaaatggccttaaaatggtggatcaagcaatatggtctaaaaagatgtccaatggtacaagacgcattcctgtgtcccctgaacaggcacgctcctacaataagcagatgcgacctgcaattttagatcactgttcgggaaataagtggacaaacacatctcatcaccctgagtatttagtaggagaagaggccttgtatgttaatccactggactgttacaatattcactggcctatcagaagaggtcagttaaatattcacccaggccctgggggctctcttacagctgttctggcagatattgaagtaatatggtctcatgcgatacaaaaatacttggaaatcccactgaaagatttaaagtattatagatgtatcttgttaattcctgatatctataataagcagcatgtgaaagaactagtgaatatgatactaatgaagatgggtttttcagggattgtggtccatcaggagtctgtgtgtgccacctatggaagtggcttaagcagcacgtgtattgtagacgttggggaccagaagacaagtgtatgctgtgtggaggatggggtgtctcatcggaatactcggctttgtctggcatacggaggatctgatgtgtcaagatgtttttactggctaatgcagcgagctgggttcccttacagagaatgccagttaacaaataaaatggattgtcttcttctgcaacaccttaaagaaactttttgtcatttagatcaggacatctctgggcttcaggaccatgagtttcagattcgacatcctgattctcctgccctgctttaccagtttcgattaggagatgaaaaactgcaggctccaatggctttgttttaccccgcaacttttggaatcgttggacagaaaatgacgactttgcagcacagatctcagggcgatcctgaggatcctcacgatgaacattacctgctggccacacagagcaaacaagaacagtctgcaaaagctactgctgaccgaaagtctgcatccaaacctattggatttgaaggggatcttcgtggccagtcctctgatcttccagaaagactccattcccaggaggtagatttggggtctgcacagggagatggcctgatggccggcaacgattccgaggaggccctcactgcactgatgtccaggaagactgccatctcgctgtttgaaggaaaagccctgggcctggataaagccatcctccatagcatagactgctgttcatctgacgacaccaaaaagaagatgtacagctccatcctagtggtgggaggtggtttgatgtttcataaagctcaagaatttctgcagcacagaattctcaacaaaatgccaccatccttcaggcgaattattgaaaatgtggatgtgatcacaaggcctaaggacatggacccccggctgattgcatggaaaggaggggcagtgttggcttgtttggatacaacacaggaactgtggatttatcagcgagagtggcagcgctttggtgtccgcatgttacgagagcgggctgcgtttgtgtggtgaatggggaggaaatgtcactgccgaagaccaaaaacaagcttcttggtataaaagactcttacagaatatgtgtattgtaatttattgatctggatgcttaagtgtcatggacagtaaatgaatttgaactttatgttgaggacatgacattggtttgaaaatataaactgcttttgagcagtttagtcagggcatttgagaataaataggaactttctcttcagttgt

SEQ ID NO: 9386 - protein, 513 aa, Homo sapiens; identical to SEQ ID NO: 9370

SEQ ID NO: 9387 - DNA, 1520 bp, Homo sapiens
ctcatctttatattcacgaaaaagcaatctgaagaaaacaaataaaagcctgtgtatttagcactgttagtgtcaccttttcaacttctgaaacactgttcattgttaactttttctcatttataaatcactgtatttattttagtagtatgcatagcatatctgtgctcttgaattaatttttatctttaacatatttgtctcatcaatctttaatacactgtgtctaatttgctaccaaatgtaattatcagggtatttataaaaccatagctaacaaaactgagctacaaaatgaaaatttactaaatagtttttaaaatcatggacttcagcctggcgcggtggctcatgcctgtaatcccagcactgtgggaggctgaggcgggcagatcgcctaagttcacgagtttgagaccagcctgcagcatgacgaaacctaaaataacaaaaattagccaggcgtggtagagtgcacctgtaatccctgctactcaggaggcggaggcaggagaatcgcttcaacccgggaggcggaggttgctgtgagcatgccactgcactcctgcctaggcaacagagtgagaccctgtctcaaaaaaataaataaaaccatgggcttccatgctatcttgacaaatttgcactctatagcatcactcaaaatactgcctattggctttaaactccatctgaatactgataactttcacattctttcactagagtggaagctctgagactaggaattttgttgtctttaccccagtcctttgaatagtgactacatgtaagatagtcatgtagtatttattggaaataaatatttattggaaaaacgaaaacagataattcctcttctggtgtttaacaggctttgaaaccaagtgttcaggtgaaagcctttttatattgatttatcagcatttattcaaccccgtttgtcgggaaatgggattacacgtgtgagccacaatgcccagcctgtaaatttttacacattttaaattctgacaaagtgagggatatgtataatgtatacatatatacaaagtgaggtaaatgtataatgacatttgcattatacagatacatgcaagggttcagtaaagtttggcagcttcctagattgtattgccagtgaatggcagaggcattattaaacctccaccttaccctatagcggggagaccatggcagagtctcagtaggtggttgattgttgttactgatggctcttcctgagcatgtgaaccatggtcctcttctgcctcctagcactgctgctgcaggacttgttcctcgggtcttatcccagagttctggctgcatttgacattcaggtattcttctttgcacttcagatagaatgtaaaacacaggttcttgagtactttatgcttaactcttgtctttgctactcaatagcttatgatcttgagtgaattatgccattttatcccacttcactcacctgtaaaacggggattaaatttttacctccaagagttctttattta

SEQ ID NO: 9388 - protein, 62 aa, Homo sapiens
MPLHSCLGNRVRPCLKKINKTMGFHAILTNLHSIASLKILPIGFKLHLNTDNFHILSLEWKL

SEQ ID NO: 9389 - DNA, 1504 bp, Homo sapiens
ctcatctttatattcacgaaaaagcaatctgaagaaaacaaataaaagcctgtgtatttagcactgttagtgtcaccttttcaacttctgaaacactgttcattgttaactttttctcatttataaatcactgtatttattttagtagtatgcatagcatatctgtgctcttgaattaatttttatctttaacatatttgtctcatcaatctttaatacactgtgtctaatttgctaccaaatgtaattatcagggtatttataaaaccatagctaacaaaactgagctacaaaatgaaaatttactaaatagtttttaaaatcatggacttcagcctggcgcggtggctcatgcctgtaatcccagcactgtgggaggctgaggcgggcagatcgcctaagttcacgagtttgagaccagcctgcagcatgacgaaacctaaaataacaaaaattagccaggcgtggtagagtgcacctgtaatccctgctactcaggaggcggaggcaggagaatcgcttcaacccgggaggcggaggttgctgtgagcatgccactgcactcctgcctaggcaacagagtgagaccctgtctcaaaaaaataaataaaaccatgggcttccatgctatcttgacaaatttgcactctatagcatcactcaaaatactgcctattggctttaaactccatctgaatactgataactttcacattctttcactagagtggaagctctgagactaggaattttgttgtctttaccccagtcctttgaatagtgactacatgtaagatagtcatgtagtatttattggaaataaatatttattggaaaaacgaaaacagataattcctcttctggtgtttaacaggctttgaaaccaagtgttcaggtgaaagcctttttatattgatttatcagcatttattcaaccccgtttgtcgggaaatgggattacacgtgtgagccacaatgcccagcctgtaaatttttacacattttaaattctgacaaagtgagggatatgtataatgtatacatatatacaaagtgaggtaaatgtataatgacatttgcattatacagatacatgcaagggttcagtaaagtttggcagcttcctagattgtattgccagtgaatggcagaggcattattaaacctccaccttaccctatagcggggagaccatggcagagtctcagtaggtggttgattgttgttactgatggctcttcctgagcatgtgaaccatggtcctcttctgcctcctagcactgctgctgcaggacttgttcctcgggtcttatcccagagttctggctgcatttgacattcaggtattcttctttgcacttcagatagaatgtaaaacacaggttcttgagtactttatgcttaactcttgtctttgctactcaatagcttatgatcttgagtgaattatgccattttatcccacttcactcacctgtaaaacggggattaaatttttacctcc

SEQ ID NO: 9390 - protein, 62 aa, Homo sapiens; identical to SEQ ID NO: 9388

SEQ ID NO: 9391 - DNA, 1273 bp, Homo sapiens
tccgaagcggggaagtgggacaagatggtttacatctcgaacggccaccaggaaaccctccccgaagaatgggtagaatcaatcatctgcgtggccctagtccccctccaatggctggtggatgaggaaggtaaatgtctgctctaagaagcagacaaccggacatgcgcattcatagcagaaggaaaccatcaagaagtggaaggctgaccatgatgagcagtagatgaatgtgtatgtctaaacaaggactgctctgtgtcctcacagatgaatgaggtcatgctgggaattccctctgcagggaactggcctgactgacatgcagttccataaatgcagatgtttgtctcattacctttttgtatagtttattaaagtattaatatagttttaataagtaaatatttttaggttgcagaatggactcctcatctttatattcacgaaaaagcaatctgaagaaaacaaataaaagcctgtgtatttagcactgttagtgtcaccttttcaacttctgaaacactgttcattgttaactttttctcatttataaatcactgtatttattttagtagtatgcatagcatatctgtgctcttgaattaatttttatctttaacatatttgtctcatcaatctttaatacactgtgtctaatttgctaccaaatgtaattatcagggtatttataaaaccatagctaacaaaactgagctacaaaatgaaaatttactaaatagtttttaaaatcatggacttcagcctggcgcggtggctcatgcctgtaatcccagcactgtgggaggctgaggcgggcagatcgcctaagttcacgagtttgagaccagcctgcagcatgacgaaacctaaaataacaaaaattagccaggcgtggtagagtgcacctgtaatccctgctactcaggaggcggaggcaggagaatcgcttcaacccgggaggcggaggttgctgtgagcatgccactgcactcctgcctaggcaacagagtgagaccctgtctcaaaaaaataaataaaaccatgggcttccatgctatcttgacaaatttgcactctatagcatcactcaaaatactgcctattggctttaaactccatctgaatactgataactttcacattctttcactagagtggaagctctgagactaggaattttgttgtctttaccccagtcctttgaatagtgactacatgtaagatagtcatgtagtatttattggaaataaatatttattggaaaaacgaa

SEQ ID NO: 9392 - protein, 40 aa, Homo sapiens
MVYISNGHQETLPEEWVESIICVALVPLQWLVDEEGKCLL

SEQ ID NO: 9393 - DNA, 1438 bp, Homo sapiens
gggagcagagggagatacagaaaccgacaggggccaggcgcccggtggctccgaagcggggaagtgggacaagatggtttacatctcgaacggacaagtgttggacagccggagtcagtctccatggagattatctttgataacagatttcttctggggaatagctgagtttgtggttttgtttttcaaaactctgcttcagcaagatgccaccaggaaaccctccccgaagaatgggtagaatcaatcatctgcgtggccctagtccccctccaatggctggtggatgaggaaggtaaatgtctgctctaagaagcagacaaccggacatgcgcattcatagcagaaggaaaccatcaagaagtggaaggctgaccatgatgagcagtagatgaatgtgtatgtctaaacaaggactgctctgtgtcctcacagatgaatgaggtcatgctgggaattccctctgcagggaactggcctgactgacatgcagttccataaatgcagatgtttgtctcattacctttttgtatagtttattaaagtattaatatagttttaataagtaaatatttttaggttgcagaatggactcctcatctttatattcacgaaaaagcaatctgaagaaaacaaataaaagcctgtgtatttagcactgttagtgtcaccttttcaacttctgaaacactgttcattgttaactttttctcatttataaatcactgtatttattttagtagtatgcatagcatatctgtgctcttgaattaatttttatctttaacatatttgtctcatcaatctttaatacactgtgtctaatttgctaccaaatgtaattatcagggtatttataaaaccatagctaacaaaactgagctacaaaatgaaaatttactaaatagtttttaaaatcatggacttcagcctggcgcggtggctcatgcctgtaatcccagcactgtgggaggctgaggcgggcagatcgcctaagttcacgagtttgagaccagcctgcagcatgacgaaacctaaaataacaaaaattagccaggcgtggtagagtgcacctgtaatccctgctactcaggaggcggaggcaggagaatcgcttcaacccgggaggcggaggttgctgtgagcatgccactgcactcctgcctaggcaacagagtgagaccctgtctcaaaaaaataaataaaaccatgggcttccatgctatcttgacaaatttgcactctatagcatcactcaaaatactgcctattggctttaaactccatctgaatactgataactttcacattctttcactagagtggaagctctgagactaggaattttgttgtctttaccccagtcctttgaatagtgactacatgtaagatagtcatgtagtatttattggaaataaatatttattggaaaaacgaa

SEQ ID NO: 9394 - protein, 55 aa, Homo sapiens
MVYISNGQVLDSRSQSPWRLSLITDFFWGIAEFVVLFFKTLLQQDATRKPSPKNG

SEQ ID NO: 9395 - DNA, 1624 bp, Homo sapiens
aagtcgcagatgtgacgatgcaaaaacgcccgtcgggggcgcgtctctttcagcagccaatgggctctgcccaccttcgtcctcgtcagcattttgtctaatcgcggcctgtgacgctcgaagggcggggagcagagggagatacagaaaccgacaggggccaggcgcccggtggctccgaagcggggaagtgggacaagatggtttacatctcgaacggacaagtgttggacagccggagtcagtctccatggagattatctttgataacagatttcttctggggaatagctgagtttgtggttttgtttttcaaaactctgcttcagcaagatgtgaaaaaaagaagaagctatggaaactcatctgattccagatatgatgatggaagagggccaccaggaaaccctccccgaagaatgggtagaatcaatcatctgcgtggccctagtccccctccaatggctggtggatgaggaaggtaaatgtctgctctaagaagcagacaaccggacatgcgcattcatagcagaaggaaaccatcaagaagtggaaggctgaccatgatgagcagtagatgaatgtgtatgtctaaacaaggactgctctgtgtcctcacagatgaatgaggtcatgctgggaattccctctgcagggaactggcctgactgacatgcagttccataaatgcagatgtttgtctcattacctttttgtatagtttattaaagtattaatatagttttaataagtaaatatttttaggttgcagaatggactcctcatctttatattcacgaaaaagcaatctgaagaaaacaaataaaagcctgtgtatttagcactgttagtgtcaccttttcaacttctgaaacactgttcattgttaactttttctcatttataaatcactgtatttattttagtagtatgcatagcatatctgtgctcttgaattaatttttatctttaacatatttgtctcatcaatctttaatacactgtgtctaatttgctaccaaatgtaattatcagggtatttataaaaccatagctaacaaaactgagctacaaaatgaaaatttactaaatagtttttaaaatcatggacttcagcctggcgcggtggctcatgcctgtaatcccagcactgtgggaggctgaggcgggcagatcgcctaagttcacgagtttgagaccagcctgcagcatgacgaaacctaaaataacaaaaattagccaggcgtggtagagtgcacctgtaatccctgctactcaggaggcggaggcaggagaatcgcttcaacccgggaggcggaggttgctgtgagcatgccactgcactcctgcctaggcaacagagtgagaccctgtctcaaaaaaataaataaaaccatgggcttccatgctatcttgacaaatttgcactctatagcatcactcaaaatactgcctattggctttaaactccatctgaatactgataactttcacattctttcactagagtggaagctctgagactaggaattttgttgtctttaccccagtcctttgaatagtgactacatgtaagatagtcatgtagtatttattggaaataaatatttattggaaaaacgaa

SEQ ID NO: 9396 - protein, 91 aa, Homo sapiens
MVYISNGQVLDSRSQSPWRLSLITDFFWGIAEFVVLFFKTLLQQDVKKRRSYGNSSDSRYDDGRGPPGNPPRRMGRINHLRGPSPPPMAGG

SEQ ID NO: 9397 - DNA, 849 bp, Homo sapiens
aagtcgcagatgtgacgatgcaaaaacgcccgtcgggggcgcgtctctttcagcagccaatgggctctgcccaccttcgtcctcgtcagcattttgtctaatcgcggcctgtgacgctcgaagggcggggagcagagggagatacagaaaccgacaggggccaggcgcccggtggctccgaagcggggaagtgggacaagatggtttacatctcgaacggacaagtgttggacagccggagtcagtctccatggagattatctttgataacagatttcttctggggaatagctgagtttgtggttttgtttttcaaaactctgcttcagcaagatgtgaaaaaaagaagaagctatggaaactcatctgattccagatatgatgatggaagagggccaccaggaaaccctccccgaagaatgggtagaatcaatcatctgcgtggccctagtccccctccaatggctggtggatgaggaaggtaaatgtctgctctaagaagcagacaaccggacatgcgcattcatagcagaaggaaaccatcaagaagtggaaggctgaccatgatgagcagtagatgaatgtgtatgtctaaacaaggactgctctgtgtcctcacagatgaatgaggtcatgctgggaattccctctgcagggaactggcctgactgacatgcagttccataaatgcagatgtttgtctcattacctttttgtatagtttattaaagtattaatatagttttaataagtaaatatttttaggttgcagaatggactcctcatctttatattcacgaaaaagcaatctgaagaaaacaaataaaagcctgtgtatttagcactgtt

SEQ ID NO: 9398 - protein, 91 aa, Homo sapiens; identical to SEQ ID NO: 9396

SEQ ID NO: 9399 - DNA, 496 bp, Homo sapiens
tccgaagcggggaagtgggacaagatggtttacatctcgaacggccaccaggaaaccctccccgaagaatgggtagaatcaatcatctgcgtggccctagtccccctccaatggctggtggatgaggaaggtaaatgtctgctctaagaagcagacaaccggacatgcgcattcatagcagaaggaaaccatcaagaagtggaaggctgaccatgatgagcagtagatgaatgtgtatgtctaaacaaggactgctctgtgtcctcacagatgaatgaggtcatgctgggaattccctctgcagggaactggcctgactgacatgcagttccataaatgcagatgtttgtctcattacctttttgtatagtttattaaagtattaatatagttttaataagtaaatatttttaggttgcagaatggactcctcatctttatattcacgaaaaagcaatctgaagaaaacaaataaaagcctgtgtatttagcactg

SEQ ID NO: 9400 - protein, 40 aa, Homo sapiens; identical to SEQ ID NO: 9392

SEQ ID NO: 9401 - DNA, 661 bp, Homo sapiens
gggagcagagggagatacagaaaccgacaggggccaggcgcccggtggctccgaagcggggaagtgggacaagatggtttacatctcgaacggacaagtgttggacagccggagtcagtctccatggagattatctttgataacagatttcttctggggaatagctgagtttgtggttttgtttttcaaaactctgcttcagcaagatgccaccaggaaaccctccccgaagaatgggtagaatcaatcatctgcgtggccctagtccccctccaatggctggtggatgaggaaggtaaatgtctgctctaagaagcagacaaccggacatgcgcattcatagcagaaggaaaccatcaagaagtggaaggctgaccatgatgagcagtagatgaatgtgtatgtctaaacaaggactgctctgtgtcctcacagatgaatgaggtcatgctgggaattccctctgcagggaactggcctgactgacatgcagttccataaatgcagatgtttgtctcattacctttttgtatagtttattaaagtattaatatagttttaataagtaaatatttttaggttgcagaatggactcctcatctttatattcacgaaaaagcaatctgaagaaaacaaataaaagcctgtgtatttagcactg

SEQ ID NO: 9402 - protein, 55 aa, Homo sapiens; identical to SEQ ID NO: 9394

SEQ ID NO: 9403 - DNA, 584 bp, Homo sapiens
gggagcagagggagatacagaaaccgacaggggccaggcgcccggtggctccgaagcggggaagtgggacaagatggtttacatctcgaacggacaagtgttggacagccggagtcagtctccatggagattatctttgataacagatttcttctggggaatagctgagtttgtggttttgtttttcaaaactctgcttcagcaagatgccaccaggaaaccctccccgaagaatgggtagaatcaatcatctgcgtggccctagtccccctccaatggctggtggatgaggaaggtaaatgtctgctctaagaagcagacaaccggacatgcgcattcatagcagaaggaaaccatcaagaagtggaaggctgaccatgatgagcagtagatgaatgtgtatgtctaaacaaggactgctctgtgtcctcacagatgaatgaggtcatgctgggaattccctctgcagggaactggcctgactgacatgcagttccataaatgcagatgtttgtctcattacctttttgtatagtttattaaagtattaatatagttttaataagtaaatatttttaggttgc

SEQ ID NO: 9404 - protein, 55 aa, Homo sapiens; identical to SEQ ID NO: 9394

SEQ ID NO: 9405 - DNA, 770 bp, Homo sapiens
aagtcgcagatgtgacgatgcaaaaacgcccgtcgggggcgcgtctctttcagcagccaatgggctctgcccaccttcgtcctcgtcagcattttgtctaatcgcggcctgtgacgctcgaagggcggggagcagagggagatacagaaaccgacaggggccaggcgcccggtggctccgaagcggggaagtgggacaagatggtttacatctcgaacggacaagtgttggacagccggagtcagtctccatggagattatctttgataacagatttcttctggggaatagctgagtttgtggttttgtttttcaaaactctgcttcagcaagatgtgaaaaaaagaagaagctatggaaactcatctgattccagatatgatgatggaagagggccaccaggaaaccctccccgaagaatgggtagaatcaatcatctgcgtggccctagtccccctccaatggctggtggatgaggaaggtaaatgtctgctctaagaagcagacaaccggacatgcgcattcatagcagaaggaaaccatcaagaagtggaaggctgaccatgatgagcagtagatgaatgtgtatgtctaaacaaggactgctctgtgtcctcacagatgaatgaggtcatgctgggaattccctctgcagggaactggcctgactgacatgcagttccataaatgcagatgtttgtctcattacctttttgtatagtttattaaagtattaatatagttttaataagtaaatatttttaggttgc

SEQ ID NO: 9406 - protein, 91 aa, Homo sapiens; identical to SEQ ID NO: 9396

SEQ ID NO: 9407 - DNA, 594 bp, Homo sapiens
agatggaaatgcagaaatcacccgtcttctccgtcgctcacgctgggagctgtagactggagctgttcctattcggccatcttggctcctccctccatcggtaaaccaactctttaacaaaggggagctgaggctctgtggctggaacctgggacttaggcctgaattaatcagagcaatgcactccactggccatggaggtggaagttgtattcacaagctctaaatgtcagccttcatctttagacctagtggaaagcaaagaagacaaaacgtgatgcaatgaaccttgttatggtacccaaaatatggggatctagcttctgttagcatgcctgcatccctgtcttggccccactgatgaggagcaggcaagatagggattctgagtatgaaggaagttactgaagcaattaacaatcagagtgtctgattagtgctataatttcaaatgtaaacaacaacaaaaaaccttttagatttcaggtgagaattgcactcttcaaagatggttcctctctgtggctgtagttagtgtagtgaattggatattcttggattgagtcaattttatatctcaagtatatttttctt

SEQ ID NO: 9408 - protein, 33 aa, Homo sapiens
MEMQKSPVFSVAHAGSCRLELFLFGHLGSSLHR

SEQ ID NO: 9409 - DNA, 836 bp, Homo sapiens
gctcttagaagaccagccacttttgtccctgcagcccggggccacagagccagacaccagacccacagcagcccgggaagtaacggtcgctctgtctcgtctgggaagatctccgttgccagggcttgctggacccgcccccgcacagcttcccagcagtcccgattccgcctgaggctccagaaggcgaagctgtacaggaggccacttttcttctcagcctagaactcgagagacctgaaaggaaggacgactggccacaggagatgtttcacagagccgctgaatgaacaacacagtcaattctgatcaactttccagtgctatctgggtgtaagtgagtggccctggaggtgggtgcctctccccggcgcagtttttccttccatcacaagcatggctgaagctgggtggtggtgcatacagattccagccagcaaggaggggaaagagagttcagaggactcacctccactgtccccgacccaggcctgtagcatctatattggctcctctcaggttccacagccaaaagcctagtcccaagggagtgctacagagaagaaaaaatcatcacaaaacagggcattaaaactctggggacacgaatctgaaaccaccacatcacccctccttaatttcagagtctccctccccagccaggcttggagggaaatgtggaacatcactctgggaatcccttccggacaccattatgttctagttactgcctacgaggacctacttggtatttctcatcttaccctgattgcattcaaaacttgattagattctattgatcctgtcataaaaaaataaagctggtctgcttttcc

SEQ ID NO: 9410 - protein, 47 aa, Homo sapiens [sequence omitted]

SEQ ID NO: 9411 - DNA, 396 bp, Homo sapiens
caggagatgtttcacagagccgctgaatgaacaacacagtcaattctgatcaactttccagtgctatctggggggatttgtaaactcggcgaggagagcatttgtaaaagggttaagtaccccagttttctaactgaattactacaccattaaaatgagctccgcacaacatggcagcaaataggcttctgtctgagagacagagaagggtgtatatggcttctttaccaaatcggagagctgaaaacccaagcagagtcacgtcctaggagtaggcactgaccgccacagtcacctgcccgtcctgtcaagcaacttttcccagctaacctgagttcccatcctaattctttaaagcactgaaaagtttttgaaaagaaagacacaagaaatatt

SEQ ID NO: 9412 - protein, 32 aa, Homo sapiens
MAANRLLSERQRRVYMASLPNRRAENPSRVTS

SEQ ID NO: 9413 - DNA, 3603 bp, Homo sapiens
cggccgctctcgtcgccgccgcagcgggcgcgtcggagggagcccagcatggccgggccgggctcgccgcgccgcgcgtcccggggggcctcggcgcttctcgctgccgcgcttctctacgccgcgctgggggacgtggtgcgctcggagcagcagataccgctctccgtggtgaagctctgggcctcggcttttggtggggagataaaatccattgctgctaagtactccggttcccagcttctgcaaaagaaatacaaagagtatgagaaagacgttgccatagaagaaattgatggcctccaactggtaaagaagctggcaaagaacatggaagagatgtttcacaagaagtctgaggccgtcaggcagtatgaatacttcaatgctgtgctgataaatgaaagggacaaagacgggaattttttggagctgggaaaggaattcatcttagccccaaatgaccattttaataatttgcctgtgaacatcagtctaagtgacgtccaagtaccaacgaacatgtacaacaaagaccctgcaattgtcaatggggtttattggtctgaatctctaaacaaagtttttgtagataactttgaccgtgacccatctctcatatggcagtactttggaagtgcaaagggcttttttaggcagtatccggggattaaatgggaaccagatgagaatggagtcattgccttcgactgcaggaaccgaaaatggtacatccaggcagcaacttctccgaaagacgtggtcattttagttgacgtcagtggcagcatgaaaggactccgtctgactatcgcgaagcaaacagtctcatccattttggatacacttggggatgatgacttcttcaacataattgcttataatgaggagcttcactatgtggaaccttgcctgaatggaactttggtgcaagccgacaggacaaacaaagagcacttcagggagcatctggacaaacttttcgccaaaggaattggaatgttggatatagctctgaatgaggccttcaacattctgagtgatttcaaccacacgggacaaggaagtatctgcagtcaggccatcatgctcataactgatggggcggtggacacctatgatacaatctttgcaaaatacaattggccagatcgaaaggttcgcatcttcacatacctcattggacgagaggctgcgtttgcagacaatctaaagtggatggcctgtgccaacaaaggattttttacccagatctccaccttggctgatgtgcaggagaatgtcatggaataccttcacgtgcttagccggcccaaagtcatcgaccaggagcatgatgtggtgtggaccgaagcttacattgacagcactctgactgatgatcagggccccgtcctgatgaccactgtagccatgcctgtgtttagtaagcagaacgaaaccagatcgaagggcattcttctgggagtggttggcacagatgtcccagtgaaagaacttctgaagaccatccccaaatacaagttagggattcacggttatgcctttgcaatcacaaataatggatatatcctgacgcatccggaactcaggctgctgtacgaagaaggaaaaaagcgaaggaaacctaactatagtagcgttgacctctctgaggtggagtgggaagaccgagatgacgtgttgagaaatgctatggtgaatcgaaagacggggaagttttccatggaggtgaagaagacagtggacaaagggaaacgggttttggtgatgacaaatgactactattatacagacatcaagggtactcctttcagtttaggtgtggcgctttccagaggtcatgggaaatatttcttccgagggaatgtaaccatcgaagaaggcctgcatgacttagaacatcccgatgtgtccttggcagatgaatggtcctactgcaacactgacctacaccctgagcaccgccatctgtctcagttagaagcgattaagctctacctaaaaggcaaagaacctctgctccagtgtgataaagaattgatccaagaagtcctttttgacgcggtggtgagtgcccccattgaagcgtattggaccagcctggccctcaacaaatctgaaaattctgacaagggcgtggaggttgccttcctcggcactcgcacgggcctctccagaatcaacctgtttgtcggggctgagcagctcaccaatcaggacttcctgaaagctggcgacaaggagaacatttttaacgcagaccatttccctctctggtaccgaagagccgctgagcagattccagggagcttcgtctactcgatcccattcagcactggaccagtcaataaaagcaatgtggtgacagcaagtacatccatccagctcctggatgaacggaaatctcctgtggtggcagctgtaggcattcagatgaaacttgaatttttccaaaggaagttctggactgccagcagacagtgtgcttccctggatggcaaatgctccatcagctgtgatgatgagactgtgaattgttacctcatagacaataatggatttattttggtgtctgaagactacacacagactggagacttttttggtgagatcgagggagctgtgatgaacaaattgctaacaatgggctcctttaaaagaattaccctttatgactaccaagccatgtgtagagccaacaaggaaagcagcgatggcgcccatggcctcctggatccttataatgccttcctctctgcagtaaaatggatcatgacagaacttgtcttgttcctggtggaatttaacctctgcagttggtggcactccgatatgacagctaaagcccagaaattgaaacagaccctggagccttgtgatactgaatatccagcattcgtctctgagcgcaccatcaaggagactacagggaatattgcttgtgaagactgctccaagtcctttgtcatccagcaaatcccaagcagcaacctgttcatggtggtggtggacagcagctgcctctgtgaatctgtggcccccatcaccatggcacccattgaaatcagtcaacataatgaatcccttaagtgtgaacgtctaaaggcccagaagatcagaaggcgcccagaatcttgtcatggcttccatcctgaggagaatgcaagggagtgtgggggtgcgccgagtctccaagcccagacagtcctccttctgctccctctgcttttgatgctcttctcaaggtgacactgactgagatgttctcttactgactgagatgttctcttggcatgctaaatcatggataaactgtgaaccaaaatatggtgcaacatacgagacatgaatatagtccaaccatcagcatctcatcatgattttaaactgtgcgtgatataaactcttaaagatatgttgacaaaaagttatctatcatctttttactttgccagtcatgcaaatgtgagtttgccacatgataatcacccttcatcagaaatgggaccgcaagtggtaggcagtgtcccttctgcttgaaacctattgaaaccaatttaaaactgtgtactttttaaataaagtatattaaaatcataa

SEQ ID NO: 9414 - protein, 1067 aa, Homo sapiens
MAGPGSPRRASRGASALLAAALLYAALGDVVRSEQQIPLSVVKLWASAFGGEIKSIAAKYSGSQLLQKKYKEYEKDVAIEEIDGLQLVKKLAKNMEEMFHKKSEAVRQYEYFNAVLINERDKDGNFLELGKEFILAPNDHFNNLPVNISLSDVQVPTNMYNKDPAIVNGVYWSESLNKVFVDNFDRDPSLIWQYFGSAKGFFRQYPGIKWEPDENGVIAFDCRNRKWYIQAATSPKDVVILVDVSGSMKGLRLTIAKQTVSSILDTLGDDDFFNIIAYNEELHYVEPCLNGTLVQADRTNKEHFREHLDKLFAKGIGMLDIALNEAFNILSDFNHTGQGSICSQAIMLITDGAVDTYDTIFAKYNWPDRKVRIFTYLIGREAAFADNLKWMACANKGFFTQISTLADVQENVMEYLHVLSRPKVIDQEHDVVWTEAYIDSTLTDDQGPVLMTTVAMPVFSKQNETRSKGILLGVVGTDVPVKELLKTIPKYKLGIHGYAFAITNNGYILTHPELRLLYEEGKKRRKPNYSSVDLSEVEWEDRDDVLRNAMVNRKTGKFSMEVKKTVDKGKRVLVMTNDYYYTDIKGTPFSLGVALSRGHGKYFFRGNVTIEEGLHDLEHPDVSLADEWSYCNTDLHPEHRHLSQLEAIKLYLKGKEPLLQCDKELIQEVLFDAVVSAPIEAYWTSLALNKSENSDKGVEVAFLGTRTGLSRINLFVGAEQLTNQDFLKAGDKENIFNADHFPLWYRRAAEQIPGSFVYSIPFSTGPVNKSNVVTASTSIQLLDERKSPVVAAVGIQMKLEFFQRKFWTASRQCASLDGKCSISCDDETVNCYLIDNNGFILVSEDYTQTGDFFGEIEGAVMNKLLTMGSFKRITLYDYQAMCRANKESSDGAHGLLDPYNAFLSAVKWIMTELVLFLVEFNLCSWWHSDMTAKAQKLKQTLEPCDTEYPAFVSERTIKETTGNIACEDCSKSFVIQQIPSSNLFMVVVDSSCLCESVAPITMAPIEISQHNESLKCERLKAQKIRRRPESCHGFHPEENARECGGAPSLQAQTVLLLLPLLLMLFSR

SEQ ID NO: 9415 - DNA, 3368 bp, Homo sapiens
gttgactgtgacacgggtgttacatatcttcctgtgccccttctccctgtagggtgaagctctgggcctcggcttttggtggggagataaaatccattgctgctaagtactccggttcccagcttctgcaaaagcagtatgaatacttcaatgctgtgctgataaatgaaagggacaaagacgggaattttttggagctgggaaaggaattcatcttagccccaaatgaccattttaataatttgcctgtgaacatcagtctaagtgacgtccaagtaccaacgaacatgtacaacaaagaccctgcaattgtcaatggggtttattggtctgaatctctaaacaaagtttttgtagataactttgaccgtgacccatctctcatatggcagtactttggaagtgcaaagggcttttttaggcagtatccggggattaaatgggaaccagatgagaatggagtcattgccttcgactgcaggaaccgaaaatggtacatccaggcagcaacttctccgaaagacgtggtcattttagttgacgtcagtggcagcatgaaaggactccgtctgactatcgcgaagcaaacagtctcatccattttggatacacttggggatgatgacttcttcaacataattgcttataatgaggagcttcactatgtggaaccttgcctgaatggaactttggtgcaagccgacaggacaaacaaagagcacttcagggagcatctggacaaacttttcgccaaaggaattggaatgttggatatagctctgaatgaggccttcaacattctgagtgatttcaaccacacgggacaaggaagtatctgcagtcaggccatcatgctcataactgatggggcggtggacacctatgatacaatctttgcaaaatacaattggccagatcgaaaggttcgcatcttcacatacctcattggacgagaggctgcgtttgcagacaatctaaagtggatggcctgtgccaacaaaggattttttacccagatctccaccttggctgatgtgcaggagaatgtcatggaataccttcacgtgcttagccggcccaaagtcatcgaccaggagcatgatgtggtgtggaccgaagcttacattgacagcactctgactgatgatcagggccccgtcctgatgaccactgtagccatgcctgtgtttagtaagcagaacgaaaccagatcgaagggcattcttctgggagtggttggcacagatgtcccagtgaaagaacttctgaagaccatccccaaatacaagttagggattcacggttatgcctttgcaatcacaaataatggatatatcctgacgcatccggaactcaggctgctgtacgaagaaggaaaaaagcgaaggaaacctaactatagtagcgttgacctctctgaggtggagtgggaagaccgagatgacgtgttgagaaatgctatggtgaatcgaaagacggggaagttttccatggaggtgaagaagacagtggacaaagggaaacgggttttggtgatgacaaatgactactattatacagacatcaagggtactcctttcagtttaggtgtggcgctttccagaggtcatgggaaatatttcttccgagggaatgtaaccatcgaagaaggcctgcatgacttagaacatcccgatgtgtccttggcagatgaatggtcctactgcaacactgacctacaccctgagcaccgccatctgtctcagttagaagcgattaagctctacctaaaaggcaaagaacctctgctccagtgtgataaagaattgatccaagaagtcctttttgacgcggtggtgagtgcccccattgaagcgtattggaccagcctggccctcaacaaatctgaaaattctgacaagggcgtggaggttgccttcctcggcactcgcacgggcctctccagaatcaacctgtttgtcggggctgagcagctcaccaatcaggacttcctgaaagctggcgacaaggagaacatttttaacgcagaccatttccctctctggtaccgaagagccgctgagcagattccagggagcttcgtctactcgatcccattcagcactggaccagtcaataaaagcaatgtggtgacagcaagtacatccatccagctcctggatgaacggaaatctcctgtggtggcagctgtaggcattcagatgaaacttgaatttttccaaaggaagttctggactgccagcagacagtgtgcttccctggatggcaaatgctccatcagctgtgatgatgagactgtgaattgttacctcatagacaataatggatttattttggtgtctgaagactacacacagactggagacttttttggtgagatcgagggagctgtgatgaacaaattgctaacaatgggctcctttaaaagaattaccctttatgactaccaagccatgtgtagagccaacaaggaaagcagcgatggcgcccatggcctcctggatccttataatgccttcctctctgcagtaaaatggatcatgacagaacttgtcttgttcctggtggaatttaacctctgcagttggtggcactccgatatgacagctaaagcccagaaattgaaacagaccctggagccttgtgatactgaatatccagcattcgtctctgagcgcaccatcaaggagactacagggaatattgcttgtgaagactgctccaagtcctttgtcatccagcaaatcccaagcagcaacctgttcatggtggtggtggacagcagctgcctctgtgaatctgtggcccccatcaccatggcacccattgaaatcagtcaacataatgaatcccttaagtgtgaacgtctaaaggcccagaagatcagaaggcgcccagaatcttgtcatggcttccatcctgaggagaatgcaagggagtgtgggggtgcgccgagtctccaagcccagacagtcctccttctgctccctctgcttttgatgctcttctcaaggtgacactgactgagatgttctcttactgactgagatgttctcttggcatgctaaatcatggataaactgtgaaccaaaatatggtgcaacatacgagacatgaatatagtccaaccatcagcatctcatcatgattttaaactgtgcgtgatataaactcttaaagatatgttgacaaaaagttatctatcatctttttactttgccagtcatgcaaatgtgagtttgccacatgataatcacccttcatcagaaatgggaccgcaagtggtaggcagtgtcccttctgcttgaaacctattgaaaccaatttaaaactgtgtactttttaaataaagtatattaaaatcataa

SEQ ID NO: 9416 - protein, 909 aa, Homo sapiens
MYNKDPAIVNGVYWSESLNKVFVDNFDRDPSLIWQYFGSAKGFFRQYPGIKWEPDENGVIAFDCRNRKWYIQAATSPKDVVILVDVSGSMKGLRLTIAKQTVSSILDTLGDDDFFNIIAYNEELHYVEPCLNGTLVQADRTNKEHFREHLDKLFAKGIGMLDIALNEAFNILSDFNHTGQGSICSQAIMLITDGAVDTYDTIFAKYNWPDRKVRIFTYLIGREAAFADNLKWMACANKGFFTQISTLADVQENVMEYLHVLSRPKVIDQEHDVVWTEAYIDSTLTDDQGPVLMTTVAMPVFSKQNETRSKGILLGVVGTDVPVKELLKTIPKYKLGIHGYAFAITNNGYILTHPELRLLYEEGKKRRKPNYSSVDLSEVEWEDRDDVLRNAMVNRKTGKFSMEVKKTVDKGKRVLVMTNDYYYTDIKGTPFSLGVALSRGHGKYFFRGNVTIEEGLHDLEHPDVSLADEWSYCNTDLHPEHRHLSQLEAIKLYLKGKEPLLQCDKELIQEVLFDAVVSAPIEAYWTSLALNKSENSDKGVEVAFLGTRTGLSRINLFVGAEQLTNQDFLKAGDKENIFNADHFPLWYRRAAEQIPGSFVYSIPFSTGPVNKSNVVTASTSIQLLDERKSPVVAAVGIQMKLEFFQRKFWTASRQCASLDGKCSISCDDETVNCYLIDNNGFILVSEDYTQTGDFFGEIEGAVMNKLLTMGSFKRITLYDYQAMCRANKESSDGAHGLLDPYNAFLSAVKWIMTELVLFLVEFNLCSWWHSDMTAKAQKLKQTLEPCDTEYPAFVSERTIKETTGNIACEDCSKSFVIQQIPSSNLFMVVVDSSCLCESVAPITMAPIEISQHNESLKCERLKAQKIRRRPESCHGFHPEENARECGGAPSLQAQTVLLLLPLLLMLFSR

SEQ ID NO: 9417 - DNA, 3306 bp, Homo sapiens
gttgactgtgacacgggtgttacatatcttcctgtgccccttctccctgtagggtgaagctctgggcctcggcttttggtggggagataaaatccattgctgctaagtactccggttcccagcttctgcaaaagcagtatgaatacttcaatgctgtgctgataaatgaaagggacaaagacgggaattttttggagctgggaaaggaattcatcttagccccaaatgaccattttaataatttgcctgtgaacatcagtctaagtgacgtccaagtaccaacgaacatgtacaacaaagaccctgcaattgtcaatggggtttattggtctgaatctctaaacaaagtttttgtagataactttgaccgtgacccatctctcatatggcagtactttggaagtgcaaagggcttttttaggcagtatccggggattaaatgggaaccagatgagaatggagtcattgccttcgactgcaggaaccgaaaatggtacatccaggcagcaacttctccgaaagacgtggtcattttagttgacgtcagtggcagcatgaaaggactccgtctgactatcgcgaagcaaacagtctcatccattttggatacacttggggatgatgacttcttcaacataattgcttataatgaggagcttcactatgtggaaccttgcctgaatggaactttggtgcaagccgacaggacaaacaaagagcacttcagggagcatctggacaaacttttcgccaaaggaattggaatgttggatatagctctgaatgaggccttcaacattctgagtgatttcaaccacacgggacaaggaagtatctgcagtcaggccatcatgctcataactgatggggcggtggacacctatgatacaatctttgcaaaatacaattggccagatcgaaaggttcgcatcttcacatacctcattggacgagaggctgcgtttgcagacaatctaaagtggatggcctgtgccaacaaaggattttttacccagatctccaccttggctgatgtgcaggagaatgtcatggaataccttcacgtgcttagccggcccaaagtcatcgaccaggagcatgatgtggtgtggaccgaagcttacattgacagcactctgactgatgatcagggccccgtcctgatgaccactgtagccatgcctgtgtttagtaagcagaacgaaaccagatcgaagggcattcttctgggagtggttggcacagatgtcccagtgaaagaacttctgaagaccatccccaaatacaagttagggattcacggttatgcctttgcaatcacaaataatggatatatcctgacgcatccggaactcaggctgctgtacgaagaaggaaaaaagcgaaggaaacctaactatagtagcgttgacctctctgaggtggagtgggaagaccgagatgacgtgttgagaaatgctatggtgaatcgaaagacggggaagttttccatggaggtgaagaagacagtggacaaagggtttaggtgtggcgctttccagaggtcatgggaaatatttcttccgagggaatgtaaccatcgaagaaggcctgcatgacttagaacatcccgatgtgtccttggcagatgaatggtcctactgcaacactgacctacaccctgagcaccgccatctgtctcagttagaagcgattaagctctacctaaaaggcaaagaacctctgctccagtgtgataaagaattgatccaagaagtcctttttgacgcggtggtgagtgcccccattgaagcgtattggaccagcctggccctcaacaaatctgaaaattctgacaagggcgtggaggttgccttcctcggcactcgcacgggcctctccagaatcaacctgtttgtcggggctgagcagctcaccaatcaggacttcctgaaagctggcgacaaggagaacatttttaacgcagaccatttccctctctggtaccgaagagccgctgagcagattccagggagcttcgtctactcgatcccattcagcactggaccagtcaataaaagcaatgtggtgacagcaagtacatccatccagctcctggatgaacggaaatctcctgtggtggcagctgtaggcattcagatgaaacttgaatttttccaaaggaagttctggactgccagcagacagtgtgcttccctggatggcaaatgctccatcagctgtgatgatgagactgtgaattgttacctcatagacaataatggatttattttggtgtctgaagactacacacagactggagacttttttggtgagatcgagggagctgtgatgaacaaattgctaacaatgggctcctttaaaagaattaccctttatgactaccaagccatgtgtagagccaacaaggaaagcagcgatggcgcccatggcctcctggatccttataatgccttcctctctgcagtaaaatggatcatgacagaacttgtcttgttcctggtggaatttaacctctgcagttggtggcactccgatatgacagctaaagcccagaaattgaaacagaccctggagccttgtgatactgaatatccagcattcgtctctgagcgcaccatcaaggagactacagggaatattgcttgtgaagactgctccaagtcctttgtcatccagcaaatcccaagcagcaacctgttcatggtggtggtggacagcagctgcctctgtgaatctgtggcccccatcaccatggcacccattgaaatcagtcaacataatgaatcccttaagtgtgaacgtctaaaggcccagaagatcagaaggcgcccagaatcttgtcatggcttccatcctgaggagaatgcaagggagtgtgggggtgcgccgagtctccaagcccagacagtcctccttctgctccctctgcttttgatgctcttctcaaggtgacactgactgagatgttctcttactgactgagatgttctcttggcatgctaaatcatggataaactgtgaaccaaaatatggtgcaacatacgagacatgaatatagtccaaccatcagcatctcatcatgattttaaactgtgcgtgatataaactcttaaagatatgttgacaaaaagttatctatcatctttttactttgccagtcatgcaaatgtgagtttgccacatgataatcacccttcatcagaaatgggaccgcaagtggtaggcagtgtcccttctgcttgaaacctattgaaaccaatttaaaactgtgtactttttaaataaagtatattaaaatcataa

SEQ ID NO: 9418 - protein, 436 aa, Homo sapiens
MYNKDPAIVNGVYWSESLNKVFVDNFDRDPSLIWQYFGSAKGFFRQYPGIKWEPDENGVIAFDCRNRKWYIQAATSPKDVVILVDVSGSMKGLRLTIAKQTVSSILDTLGDDDFFNIIAYNEELHYVEPCLNGTLVQADRTNKEHFREHLDKLFAKGIGMLDIALNEAFNILSDFNHTGQGSICSQAIMLITDGAVDTYDTIFAKYNWPDRKVRIFTYLIGREAAFADNLKWMACANKGFFTQISTLADVQENVMEYLHVLSRPKVIDQEHDVVWTEAYIDSTLTDDQGPVLMTTVAMPVFSKQNETRSKGILLGVVGTDVPVKELLKTIPKYKLGIHGYAFAITNNGYILTHPELRLLYEEGKKRRKPNYSSVDLSEVEWEDRDDVLRNAMVNRKTGKFSMEVKKTVDKGFRCGAFQRSWEIFLPRECNHRRRPA

SEQ ID NO: 9419 - DNA, 1147 bp, Homo sapiens
cggctccgaggaccgggcagcgcatttggggtgcccgctacagggccccccaagaggctgccaggtcgggagcgcagcctgaggccacggggggaagggggtgggtgggctgagagcagctcggcggcgagactggcccgccgccccttccccccacacccgtcgaccttgtgggcagaagcttcccagagctccttaggccggcgcgatggcgactgctgtggagacggaggcctgtcagccgacggatgcgagttgggaaagtggcggcggcggagacgacgagatgaagcaggcgcttccggagcttgagtcctcccaacaaaatggcggcggcggcggcctcaacatcgctgagcccagcggcggcgctgggcgtgaggagaacgcgggggccgaggccgcccagagcctcagccacgagcagcctcaggactcctctgaggcgggcgcggccgccctgcccagaggccccgaagagcccgaaaggcctgttaggaggagttttcagatccccaggaagagcagagaaaagaaagcacttttccagccattaactccaggctctcgagaatttgaagatgttgtaaatattctccattcttcttaccttgaaccaacctcagtaacaaattttaactacagacgtgcttgcttggtacacaatgagcttttggaaaaggagtttacagaaaagcgaagagaactgaagtttgatggtcgtttagataaggaactttcagaatcctatgcatttctgatggttgatcgataccaggttcaaaccatatgtgaaaaaggattacatgtgggtcagtccaaaataacaattcttggcagtccttccatgggtgtctatctttctaggtatgctgatttattacaagcgaatcctttggacacgggggcaatgggtgatgttgttatttttaaaataatgaagggtaaaataaagagtatatatgaccccatgggtgtaaaaagtttggaatctatgttaaataagagtgctttggaccccacaccaaagcatgaatgtcacgtgtcaaagaatgccaatcgaattacatcacttttggcttacagagcctatgagcttactcagtagataaatataactataccttgtggaaaggacagcttttaa

SEQ ID NO: 9420 - protein, 299 aa, Homo sapiens
MATAVETEACQPTDASWESGGGGDDEMKQALPELESSQQNGGGGGLNIAEPSGGAGREENAGAEAAQSLSHEQPQDSSEAGAAALPRGPEEPERPVRRSFQIPRKSREKKALFQPLTPGSREFEDVVNILHSSYLEPTSVTNFNYRRACLVHNELLEKEFTEKRRELKFDGRLDKELSESYAFLMVDRYQVQTICEKGLHVGQSKITILGSPSMGVYLSRYADLLQANPLDTGAMGDVVIFKIMKGKIKSIYDPMGVKSLESMLNKSALDPTPKHECHVSKNANRITSLLAYRAYELTQ

SEQ ID NO: 9421 - DNA, 226 bp, Homo sapiens
agacactatttaataagggtcaagaatgtaacagtcaaaacaggtcactactgaaaacataatgttccacttgtacatactcctaaaggtaacagatgcagcgaaccgttatcttttttatacatgattattagactttaaaagacatgtcaaatgacagagccattcatccattcatttgttcttcacagtaagatctttttttaaaatcacttttcttcattct

SEQ ID NO: 9422 - DNA, 3587 bp, Homo sapiens
agtcgagtcctgcccggctagaagccggctgtcggtctccgtgtcgccgccgccgcccggcatcgtggagctggggcccccttttgcctgggagttttgtagtcgcctagggtcagcggtgacatcccaaagggcaggcccggcagccgccatggtggccaaggattaccccttctacctcacggtcaagagagcgaactgcagcctggagctacccccggccagcggtccggccaaggacgctgaggagcctagtaataaacgggtcaaacccctttcccgagtcacgtcgctagcaaacctcatcccgcccgtgaaggccacgccattaaagcgcttcagtcaaaccctgcagcgctccattagcttccgcagtgagagccgccctgacatcctcgccccccgaccctggtccagaaatgccgccccctcgagcacgaaacggagagatagcaagctgtggagtgagaccttcgatgtgtgcgtcaatcagatgcttacatccaaggaaatcaaacgtcaggaggcgatctttgagctttcccaaggagaagaagacttgatagaagacttgaaattagcaaaaaaggcctatcatgaccccatgctgaaactctccataatgacagaacaagagttgaatcaaatttttggaacactggactctctaattcctctacatgaagagctccttagtcagcttcgagatgttaggaagcctgatggctcgactgaacatgttggtcccatcctcgtgggctggctcccttgcctcagctcctatgatagctactgcagcaatcaagtagccgccaaagctctgctggaccacaaaaagcaagatcaccgagtccaggatttcctacagcgatgtttagaatccccctttagccgcaaactagatctctggaatttcctcgatattccaagaagccgcctggtaaaataccctctgcttctccgagaaatcttgaggcacacaccaaatgataatccagatcagcagcacttggaagaagctataaatatcattcagggaattgtggcagaaatcaacaccaagactggtgaatctgaatgccgctattataaagagcggcttctttacttggaagaaggccagaaagactccctgatcgacagctctcgagtcttgtgttgtcatggtgaactgaagaacaatcggggcgtgaaactgcatgttttcctgttccaagaagtgcttgtgatcactcgagccgtcacccacaatgagcagctttgctaccagctgtaccgtcagccaatccccgtgaaagacctcctgctggaagacctccaggatggagaagtgaggctgggtggctccctgcgaggggcattcagcaacaatgagagaattaaaaacttcttcagagtcagtttcaaaaatggatcccaaagtcagacccactcgctacaagccaatgacactttcaacaaacagcagtggcttaactgtattcgtcaagccaaagaaacagttttgtgtgctgccgggcaagctggggtgcttgactccgagggatcgttcctaaatcccaccaccgggagcagagagctacagggagaaacaaaacttgagcagatggaccaatcggacagtgagtcagactgtagtatggacacgagtgaggtcagcctcgactgtgagcgcatggaacagacagactcttcctgtggaaacagcaggcacggtgaaagtaacgtctgacagaagcatgtgcacttcgggaagcaggcctgcatcttacctgtacagtatttgcattccacagatggaacggtttggagaagcactttttcatacttttgtgaaagtatacatgttggcccagtctctcgtatctgtacctttgtccctagtactgtaactgccaatctgtctgtgtaagctggaatctgtggcaactattaccctgtgttgtatttcccaagtgtctggatggatggagaggtactcaaacaagttactttcagttgtcctgctggattttaaaaaaatagaaaaagaatctcaaaactactgttttacatagattgtttgaagagtccttcctcttgtgcttctgtaccactttcccagctcttagatgtggtagctaaaggcacggaatttagacggccttgtaaatagggcatgaggaactcatctgtgtattgggatggtattagagagagaatcaggaaagaccaactcatgaagtgaacttggtttgatcttactcaactagaaagcttgaaaacatccctggggattctgaaggcttaattttgcaaaggaggatgcattgtctgaactttgcaacttcatccagtgcaagtttgatgcaagaatgtattaggacataaaatagaggctgaccttaaaagggccaggacagaagcggctgccagctctgaatctttaactgaaatgcacatggcaccaggaggtgtctctcatagttggttgctagcctaaaacatcagaatagaacccaaagggcttaggaaggcctgccaggataacaagaaggccctgtattcattgtgtttcatctgcctaggcctactcattattttagagaatgaatgaagcaacaaggaagagagaccatgactctatcgatgacactgtttatagaaacacaggagaggaagaatttggaatgaaaagcacttcgtcagaaccttctgtgggagccattgagagaaaagcatggtccagtgccttctgagaaaggccagagctttgggctttcctgctctgcttttgggtcgtcaatttgccatctctggttctgtgctataatcagaattgtaattatgttctccagaggccaatttcattaactctgattaattagaatcagctagccagattagtaacctctttgtccagccttgatttacagtgcagggtaaagtgcagaccttaaaaacagctaagtacctagaagagctccctgcaagtgtaaatattaaggatgacctgtgcaaaattatacccacaccagcactagtggtaattattctaaattattgccaaaaagttttttttaatctgtctttcaagtttacagaaaagaaagcagtaaatgcattgatgtcattttattatgtacatatatcatgtgcattcaagctgtgtgacaagatatatcaatataaaaacaaggtatatactttattattttttgaaaacaaggatattgtgatcaattttaccctgtaaaacatatttctgtatttataggtcttaaacatgatgaattttttctattacaagtttatttaaaactgctttctcaagtcgttattgatacagcaagtgaacctgctgcagacagaagcagaggaaagccaagaacagcctttattggtgaagaaaagaatgaatgattctttgtaggcgccatcagccacttttagaagccatcagccagtgtgttgggaaaagaggtttgtcaagtgttggcctatgggaaggtggtcaatgaatgttttgatgaaatgaatgtttttgtataatggccttaaacttttctggaagtatttcaaataaattacattattaagtcatcctc

SEQ ID NO: 9423 - protein, 526 aa, Homo sapiens; identical to SEQ ID NO: 796

SEQ ID NO: 9424 - DNA, 3628 bp, Homo sapiens
gccgccgcagccgccgccgccgcggtgagttttccagcctggagaggccgaaccagcgcgggggtcgaggagacctgagcctgccatactgagtctatggacagttccacagcaatgaatcaatgcagctgtagaggaatggaagaaaacaaggaaaggcctaaacggcagcggcaaaacaactttcccatgtttccctctcctaaagcctggaatttcagagggcgaaaacggaaacagagcacccaagatgaagatgctgttagcctttgcagtctcgacataagtgagcctagtaataaacgggtcaaacccctttcccgagtcacgtcgctagcaaacctcatcccgcccgtgaaggccacgccattaaagcgcttcagtcaaaccctgcagcgctccattagcttccgcagtgagagccgccctgacatcctcgccccccgaccctggtccagaaatgccgccccctcgagcacgaaacggagagatagcaagctgtggagtgagaccttcgatgtgtgcgtcaatcagatgcttacatccaaggaaatcaaacgtcaggaggcgatctttgagctttcccaaggagaagaagacttgatagaagacttgaaattagcaaaaaaggcctatcatgaccccatgctgaaactctccataatgacagaacaagagttgaatcaaatttttggaacactggactctctaattcctctacatgaagagctccttagtcagcttcgagatgttaggaagcctgatggctcgactgaacatgttggtcccatcctcgtgggctggctcccttgcctcagctcctatgatagctactgcagcaatcaagtagccgccaaagctctgctggaccacaaaaagcaagatcaccgagtccaggatttcctacagcgatgtttagaatccccctttagccgcaaactagatctctggaatttcctcgatattccaagaagccgcctggtaaaataccctctgcttctccgagaaatcttgaggcacacaccaaatgataatccagatcagcagcacttggaagaagctataaatatcattcagggaattgtggcagaaatcaacaccaagactggtgaatctgaatgccgctattataaagagcggcttctttacttggaagaaggccagaaagactccctgatcgacagctctcgagtcttgtgttgtcatggtgaactgaagaacaatcggggcgtgaaactgcatgttttcctgttccaagaagtgcttgtgatcactcgagccgtcacccacaatgagcagctttgctaccagctgtaccgtcagccaatccccgtgaaagacctcctgctggaagacctccaggatggagaagtgaggctgggtggctccctgcgaggggcattcagcaacaatgagagaattaaaaacttcttcagagtcagtttcaaaaatggatcccaaagtcagacccactcgctacaagccaatgacactttcaacaaacagcagtggcttaactgtattcgtcaagccaaagaaacagttttgtgtgctgccgggcaagctggggtgcttgactccgagggatcgttcctaaatcccaccaccgggagcagagagctacagggagaaacaaaacttgagcagatggaccaatcggacagtgagtcagactgtagtatggacacgagtgaggtcagcctcgactgtgagcgcatggaacagacagactcttcctgtggaaacagcaggcacggtgaaagtaacgtctgacagaagcatgtgcacttcgggaagcaggcctgcatcttacctgtacagtatttgcattccacagatggaacggtttggagaagcactttttcatacttttgtgaaagtatacatgttggcccagtctctcgtatctgtacctttgtccctagtactgtaactgccaatctgtctgtgtaagctggaatctgtggcaactattaccctgtgttgtatttcccaagtgtctggatggatggagaggtactcaaacaagttactttcagttgtcctgctggattttaaaaaaatagaaaaagaatctcaaaactactgttttacatagattgtttgaagagtccttcctcttgtgcttctgtaccactttcccagctcttagatgtggtagctaaaggcacggaatttagacggccttgtaaatagggcatgaggaactcatctgtgtattgggatggtattagagagagaatcaggaaagaccaactcatgaagtgaacttggtttgatcttactcaactagaaagcttgaaaacatccctggggattctgaaggcttaattttgcaaaggaggatgcattgtctgaactttgcaacttcatccagtgcaagtttgatgcaagaatgtattaggacataaaatagaggctgaccttaaaagggccaggacagaagcggctgccagctctgaatctttaactgaaatgcacatggcaccaggaggtgtctctcatagttggttgctagcctaaaacatcagaatagaacccaaagggcttaggaaggcctgccaggataacaagaaggccctgtattcattgtgtttcatctgcctaggcctactcattattttagagaatgaatgaagcaacaaggaagagagaccatgactctatcgatgacactgtttatagaaacacaggagaggaagaatttggaatgaaaagcacttcgtcagaaccttctgtgggagccattgagagaaaagcatggtccagtgccttctgagaaaggccagagctttgggctttcctgctctgcttttgggtcgtcaatttgccatctctggttctgtgctataatcagaattgtaattatgttctccagaggccaatttcattaactctgattaattagaatcagctagccagattagtaacctctttgtccagccttgatttacagtgcagggtaaagtgcagaccttaaaaacagctaagtacctagaagagctccctgcaagtgtaaatattaaggatgacctgtgcaaaattatacccacaccagcactagtggtaattattctaaattattgccaaaaagttttttttaatctgtctttcaagtttacagaaaagaaagcagtaaatgcattgatgtcattttattatgtacatatatcatgtgcattcaagctgtgtgacaagatatatcaatataaaaacaaggtatatactttattattttttgaaaacaaggatattgtgatcaattttaccctgtaaaacatatttctgtatttataggtcttaaacatgatgaattttttctattacaagtttatttaaaactgctttctcaagtcgttattgatacagcaagtgaacctgctgcagacagaagcagaggaaagccaagaacagcctttattggtgaagaaaagaatgaatgattctttgtaggcgccatcagccacttttagaagccatcagccagtgtgttgggaaaagaggtttgtcaagtgttggcctatgggaaggtggtcaatgaatgttttgatgaaatgaatgtttttgtataatggccttaaacttttctggaagtatttcaaataaattacattattaagtcatcctc

SEQ ID NO: 9425 - protein, 558 aa, Homo sapiens
MDSSTAMNQCSCRGMEENKERPKRQRQNNFPMFPSPKAWNFRGRKRKQSTQDEDAVSLCSLDISEPSNKRVKPLSRVTSLANLIPPVKATPLKRFSQTLQRSISFRSESRPDILAPRPWSRNAAPSSTKRRDSKLWSETFDVCVNQMLTSKEIKRQEAIFELSQGEEDLIEDLKLAKKAYHDPMLKLSIMTEQELNQIFGTLDSLIPLHEELLSQLRDVRKPDGSTEHVGPILVGWLPCLSSYDSYCSNQVAAKALLDHKKQDHRVQDFLQRCLESPFSRKLDLWNFLDIPRSRLVKYPLLLREILRHTPNDNPDQQHLEEAINIIQGIVAEINTKTGESECRYYKERLLYLEEGQKDSLIDSSRVLCCHGELKNNRGVKLHVFLFQEVLVITRAVTHNEQLCYQLYRQPIPVKDLLLEDLQDGEVRLGGSLRGAFSNNERIKNFFRVSFKNGSQSQTHSLQANDTFNKQQWLNCIRQAKETVLCAAGQAGVLDSEGSFLNPTTGSRELQGETKLEQMDQSDSESDCSMDTSEVSLDCERMEQTDSSCGNSRHGESNV

SEQ ID NO: 9426 - DNA, 529 bp, Homo sapiens
gcacagggctccactgcagttaggagccggtgagtccgggtggatgaggtcagagcgccccatggtgtggtgctgcctctttgtccccagttcttccagggatcaccccagaagaaaacagctgatacttacatctttgctccaggatctgctttaggggaactccaaactaacagcaggtaaacataaaagaaagaagacttactaaagaaagaagactggccaggcgctgtggctcatgcctgtaatctcagcactttaggaggccaaggcgagtggatcacctgaggtcaggagttcgagaccagcctggccaacatggtgaaaccccctctccactaaaaatacaaaaatcagccagtgtggtggcacatgcctgtaatcccagctactcaggaggccgaggcaggctaattgcttgaacctgggcagtggaggtttcagtgagctgagattatgccgctgcactccagcctgggcaacacagcgggactccatctcataaataaataaataagacatacctaaa

SEQ ID NO: 9427 - protein, 37 aa, Homo sapiens
MRSERPMVWCCLFVPSSSRDHPRRKQLILTSLLQDLL

SEQ ID NO: 9428 - DNA, 357 bp, Homo sapiens
accagacccacatgagacctctatcagcagaactgctggtgaaaatgtgaggaatgtctctgtccttccctgactcatcagacctcaggatgaccttccttcctgacacagccctcctgcgcaagtaactcaccatcttcctgtgcccagctaccaccagacacctgcaggtgagctcactgcaagcttggcgtcgtggtgctgcgcacagccctcttcagcacacagtgtcagcaccgtcctataaaatctccagccagcctttgtttctttgcagtcggcatctctcatgcaggctgccctgtctccttgcaacctatttttctactttctccaataaatcagcctttttctgcc

SEQ ID NO: 9429 - protein, 75 aa, Homo sapiens
LTIFLCPATTRHLQVSSLQAWRRGAAHSPLQHTVSAPSYKISSQPLFLCSRHLSCRLPCLLATYFSTFSNKSAFF

SEQ ID NO: 9430 - DNA, 8192 bp, Homo sapiens; identical to SEQ ID NO: 797

SEQ ID NO: 9431 - protein, 2602 aa, Homo sapiens; identical to SEQ ID NO: 798

SEQ ID NO: 9432 - DNA, 344 bp, Homo sapiens
acgcatcctgccatctggggtgaggctagacccattttacagataagggggtccggagggttaattgacctgtccaaggtcagcaagtagggcccagctgagaactgaaggaagtgggcaacagttagaaggaggctttgttttcctctcctctcccaaacctacaccagggtcttcctgaaaggagggagggaattggtgtctcttgctggactgggccttctggtctggggaggaagaataaggatgaagtctcccttgtggtctgagatagttggaggttgcagtgagccgaggtctttgtgtaactgcactccagcctgggagagcgagactctgactca

SEQ ID NO: 9433 - protein, 31 aa, Homo sapiens
MKSPLWSEIVGGCSEPRSLCNCTPAWESETL

SEQ ID NO: 9434 - DNA, 856 bp, Homo sapiens
agggactggccctggcctgtgatttgggtctcttcctgaggaaaccaggtcactatagtgaccctagtgacaggaagaaagggagatgggtgtggctgccaggactttctccagtggaaaagggattccctctaggctgagcctcccctgggccttagggcctcacccttcccttcccccacacctgtcctggcaggtaaggctgcttcctgcttcctgggcccagatggcagccgcaccacccagctgatctccagcagccctccccctccccaagggtggcttccctgcagaagaatctgcatggcacgctgttgtcttctttctggggtccatctcctgtactggggagggagaacctcagaatctcctggaattctttaccattcagaaaccagcctcccctctgaagaatcccaaggcccagctgggctcaatttggatctgttctttgttttaaaaatgtgtatttatttaattaactgaataaagaaacttaaagtaaaccagaagtatccaaatacgacatgaaatctctaaaacaacaacaaaaccaaaccaaaccgcagcactagcaaatcacagactgcctgatctacccactgtttacagaggcagcagctacttccagcactgtctctcatcagtgcccggggctgtgggtctcattctagattttgtctacatttttttacatggttctcctgattccctgctccccctccccaccaccgccccgcctggagatggagccttgctctgtctccaggctggagttgcagtgagccgaggtctttgtgtaactgcactccagcctgggagagcgagactctgactcaaaaaaaaaaaaaaaaaa

SEQ ID NO: 9435 - protein, 60 aa, Homo sapiens
MARCCLLSGVHLLYWGGRTSESPGILYHSETSLPSEESQGPAGLNLDLFFVLKMCIYLIN

SEQ ID NO: 9436 - DNA, 369 bp, Homo sapiens
cccaggagagggggctggaagagagcgagctgccattgtattttggttgctgtggatctaaggagaagagatgtttaggagtctttccctggcatggttcctcctgccttcacccatcactcttttcctcgagggattccctgtggggtgcacagccccagggtgggccagactgagctcacaggagcatgggctgtgtttcagatgtggcctcagaatccttctcaacacagtgtactagcaccacttggtgctcctgatctactgtatcatctcttgaaaaactactaacatgaaaagacctgccaagtcaactttatattaactgaacccttgacacagtgatggataaaaattaattcaaacagc

SEQ ID NO: 9437 - protein, 65 aa, Homo sapiens
MVPPAFTHHSFPRGIPCGVHSPRVGQTELTGAWAVFQMWPQNPSQHSVLAPLGAPDLLYHLLKNY

SEQ ID NO: 9438 - DNA, 8192 bp, Homo sapiens
actctagtcctttacctcatgtgcttacaaaggcttttaagataattctaggtttgtgcctttgagcaagtggatttttgaatcacacaggatgctattctagactttttagatatatccaggaatagagtaaaaaataaaatccctcctgcataaaggcaccaggctttttccaagctttgtttattttttaacaccacttcttcaaggaatggataatccccatcttcatgcaagaacatagcacccggaggagaagtctcagtctgtgcccagactgggaatcctgggacccgcagaagcctgtggataatgcacgagaagccatgcagcaggcagatgactggctgggtgtcccacaggtcatcactcctgaagaaatcattcacccggatgtggacgagcactcagttatgacttacctgtcccagttccccaaagccaagctcaagccgggggctcctctcaaacccaaactcaacccgaagaaagccagggcctatggcagaggaatcgagcccactggaaacatggtgaagcagccagccaagttcactgtggacaccatcagcgccgggcaaggagacgtgatggtgtttgttgaggacccagaagggaacaaagaggaggcacaagtgacccctgacagtgacaagaacaagacatactctgtggagtatctgcccaaggtcaccgggctacacaaagtcacagtcctctttgcaggacagcacatctccaagagcccatttgaagtgagtgttgacaaggcccagggagatgccagtaaagtcactgcaaaaggtccagggttggaagctgtagggaacatcgccaataagcccacctactttgacatctatacggcaggagctggtgtgggtgacattggtgtggaggtggaagatccccaggggaagaacaccgtggagttgctcgtggaagacaaaggaaaccaggtgtatcgatgtgtgtacaaacccatgcagcctggccctcacgtggtcaagatcttctttgctggggacactattcctaagagtcccttcgttgtgcaggttggggaagcctgcaatccaaatgcctgccgggccagtggccgaggcctacaacccaaaggcgtccgtatccgggagaccacagatttcaaggttgacaccaaagctgcaggaagtggggagctcggtgtaaccatgaagggtcctaagggtctggaggagctggtgaagcagaaagactttctggatggggtctacgcattcgagtattaccccagcaccccggggagatacagcattgccatcacatgggggggacaccacattccaaagagcccctttgaagttcaagttggccctgaagcgggtatgcagaaagtccgtgcttggggccctgggctccatggtgggattgtcgggcggtcagcggacttcgtggtagaatccattggctctgaagtggggtctctggggtttgccattgaaggcccctctcaggcaaagattgagtacaacgaccagaatgatggatcgtgtgatgtcaaatactggcccaaggagcctggcgaatatgctgttcacatcatgtgtgacgacgaagacatcaaggacagcccgtacatggccttcatccacccagccacgggaggctacaaccctgatctggttcgagcatacgggccaggtttggagaaatctggatgcattgtcaacaacctggccgagttcactgtggatcctaaggatgctggaaaagctcccttaaagatatttgctcaggatggggaaggccaacgcattgacatccagatgaagaaccggatggacggcacatatgcatgctcatacaccccggtgaaggccatcaagcacaccattgctgtggtctggggaggcgtgaacatcccgcacagcccctacagggtcaacatcgggcaaggtagccatcctcagaaggtcaaagtgtttgggccaggtgtggagagaagtggtctgaaggcaaatgaacctacacacttcacggtggactgtactgaggctggggaaggtgatgtcagtgttggcattaagtgtgatgcccgggtgttaagtgaagatgaggaagacgtggattttgacattattcacaatgccaatgatacgttcacagtcaaatatgtgcctcctgctgctgggcgatacactatcaaagttctctttgcatctcaggaaatccccgccagccctttcagagtcaaagttgacccttcccacgatgccagcaaagtgaaggcagaaggcccagggctcagcaaagcaggtgtggaaaatgggaaaccgacccacttcactgtctacaccaagggggctgggaaagccccgctcaacgtgcagttcaacagccctcttcctggcgatgcagtgaaggatttggatatcatcgataattatgactactctcacacggttaaatatacacccacccaacagggcaacatgcaggttctggtgacttacggtggcgatcccatccctaaaagccctttcactgtgggtgttgctgcaccgctggatctgagcaagataaaactcaatgggctggaaaacagggtggaagttgggaaggatcaggagttcaccgttgataccaggggggcaggaggccaggggaagctggacgtgacaatcctcagcccctctcggaaggtcgtgccatgcctagtgacacctgtgacaggccgggagaacagcacggccaagttcatccctcgggaggaggggctgtatgctgtagacgtgacctacgatggacaccctgtgcccgggagcccctacacagtggaggcctcgctgccaccagatcccagcaaggtgaaggcccacggtcccggcctcgaaggtggtctcgtgggcaagcctgccgagttcaccatcgataccaaaggagctggtactggaggtctgggcttaacggtggaaggtccgtgcgaggccaaaatcgagtgctccgacaatggtgatgggacctgctccgtctcttaccttcccacaaaacccggggagtacttcgtcaacatcctctttgaagaagtccacatacctgggtctcccttcaaagctgacattgaaatgccctttgacccctctaaagtcgtggcatcggggccaggtctcgagcacgggaaggtgggtgaagctggcctccttagcgtcgactgctcggaagcgggaccgggggccctgggcctggaagctgtctcggactcgggaacaaaagccgaagtcagtattcagaacaacaaagatggcacctacgcggtgacctacgtgcccctgacggccggcatgtacacgttgaccatgaagtatggtggcgaactcgtgccacacttccccgcccgggtcaaggtggagcccgccgtggacaccagcaggatcaaagtctttggaccaggaatagaagggaaagatgtgttccgggaagctaccaccgactttacagttgactctcggccgctgacccaggttgggggtgaccacatcaaggcccacattgccaacccctcaggggcctccaccgagtgctttgtcacagacaatgcggatgggacctaccaggtggaatacacaccctttgagaaaggtctccatgtagtggaggtgacatatgatgacgtgcctatcccaaacagtcccttcaaggtggctgtcactgaaggctgccagccatctagggtgcaagcccaaggacctggattgaaagaggcctttaccaacaagcccaatgtcttcaccgtggttaccagaggcgcaggaattggtgggcttggcataactgttgagggaccatcagagtcgaagataaattgcagagacaacaaggatggcagctgcagtgctgagtacattcctttcgcaccgggggattacgatgttaatatcacatatggaggagcccacatccccggcagccccttcagggttcctgtgaaggatgttgtggaccccagcaaggtcaagattgccggccccgggctgggctcaggcgtccgagcccgtgtcctgcagtccttcacggtggacagcagcaaggctggcctggctccgctggaagtgagggttctgggcccacgaggcttggtggagccagtgaacgtggtggacaatggagatggcacacacacagtaacctacaccccatctcaggagggaccttacatggtctcagttaaatatgctgatgaagagattcctcgcagtcccttcaaggtcaaggtccttcccacatatgatgccagcaaagtgactgccagtggccccggccttagttcctatggtgtgcctgccagtctacctgtggactttgcaattgatgcccgagatgccggggaaggcctgcttgctgttcaaataacggaccaagaaggaaaacccaaaagagccattgtccatgacaataaagatggcacgtatgctgtcacctacatccccgacaagactgggcgctatatgattggagtcacctacgggggtgacgacatcccactttctccttatcgcatccgagccacacagacgggtgatgccagcaagtgcctggccacgggtcctggaatcgcctccactgtgaaaactggcgaagaagtaggctttgtggttgatgccaagactgccgggaagggtaaagtgacctgcacggttctgaccccagatggcactgaggccgaggccgatgtcattgagaatgaagatggaacctatgacatcttctacacagctgccaagccgggcacatatgtgatctatgtgcgcttcggtggtgttgatattcctaacagccccttcactgtcatggccacagatggggaagtcacagccgtggaggaggcaccggtgaccgaagaggcctatgtcccagtgagtgacatgaacggcctgggatttaagccttttgacctggtcattccgtttgctgtcaggaaaggagaaatcactggagaggtccacatgccttctgggaagacagccacacctgagattgtggacaacaaggacggcacggtcactgttagatatgcccccactgaggtcgggctccatgagatgcacatcaaatacatgggcagccacatccctgagagcccactccagttctacgtgaactaccccaacagtggaagtgtttctgcatacggtccaggcctcgtgtatggagtggccaacaaaactgccaccttcaccatcgtcacagaggatgcaggagaaggtggtctggacttggctattgagggcccctcaaaagcagaaatcagctgcattgacaataaagatgggacatgcacagtgacctacctgccgactctgccaggcgactacagcattctggtcaagtacaatgacaagcacatccctggcagccccttcacagccaagatcacagatgacagcaggcggtgctcccaggtgaagttgggctcagccgctgacttcctgctcgacatcagtgagactgacctcagcagcctgacggccagcattaaggccccatctggccgagacgagccctgtctcctgaagaggctgcccaacaaccacattggcatctccttcatcccccgggaagtgggcgaacatctggtcagcatcaagaaaaatggcaaccatgtggccaacagccccgtgtctatcatggtggtccagtcggagattggtgacgcccgccgagccaaagtctatggccgcggcctgtcagaaggccggactttcgagatgtctgacttcatcgtggacacaagggatgcaggttatggtggcatatccttggcggtggaaggccccagcaaagtggacatccagacggaggacctggaagatggcacctgcaaagtctcctacttccctaccgtgcctggggtttatatcgtctccaccaaattcgctgacgagcacgtgcctgggagcccatttaccgtgaagatcagtggggagggaagagtcaaagagagcatcacccgcaccagtcgggccccgtccgtggccactgtcgggagcatttgtgacctgaacctgaaaatcccagaaatcaacagcagtgatatgtcggcccacgtcaccagcccctctggccgtgtgactgaggcagagattgtgcccatggggaagaactcacactgcgtccggtttgtgccccaggagatgggcgtgcacacggtcagcgtcaagtaccgtgggcagcacgtcaccggcagccccttccagttcaccgtggggccacttggtgaaggaggcgcccacaaggtgcgggcaggaggccctggcctggagagaggagaagcgggagtcccagctgagttcagcatttggacccgggaagcaggcgctggaggcctctccatcgctgttgagggccccagtaaggccgagattacattcgatgaccataaaaatgggtcgtgcggtgtatcttatattgcccaagagcctggtaactacgaggtgtccatcaagttcaatgatgagcacatcccggaaagcccctacctggtgccggtcatcgcaccctccgacgacgcccgccgcctcactgttatgagccttcaggaatcgggattaaaagttaaccagccagcatcctttgctataaggttgaatggcgcaaaaggcaagattgatgcaaaggtgcacagcccctctggagccgtggaggagtgccacgtgtctgagctggagccagataagtatgctgttcgcttcatccctcatgagaatggtgtccacaccatcgatgtcaagttcaatgggagccacgtggttggaagccccttcaaagtgcgcgttggggagcctggacaagcggggaaccctgccctggtgtccgcctatggcacgggactcgaagggggcaccacaggtatccagtcggaattctttattaacaccacccgagcaggtccagggacattatccgtcaccatcgaaggcccatccaaggttaaaatggattgccaggaaacacctgaagggtacaaagtcatgtacacccccatggctcctggtaactacctgatcagcgtcaaatacggtgggcccaaccacatcgtgggcagtcccttcaaggccaaggtgacaggccagcgtctagttagccctggctcagccaacgagacctcatccatcctggtggagtcagtgaccaggtcgtctacagagacctgctatagcgccattcccaaggcatcctcggacgccagcaaggtgacctctaagggggcagggctctcaaaggcctttgtgggccagaagagttccttcctggtggactgcagcaaagctggctccaacatgctgctgatcggggtccatgggcccaccaccccctgcgaggaggtctccatgaagcatgtaggcaaccagcaatacaacgtcacatacgtcgtcaaggagaggggcgattatgtgctggctgtgaagtggggggaggaacacatccctggcagcccttttcatgtcacagtgccttaaaacagttttctcaaatcctggagagagttcttgtggttgcttttgttgcttgtttgtaattcattttatacaaagccctccagcctgtttgtggggctgaaaccccatccctaaaatattgctgttgtaaaatgccttcagaaataagtcctagactggactcttgagggacatattggagaatcttaagaaatgcaagcttgttcagggggctgagaagatcctgagtacactaggtgcaaaccagaactcttggtggaacagaccagccactgcagcagacagaccaggaacacaatgagactgacatttcaaaaaaacaaaactggctagcctgagctgctggttcactcttcagcatttatgaaacaaggctaggggaagatgggcagagaaaaaggggacacctagtttggttgtcatttggcaaaggagatgacttaaaatccgcttaatctcttccagtgtccgtgttaatgtatttggctattagatcactagcactgctttaccgctcctcatcgccaacacccccatgctctgtggccttcttacacttctcagagggcagagtggcagccgggcaccctacagaaactcagagggcagagtggcagccaggcccacatgtctctcaagtacctgtcccctcgctctggtgattatttcttgcagaatcaccacacgagacca

SEQ ID NO: 9439 - protein, 2422 aa, Homo sapiens
MQEHSTRRRSLSLCPDWESWDPQKPVDNAREAMQQADDWLGVPQVITPEEIIHPDVDEHSVMTYLSQFPKAKLKPGAPLKPKLNPKKARAYGRGIEPTGNMVKQPAKFTVDTISAGQGDVMVFVEDPEGNKEEAQVTPDSDKNKTYSVEYLPKVTGLHKVTVLFAGQHISKSPFEVSVDKAQGDASKVTAKGPGLEAVGNIANKPTYFDIYTAGAGVGDIGVEVEDPQGKNTVELLVEDKGNQVYRCVYKPMQPGPHVVKIFFAGDTIPKSPFVVQVGEACNPNACRASGRGLQPKGVRIRETTDFKVDTKAAGSGELGVTMKGPKGLEELVKQKDFLDGVYAFEYYPSTPGRYSIAITWGGHHIPKSPFEVQVGPEAGMQKVRAWGPGLHGGIVGRSADFVVESIGSEVGSLGFAIEGPSQAKIEYNDQNDGSCDVKYWPKEPGEYAVHIMCDDEDIKDSPYMAFIHPATGGYNPDLVRAYGPGLEKSGCIVNNLAEFTVDPKDAGKAPLKIFAQDGEGQRIDIQMKNRMDGTYACSYTPVKAIKHTIAVVWGGVNIPHSPYRVNIGQGSHPQKVKVFGPGVERSGLKANEPTHFTVDCTEAGEGDVSVGIKCDARVLSEDEEDVDFDIIHNANDTFTVKYVPPAAGRYTIKVLFASQEIPASPFRVKVDPSHDASKVKAEGPGLSKAGVENGKPTHFTVYTKGAGKAPLNVQFNSPLPGDAVKDLDIIDNYDYSHTVKYTPTQQGNMQVLVTYGGDPIPKSPFTVGVAAPLDLSKIKLNGLENRVEVGKDQEFTVDTRGAGGQGKLDVTILSPSRKVVPCLVTPVTGRENSTAKFIPREEGLYAVDVTYDGHPVPGSPYTVEASLPPDPSKVKAHGPGLEGGLVGKPAEFTIDTKGAGTGGLGLTVEGPCEAKIECSDNGDGTCSVSYLPTKPGEYFVNILFEEVHIPGSPFKADIEMPFDPSKVVASGPGLEHGKVGEAGLLSVDCSEAGPGALGLEAVSDSGTKAEVSIQNNKDGTYAVTYVPLTAGMYTLTMKYGGELVPHFPARVKVEPAVDTSRIKVFGPGIEGKDVFREATTDFTVDSRPLTQVGGDHIKAHIANPSGASTECFVTDNADGTYQVEYTPFEKGLHVVEVTYDDVPIPNSPFKVAVTEGCQPSRVQAQGPGLKEAFTNKPNVFTVVTRGAGIGGLGITVEGPSESKINCRDNKDGSCSAEYIPFAPGDYDVNITYGGAHIPGSPFRVPVKDVVDPSKVKIAGPGLGSGVRARVLQSFTVDSSKAGLAPLEVRVLGPRGLVEPVNVVDNGDGTHTVTYTPSQEGPYMVSVKYADEEIPRSPFKVKVLPTYDASKVTASGPGLSSYGVPASLPVDFAIDARDAGEGLLAVQITDQEGKPKRAIVHDNKDGTYAVTYIPDKTGRYMIGVTYGGDDIPLSPYRIRATQTGDASKCLATGPGIASTVKTGEEVGFVVDAKTAGKGKVTCTVLTPDGTEAEADVIENEDGTYDIFYTAAKPGTYVIYVRFGGVDIPNSPFTVMATDGEVTAVEEAPVTEEAYVPVSDMNGLGFKPFDLVIPFAVRKGEITGEVHMPSGKTATPEIVDNKDGTVTVRYAPTEVGLHEMHIKYMGSHIPESPLQFYVNYPNSGSVSAYGPGLVYGVANKTATFTIVTEDAGEGGLDLAIEGPSKAEISCIDNKDGTCTVTYLPTLPGDYSILVKYNDKHIPGSPFTAKITDDSRRCSQVKLGSAADFLLDISETDLSSLTASIKAPSGRDEPCLLKRLPNNHIGISFIPREVGEHLVSIKKNGNHVANSPVSIMVVQSEIGDARRAKVYGRGLSEGRTFEMSDFIVDTRDAGYGGISLAVEGPSKVDIQTEDLEDGTCKVSYFPTVPGVYIVSTKFADEHVPGSPFTVKISGEGRVKESITRTSRAPSVATVGSICDLNLKIPEINSSDMSAHVTSPSGRVTEAEIVPMGKNSHCVRFVPQEMGVHTVSVKYRGQHVTGSPFQFTVGPLGEGGAHKVRAGGPGLERGEAGVPAEFSIWTREAGAGGLSIAVEGPSKAEITFDDHKNGSCGVSYIAQEPGNYEVSIKFNDEHIPESPYLVPVIAPSDDARRLTVMSLQESGLKVNQPASFAIRLNGAKGKIDAKVHSPSGAVEECHVSELEPDKYAVRFIPHENGVHTIDVKFNGSHVVGSPFKVRVGEPGQAGNPALVSAYGTGLEGGTTGIQSEFFINTTRAGPGTLSVTIEGPSKVKMDCQETPEGYKVMYTPMAPGNYLISVKYGGPNHIVGSPFKAKVTGQRLVSPGSANETSSILVESVTRSSTETCYSAIPKASSDASKVTSKGAGLSKAFVGQKSSFLVDCSKAGSNMLLIGVHGPTTPCEEVSMKHVGNQQYNVTYVVKERGDYVLAVKWGEEHIPGSPFHVTVP

SEQ ID NO: 9440 - DNA, 478 bp, Homo sapiens
atcatttaggtgggagagaggatgttagtaaattaaaagaaaaaggttattcattaaatgctaaatagtataggatgtacaggccagaaaagaaaaaggaagtccacgagtgaggaaaggttggaaaacaatagtagaattaggaaagctattcaaaatgctctcttatgtaaaaaagagctttgcttaggaatatgttagaattttttttgcctgttttttgactaagacttgagagttctttctacatgttctagatactagtgttctgttggacatatggtttgcaaattttttctcccagtctttagcctgtatattcatcctcttaactgtaaaaagttttaaattgtttgtaaaagtaaaatccagcccccagatcccagtctcagcaacattttgagttctgtttgagacggtgtccgggtggcttttatagtgtgagggctaagacagcttgtcttgcaggacagtaggt

SEQ ID NO: 9441 - protein, 47 aa, Homo sapiens
MLNSIGCTGQKRKRKSTSEERLENNSRIRKAIQNALLCKKELCLGIC

SEQ ID NO: 9442 - DNA, 6889 bp, Homo sapiens
gcaggaggttttatcttttgaagctcagggcagaaatggtttgggggaaattaggtcatgggtctgggatcagattctgtgaagttactgagcttcaggacctgcatgtgtttgtgtgcatgtatgtgtccctgtgtatgtgtgaatgagagagggagaaaaagaagaaagagaagctttacttggatatctgcctctattatgaaggactctcaagtaacagccttttgattttagctgacgacacggattcccagtcatggcgcagccccttgaaagccctttcagagttctttaaaggtgacccgaagggtgactttaataagacaggtttgcattttcccatggctgctgaattatgtaacccaaatgcttcttgctggcctcacttctaaaattgcttacacctgcctcatctgctttgcttaatgagcatgccatcctttgattaacctaccctggagttgacccatccttgactgtcacgttggaagctgggatctggactctgcaacccaacgcgtgccttgattatgttttagcataatctctaacatctccacaggcttcaccttgagggtccccttgccccatgagattggcaccctcacctgccctgcacctatgccccagcatgctggtaccacagtgttctttgctcaaaggtggccacaagtcttgactagccagcccattggttaatttttgctcttcacaattctggactctttggcagtgtctcagctgtagagtaaaattgccacatcctaagcgtgcctaaccagcttgaaaggttatattgtgtcttcaacacacatcatccacatacaccctccagcagcaagcacaggcagtctccttaattatactctagggcagactgagtgtattttagccaacaaaaagctaaaggtgtctctcggggtcatttctgcaaccatgaattggggatcctgtgatttttttcaggcctgtgattatggttgctggcctttttgttactcatcagtggaaaccaatagctcttggggatggatgtggtcctatttcagactcagccaagggtggagtaaaggtgaggccaggcagctccttaaacctctcatctctgtcctcaggcttggtggagccagtgaacgtggtggacaatggagatggcacacacacagtaacctacaccccatctcaggagggaccttacatggtctcagttaaatatgctgatgaagagattcctcgcagtcccttcaaggtcaaggtccttcccacatatgatgccagcaaagtgactgccagtggccccggccttagttcctatggtgtgcctgccagtctacctgtggactttgcaattgatgcccgagatgccggggaaggcctgcttgctgttcaaataacggaccaagaaggaaaacccaaaagagccattgtccatgacaataaagatggcacgtatgctgtcacctacatccccgacaagactgggcgctatatgattggagtcacctacgggggtgacgacatcccactttctccttatcgcatccgagccacacagacgggtgatgccagcaagtgcctggccacgggtcctggaatcgcctccactgtgaaaactggcgaagaagtaggctttgtggttgatgccaagactgccgggaagggtaaagtgacctgcacggttctgaccccagatggcactgaggccgaggccgatgtcattgagaatgaagatggaacctatgacatcttctacacagctgccaagccgggcacatatgtgatctatgtgcgcttcggtggtgttgatattcctaacagccccttcactgtcatggtgaccgaagaggcctatgtcccagtgagtgacatgaacggcctgggatttaagccttttgacctggtcattccgtttgctgtcaggaaaggagaaatcactggagaggtccacatgccttctgggaagacagccacacctgagattgtggacaacaaggacggcacggtcactgttagatatgcccccactgaggtcgggctccatgagatgcacatcaaatacatgggcagccacatccctgagagcccactccagttctacgtgaactaccccaacagtggaagtgtttctgcatacggtccaggcctcgtgtatggagtggccaacaaaactgccaccttcaccatcgtcacagaggatgcaggagaaggtggtctggacttggctattgagggcccctcaaaagcagaaatcagctgcattgacaataaagatgggacatgcacagtgacctacctgccgactctgccaggcgactacagcattctggtcaagtacaatgacaagcacatccctggcagccccttcacagccaagatcacagatgacagcaggcggtgctcccaggtgaagttgggctcagccgctgacttcctgctcgacatcagtgagactgacctcagcagcctgacggccagcattaaggccccatctggccgagacgagccctgtctcctgaagaggctgcccaacaaccacattggcatctccttcatcccccgggaagtgggcgaacatctggtcagcatcaagaaaaatggcaaccatgtggccaacagccccgtgtctatcatggtggtccagtcggagattggtgacgcccgccgagccaaagtctatggccgcggcctgtcagaaggccggactttcgagatgtctgacttcatcgtggacacaagggatgcaggttatggtggcatatccttggcggtggaaggccccagcaaagtggacatccagacggaggacctggaagatggcacctgcaaagtctcctacttccctaccgtgcctggggtttatatcgtctccaccaaattcgctgacgagcacgtgcctgggagcccatttaccgtgaagatcagtggggagggaagagtcaaagagagcatcacccgcaccagtcgggccccgtccgtggccactgtcgggagcatttgtgacctgaacctgaaaatcccagaaatcaacagcagtgatatgtcggcccacgtcaccagcccctctggccgtgtgactgaggcagagattgtgcccatggggaagaactcacactgcgtccggtttgtgccccaggagatgggcgtgcacacggtcagcgtcaagtaccgtgggcagcacgtcaccggcagccccttccagttcaccgtggggccacttggtgaaggaggcgcccacaaggtgcgggcaggaggccctggcctggagagaggagaagcgggagtcccagctgagttcagcatttggacccgggaagcaggcgctggaggcctctccatcgctgttgagggccccagtaaggccgagattacattcgatgaccataaaaatgggtcgtgcggtgtatcttatattgcccaagagcctggtaactacgaggtgtccatcaagttcaatgatgagcacatcccggaaagcccctacctggtgccggtcatcgcaccctccgacgacgcccgccgcctcactgttatgagccttcaggaatcgggattaaaagttaaccagccagcatcctttgctataaggttgaatggcgcaaaaggcaagattgatgcaaaggtgcacagcccctctggagccgtggaggagtgccacgtgtctgagctggagccagataagtatgctgttcgcttcatccctcatgagaatggtgtccacaccatcgatgtcaagttcaatgggagccacgtggttggaagccccttcaaagtgcgcgttggggagcctggacaagcggggaaccctgccctggtgtccgcctatggcacgggactcgaagggggcaccacaggtatccagtcggaattctttattaacaccacccgagcaggtccagggacattatccgtcaccatcgaaggcccatccaaggttaaaatggattgccaggaaacacctgaagggtacaaagtcatgtacacccccatggctcctggtaactacctgatcagcgtcaaatacggtgggcccaaccacatcgtgggcagtcccttcaaggccaaggtgacaggtaacgaacaaccaccttcggagttactctcccttcctggggagctggttgtgtcagatcaatcatagtggaaactatggatggttttagatgtgttaaagctactttgaactttgaatgtcagtaaatagtatgagatgtcagagggcagtgtttgaaacttacaaaagtccacagagtggagccgtgcagaagttgagaaagcatgttaggatgttaggtggttttctatctctaacaggaaagaatacatattgaaatcttacgtatttgtttagatcagggtctgaaaaatcccctgatttctaattttcacttgaaaaataatcaaaaagttttcctatacttataaaaatgtgtctcctccaaaacactggaaaaaataccaaactatgaaaaccacttcacagccaccacccaaggtaaccaccataaacactgtagtaaatcccttccacacgtcatgattcactgttacataaagaatgtaggttcatcgcaggaaaattagaaaattcagatagaaaaatcatcctttctcatccacagaatcattttttgatatttcattatatgtcatcccaaacttttacactgcttatacatagactattttatgtcaatagaaagatgtgaattccacaggcacatctttggtgggtagggggtggggggattgggagggtccttggccttgtcagccaaggccagactcatccatttgcccagaaagccagatcctagttgtatgggggtgggatcctaggggtttagaagacattatgggtgtgagatacaggtgtggtggcttttgtgttggggtgcgcgggctctcctggggttactgtgtagggtactcgcctgtcctctggctgagagacccctcttgatctggccattcatgcctgtccccctccctcctgtatcttaggccagcgtctagttagccctggctcagccaacgagacctcatccatcctggtggagtcagtgaccaggtcgtctacagagacctgctatagcgccattcccaaggcatcctcggacgccagcaaggtgacctctaagggggcagggctctcaaaggcctttgtgggccagaagagttccttcctggtggactgcagcaaagctggctccaacatgctgctgatcggggtccatgggcccaccaccccctgcgaggaggtctccatgaagcatgtaggcaaccagcaatacaacgtcacatacgtcgtcaaggagaggggcgattatgtgctggctgtgaagtggggggaggaacacatccctggcagcccttttcatgtcacagtgccttaaaacagttttctcaaatcctggagagagttcttgtggttgcttttgttgcttgtttgtaattcattttatacaaagccctccagcctgtttgtggggctgaaaccccatccctaaaatattgctgttgtaaaatgccttcagaaataagtcctagactggactcttgagggacatattggagaatcttaagaaatgcaagcttgttcagggggctgagaagatcctgagtacactaggtgcaaaccagaactcttggtggaacagaccagccactgcagcagacagaccaggaacacaatgagactgacatttcaaaaaaacaaaactggctagcctgagctgctggttcactcttcagcatttatgaaacaaggctaggggaagatgggcagagaaaaaggggacacctagtttggttgtcatttggcaaaggagatgacttaaaatccgcttaatctcttccagtgtccgtgttaatgtatttggctattagatcactagcactgctttaccgctcctcatcgccaacacccccatgctctgtggccttcttacacttctcagagggcagagtggcagccgggcaccctacagaaactcagagggcagagtggcagccaggcccacatgtctctcaagtacctgtcccctcgctctggtgattatttcttgcagaatcaccacacgagaccatcccggcagtcatggttttgctttagttttccaagtccgtttcagtcccttccttggtctgaagaaattctgcagtggcgagcagtttcccacttgccaaagatcccttttaaccaacactagcccttgtttttaacacacgctccagcccttcatcagcctgggcagtcttaccaaaatgtttaaagtgatctcagaggggcccatggattaacgccctcatcccaaggtccgtcccatgacataacactccacacccgccccagccaacttcatgggtcactttttctggaaaataatgatctgtacagacaggacagaatgaaactcctgcgggtctttggcctgaaagttgggaatggttgggggagagaagggcagcagcttattggtggtcttttcaccattggcagaaacagtgagagctgtgtggtgcagaaatccagaaatgaggtgtagggaattttgcctgccttcctgcagacctgagctggctttggaatgaggttaaagtgtcagggacgttgcctgagcccaaatgtgtagtgtggtctgggcaggcagacctttaggttttgctgcttagtcctgaggaagtggccactcttgtggcaggtgtagtatctggggcgagtgttgggggtaaaagcccaccctacagaaagtggaacagcccggagcctgatgtgaaaggaccacgggtgttgtaagctgggacacggaagccaaactggaatcaaacgccgactgtaaattgtatcttataacttattaaataaaacatttgctccgtaaagttg

SEQ ID NO: 9443 - protein, 1053 aa, Homo sapiens
MVAGLFVTHQWKPIALGDGCGPISDSAKGGVKVRPGSSLNLSSLSSGLVEPVNVVDNGDGTHTVTYTPSQEGPYMVSVKYADEEIPRSPFKVKVLPTYDASKVTASGPGLSSYGVPASLPVDFAIDARDAGEGLLAVQITDQEGKPKRAIVHDNKDGTYAVTYIPDKTGRYMIGVTYGGDDIPLSPYRIRATQTGDASKCLATGPGIASTVKTGEEVGFVVDAKTAGKGKVTCTVLTPDGTEAEADVIENEDGTYDIFYTAAKPGTYVIYVRFGGVDIPNSPFTVMVTEEAYVPVSDMNGLGFKPFDLVIPFAVRKGEITGEVHMPSGKTATPEIVDNKDGTVTVRYAPTEVGLHEMHIKYMGSHIPESPLQFYVNYPNSGSVSAYGPGLVYGVANKTATFTIVTEDAGEGGLDLAIEGPSKAEISCIDNKDGTCTVTYLPTLPGDYSILVKYNDKHIPGSPFTAKITDDSRRCSQVKLGSAADFLLDISETDLSSLTASIKAPSGRDEPCLLKRLPNNHIGISFIPREVGEHLVSIKKNGNHVANSPVSIMVVQSEIGDARRAKVYGRGLSEGRTFEMSDFIVDTRDAGYGGISLAVEGPSKVDIQTEDLEDGTCKVSYFPTVPGVYIVSTKFADEHVPGSPFTVKISGEGRVKESITRTSRAPSVATVGSICDLNLKIPEINSSDMSAHVTSPSGRVTEAEIVPMGKNSHCVRFVPQEMGVHTVSVKYRGQHVTGSPFQFTVGPLGEGGAHKVRAGGPGLERGEAGVPAEFSIWTREAGAGGLSIAVEGPSKAEITFDDHKNGSCGVSYIAQEPGNYEVSIKFNDEHIPESPYLVPVIAPSDDARRLTVMSLQESGLKVNQPASFAIRLNGAKGKIDAKVHSPSGAVEECHVSELEPDKYAVRFIPHENGVHTIDVKFNGSHVVGSPFKVRVGEPGQAGNPALVSAYGTGLEGGTTGIQSEFFINTTRAGPGTLSVTIEGPSKVKMDCQETPEGYKVMYTPMAPGNYLISVKYGGPNHIVGSPFKAKVTGNEQPPSELLSLPGELVVSDQS

SEQ ID NO: 9444 - DNA, 873 bp, Homo sapiens
ctgccagtctacctgtggactttgcaattgatgcccgagatgccggggaaggcctgcttgtgttgtaaaatgccttcagaaataagtcctagactggactcttgagggacatattggagaatcttaagaaatgcaagcttgttcagggggctgagaagatcctgagtacactaggtgcaaaccagaactcttggtggaacagaccagccactgcagcagacagaccaggaacacaatgagactgacatttcaaaaaaacaaaactggctagcctgagctgctggttcagccctcatcccaaggtccgtcccatgacataacactccacacccgccccagccaacttcatgggtcactttttctggaaaataatgatctgtacagacaggacagaatgaaactcctgcgggtctttggcctgaaagttgggaatggttgggggagagaagggcagcagcttattggtggtcttttcaccattggcagaaacagtgagagctgtgtggtgcagaaatccagaaatgaggtgtagggaattttgcctgccttcctgcagacctgagctggctttggaatgaggttaaagtgtcagggacgttgcctgagcccaaatgtgtagtgtggtctgggcaggcagacctttaggttttgctgcttagtcctgaggaagtggccactcttgtggcaggtgtagtatctggggcgagtgttgggggtaaaagcccaccctacagaaagtggaacagcccggagcctgatgtgaaaggaccacgggtgttgtaagctgggacacggaagccaaactggaatcaaacgccgactgtaaattgtatcttataacttattaaataaaacatttgctccgtaaagttg

SEQ ID NO: 9445 - protein, 48 aa, Homo sapiens
MVGGEKGSSLLVVFSPLAETVRAVWCRNPEMRCREFCLPSCRPELALE

SEQ ID NO: 9446 - DNA, 528 bp, Homo sapiens
ttcgtggagcacggatggtgacgcaaaggagaaaaacactcttaaatgaacaatgtcaaaagttgacaagtgtttacatttacatacttgagacataaaagagcctccagatctctggcatgctgtttacagataaacagacgtcgatggaagggaataatactacaacagagtatagactgttcggaagaaagtccctgagctttggagtttggaatggagtcttcatgcacctctccattgctgcacaaaatgaaataattagaaggtgctttgtcggctgtgcacaaggccaggtcattaagggcctataaaccttgtggtcaagtgcggctgctgaccacagtatcaaaggacaccagtgaggatgacagcatggtatttggtgtctgtctagaccaagcatgcttcatttgtaaaaaagccaacgatgcttggttttgagggttcaatgaggtaatgtccccaaggtttctaacccttttcctggttgaagaatattcagaagaagatctattatgtaataat

SEQ ID NO: 9447 - protein, 64 aa, Homo sapiens
MLFTDKQTSMEGNNTTTEYRLFGRKSLSFGVWNGVFMHLSIAAQNEIIRRCFVGCAQGQVIKGL

SEQ ID NO: 9448 - DNA, 2058 bp, Homo sapiens
tgtggaaatgaagcatctctttctgttttctctttgagatggtttgagttagattgtgtctcttccaagcttgccacaccccagtgcctccagtcatctgctttcttgaaggatggccacgctggtgaattctagacaaattctaacccggggagagggctggagaatttctggtcctggttgggagatactccctgttaaaccttcggatatgctgacctagctgaggtagccaggggctatttaaaaattcaaaatctcagatctggctgtggataaacccccaaggtggtacgtgcagtacttggaggcgtgagggcagaaggtcctccccagcagtttgtacgggacacatcatctatgggatattagtaaatatccttaaggaaaggcttctgtggtcaaaaccaggttcagcaggttatttcactatggggcttctcaggacgcttaacctactcatccccctctgggctttgcaaacgaggccgccattgctttctttctgctatgtagaaatagattgaggcgtaagggtcggatgtcctttctccattcatcaggctccctcttcctgaggagctgctgtcagaacagcctggggctgctgtgttgcaggttatggtggcatatccttggcggtggaaggccccagcaaagtggacatccagacggaggacctggaagatggcacctgcaaagtctcctacttccctaccgtgcctggggtttatatcgtctccaccaaattcgctgacgagcacgtgcctgggagcccatttaccgtgaagatcagtggggagggaagagtcaaagagagcatcacccgcaccagtcgggccccgtccgtggccactgtcgggagcatttgtgacctgaacctgaaaatcccaggtgggcgtcggggactagtagggtggggaagccttggctccagccttcagggcagtgggtgcctttgggaaccaagtttaggcatggcccagaacacagtatccaagtcggctgtgctgaccttttcatttcacttcatttcattatgttcttctatgtttattttcacagagtctcatccaagaaaaacaaatgtttaccttgctacctttttcctcttccaaataaaaatagctttattgtgtcacatgggggaaacgtagatatgcttttagatttttagattaactatctgtcaaatagaatcatgtcagtgaaagaactggccctgccgatgccagggtctggaagtatttaagaggtggcagcccagcggcatccttctagtatttctctttcattcctgaaattagaacgagggctgtgctgcagaactcgctgggccacatctagccctttggtggtgaattgttcttcttgggccccgattagccagtcaacaggtcacacagtctgtctgaaatgtgttccaagttctttctataaagaatccttccagagggaagccactgtgagtgaaaattttgaggctcctctgcccagaagttggcatgtcctgtggaattgcacaaattctacagagaagggaaatctaaatcgtcttcagatggagcttgtgttgcgagctctggagagggggttgtctttctacactgcatctcccatccttcctaacgagtcacggagctgtcgactccgccttcttggctttagttaacaggttcttcttgtgtagtcacatcaacgtcgggtcacatgggaatgtggtaaagcctcattactgtagagttcagacatgatcacttaaaaagagctttattgggccgggcgcggtggcttactcctataatcccagcactttggggggccgaggcaggcagatcacctgaggtcaggagttcgagaccagcctggctaacatggcaaaaccctatctcttctaaaaatacaaaaataagcagggcgtggtggcgggcacctgtaatcccacctactcaggaggctgaggcacaagaattgcgtaaacctgggaggtggaggttgcagtgagctgaaattgcaccgctgcactccagcctgggcaacaaagtgagactccttctc

SEQ ID NO: 9449 - protein, 55 aa, Homo sapiens
MVAYPWRWKAPAKWTSRRRTWKMAPAKSPTSLPCLGFISSPPNSLTSTCLGAHLP

SEQ ID NO: 9450 - DNA, 4316 bp, Homo sapiens
gccaaatacattaacacggacactggaagagattaagcggattttaagtcatctcctttgccaaatgacaaccaaactaggtgtcccctttttctctgcccatcttcccctagccttgtttcataaatgctgaagagtgaaccagcagctcaggctagccagttttgtttttttgaaatgtcagtctcattgtgttcctggtctgtctgctgcagtggctggtctgttccaccaagagttctggtttgcacctagtgtactcaggatcttctcagccccctgaacaagcttgcatttcttaagattctccaatatgtccctcaagagtccagtctaggacttatttctgaaggcattttacaacagcaatattttagggatggggtttcagccccacaaacaggctggagggctttgtataaaatgaattacaaacaagcaacaaaagcaaccacaagaactctctccaggatttgagaaaactgttttaaggcactgtgacatgaaaagggctgccagggatgtgttcctccccccacttcacagccagcacataatcgcccctctccttgacgacgtatgtgacgttgtattgctggttgcctacatgcttcatggagacctcctcgcagggggtggtgggcccatggaccccgatcagcagcatgttggagcctaggaggcaaaaggtggttactccacccggatgcatcaggacaggcacaggaagaagaggaaatatgagagccaaaggaaaggaagcagaggcacagtgaagtcagataattcatctggagtcacacagctggggaccagcagaactgggatttaaacataaagtctgtccaacttggagctaaagcacttacctgagagaagatggaaggaaaaaaatccacaagcagaagtctctcaccactgcctctagctataacctgtatctgacaccacaaaacatctctgggcgtggcggtcttcccccaccccctcaaatatgtccagctcagttcctgtgagtttaatgcatgttaaacgcagcactgcttgttcttcaaggcagttaaggaaggaggcccttctggtataccccgagcacactggggttcctggaccatttcattaggaaaattgctcagcggctccaaagaatctggagctccctggtctatctcccagcctctcaagccgcctccagcagggtcccgccccaaattctccacattcccctactccaaaatctacagaatggaccatttaaagcttgagccaagagatacagcaaactcacccattaaaaacagagggaggtttgctttgttcagaaggtcaggatactgggcgctctggcggccaagcacagataccttttcattccatgcacactgcagctgtgtaatctcagaatggatatttagggaaaggcttgggagcaggagggctggaaaaacaaggcgccttccctgtgacaagagcaatatttacacagggtttgaagcaggcggttctgtacctctcccctcctggctaggagcttccctgcaagagcaactccttctctcagcagcgtccagcacttgcagagcacagcctgaaacccaagctcccaaaaaggtgtgcgaacagccaaaaggaaatgggagagggcccaggcacagcggcatgagccagcaggagggtgagatgcttcctggccagtgtgggagaccccagcagctgctgtgaggcctggcctgaagcctgccacgcgctccaagtgccgagaggaccccacctgggccctcaaaggtgagtaccttgtcagggcccaagtgccagcactgctgcctggaaagtactcctgagtggctgggaggacaggggtcctggtttaggacatccccaaagtgggctggggatgcagtcactgcctctgggtgagccagccacttagagagggggccaagctcgggggttcagcgcataggctctgaggtcacggatgtagactgattcctggttctgcctcctcccagctgactgctttttgggggagtgttgtttggggagtgactcaacctctgcatctcactttccacatctgtaaaatggacatcacttacggtaaaatgataccatgcctttcacaaaaggcaagccgcaggcccagagttcagcgtggagccgggctggatttgcctggggagtctggcagcactcacaccacccctgtgggtggctttgctgaggccactgctttggccagagtcccgggcagcctgccagcccaccagtcactcctgcacccggagagggccccttggccacacaggtcacttgctcctagggctggatgccaggcaaccatgcagccactcacccctcacccctgggaggcaagtctgctccatcccactctccttatgcggggtgggggtacacacacaagagactcaagaaaccaggacatactgctttcccaagagggtccaaagtaacaccaaatgcaaacatgccccagtgagtccacactgcgcacttcccctgcaaagactaaggactgactctccaccctggcagcctccataacagtgacgcactcactgcgcaccacccgatgccacctgttcaaataactgcgattcacagcaggaattctcactacagccaggaaaaggaggggaagatctgttctgacatggaaagatctttaagatgtcaaagcaaaaacacaagctataccacacagtggatacagtaagattctttctgtaagacaaaagcaaaactctgtgtctgcttgtctaatgaaccaattagctaaccaacccagcaaccaagaatgaagacagacaatgagatgacagacagggtgaaggtcctcccttcccagagccgtttgcttccagacccaggtgggggaggaggagagaagatggagtgagtctcactttatttacttcttcactgcctgtatctttcataatcaaacatgtcccatctgtggcaaagaataaaagtaaattgtaacgggtctaaaaagcttcagaattctttgaacatttcagtcttttctcctcctccattaagatctgagagtaaaaagaggaggagataggctgggacaggtcttattgctgcttcagtgcatttctgggagcctggtaccatgaaagaacagacgggtaggagcccacttggacgcatcatgaattctgtgcaggcaaagaaaccctcaaaattaatgacactgtgctgtgttccctgactatcagcatcctgttctgaaagtcaagaaacttggcagaggaaggaatctgaatcacaactaacagtaatgaggtgtgataacacggccatcgagctctcactctggatttatcgtgggtcaaaccgcaactcccaaaacagctttggacagcaagcgcctccgaagtgtgcatgaccccagtttccacggggagtacgtgtaaaaagctttcatggggcttgaggatttccatctggcttggtccctggagctggttcagttaaggcttcaagaagcagaagagtgggttacctgtggtgcccccttcgagtcccgtgccataggcggacaccagggcagggttccccgcttgtccaggctccccaacgcgcactttgaaggggcttccaaccacgtggctcccattgaacttgacatcgatggtgtggacaccattctcatgagggatgaagcgaacagcatacttatctaggagaatgagcaaaggcacagggtgaaatcaagcaaatggacacccctgagttcagtgaggataaaggatggaggccaagctgagatggcccatttaaaatcaacagttctacagggagcctggcactcagcatcctggatttcagaaccagacagaccccctgggtatccctcatcagccccaagggaaacgcatccacattgcaaatcctataaacacaggacaagactctgacccctgcctcagaagaacacttcctttctttagaaaacctcacttcttcagtgtgaaattctgtgaatgctgttactaatcctgtcacgagatgaatctcatttcaccaaaattaaattatgtttttccactaaaatgatgatacaagttgaagacacagcactctgaaattggaagacctcaccacttaaggctccgcagcggcttactcagctgaactccaggttactactctttactttgttcacccattggggagttcagtttgtttttaaacattgggagatggccattctaactactgttcaatgtctctgttttgggaaggcataacaagaaataaaaaggaatatatatgaaggg

SEQ ID NO: 9451 - protein, 53 aa, Homo sapiens
METSSQGVVGPWTPISSMLEPRRQKVVTPPGCIRTGTGRRGNMRAKGKEAEAQ

SEQ ID NO: 9452 - DNA, 2462 bp, Homo sapiens
gggagagctggactctggtggctgaagcagcacttcaggctcacagtgtgactcaggcttcttgccctcagccacaatggctcatgcccagaggagagaacagggtgtccaggctgttggtgcttgtgggcgaaatgtcagccatgctcctcctgccttggcctagaaaagggagcccccaccccgcagggcctgaggttctctctgccagaagttcagagctagtgccagtgggttcccatgccaccagggtgagccctctgtaaggggatctatgtgtgtccctcaccacggcctcagtgctcccaggaaagccctccaagtcatcaacacagcattttctattcctttctcccaggtatccagtcggaattctttattaacaccacccgagcaggtccagggacattatccgtcaccatcgaaggcccatccaaggttaaaatggattgccaggaaacacctgaagggtacaaagtcatgtacacccccatggctcctggtaactacctgatcagcgtcaaatacggtgggcccaaccacatcgtgggcagtcccttcaaggccaaggtgacaggccagcgtctagttagccctggctcagccaacgagacctcatccatcctggtggagtcagtgaccaggtcgtctacagagacctgctatagcgccattcccaaggcatcctcggacgccagcaaggtgacctctaagggggcagggctctcaaaggcctttgtgggccagaagagttccttcctggtggactgcagcaaagctggctccaacatgctgctgatcggggtccatgggcccaccaccccctgcgaggaggtctccatgaagcatgtaggcaaccagcaatacaacgtcacatacgtcgtcaaggagaggggcgattatgtgctggctgtgaagtggggggaggaacacatccctggcagcccttttcatgtcacagtgccttaaaacagttttctcaaatcctggagagagttcttgtggttgcttttgttgcttgtttgtaattcattttatacaaagccctccagcctgtttgtggggctgaaaccccatccctaaaatattgctgttgtaaaatgccttcagaaataagtcctagactggactcttgagggacatattggagaatcttaagaaatgcaagcttgttcagggggctgagaagatcctgagtacactaggtgcaaaccagaactcttggtggaacagaccagccactgcagcagacagaccaggaacacaatgagactgacatttcaaaaaaacaaaactggctagcctgagctgctggttcactcttcagcatttatgaaacaaggctaggggaagatgggcagagaaaaaggggacacctagtttggttgtcatttggcaaaggagatgacttaaaatccgcttaatctcttccagtgtccgtgttaatgtatttggctattagatcactagcactgctttaccgctcctcatcgccaacacccccatgctctgtggccttcttacacttctcagagggcagagtggcagccgggcaccctacagaaactcagagggcagagtggcagccaggcccacatgtctctcaagtacctgtcccctcgctctggtgattatttcttgcagaatcaccacacgagaccatcccggcagtcatggttttgctttagttttccaagtccgtttcagtcccttccttggtctgaagaaattctgcagtggcgagcagtttcccacttgccaaagatcccttttaaccaacactagcccttgtttttaacacacgctccagcccttcatcagcctgggcagtcttaccaaaatgtttaaagtgatctcagaggggcccatggattaacgccctcatcccaaggtccgtcccatgacataacactccacacccgccccagccaacttcatgggtcactttttctggaaaataatgatctgtacagacaggacagaatgaaactcctgcgggtctttggcctgaaagttgggaatggttgggggagagaagggcagcagcttattggtggtcttttcaccattggcagaaacagtgagagctgtgtggtgcagaaatccagaaatgaggtgtagggaattttgcctgccttcctgcagacctgagctggctttggaatgaggttaaagtgtcagggacgttgcctgagcccaaatgtgtagtgtggtctgggcaggcagacctttaggttttgctgcttagtcctgaggaagtggccactcttgtggcaggtgtagtatctggggcgagtgttgggggtaaaagcccaccctacagaaagtggaacagcccggagcctgatgtgaaaggaccacgggtgttgtaagctgggacacggaagccaaactggaatcaaacgccgactgtaaattgtatcttataacttattaaataaaacatttgctccgtaaagttg

SEQ ID NO: 9453 - protein, 174 aa, Homo sapiens
MDCQETPEGYKVMYTPMAPGNYLISVKYGGPNHIVGSPFKAKVTGQRLVSPGSANETSSILVESVTRSSTETCYSAIPKASSDASKVTSKGAGLSKAFVGQKSSFLVDCSKAGSNMLLIGVHGPTTPCEEVSMKHVGNQQYNVTYVVKERGDYVLAVKWGEEHIPGSPFHVTVP

SEQ ID NO: 9454 - DNA, 415 bp, Homo sapiens
aggccagcgtctagttagccctggctcagccaacgagacctcatccatcctggtggagtcagtgaccaggtcgtctacagagacctgctatagcgccattcccaaggcatcctcggacgccagcaaggtgacctctaagggggcagggctctcaaaggcctttgtgggccagaagagttccttcctggtggactgcagcaaagctggctccaacatgctgctgatcggggtccatgggcccaccaccccctgcgaggaggtctccatgaagcatgtaggcaaccagcaatacaacgtcacatacgtcgtcaaggagaggggcgattatgtgctggctgtgaagtggggggaggaacacatccctggcagcccttttcatgtcacagtgccttaaaacagttttctcaaatcctgg

SEQ ID NO: 9455 - protein, 59 aa, Homo sapiens
MLLIGVHGPTTPCEEVSMKHVGNQQYNVTYVVKERGDYVLAVKWGEEHIPGSPFHVTVP

SEQ ID NO: 9456 - DNA, 1344 bp, Homo sapiens
atgaagcatgtaggcaaccagcaatacaacgtcacatacgtcgtcaaggagaggggcgattatgtgctggctgtgaagtggggggaggaacacatccctggcagcccttttcatgtcacagtgccttaaaacagttttctcaaatcctggagagagttcttgtggttgcttttgttgcttgtttgtaattcattttatacaaagccctccagcctgtttgtggggctgaaaccccatccctaaaatattgctgttgtaaaatgccttcagaaataagtcctagactggactcttgagggacatattggagaatcttaagaaatgcaagcttgttcagggggctgagaagatcctgagtacactaggtgcaaaccagaactcttggtggaacagaccagccactgcagcagacagaccaggaacacaatgagactgacatttcaaaaaaacaaaactggctagcctgagctgctggttcactcttcagcatttatgaaacaaggctaggggaagatgggcagagaaaaaggggacacctagtttggttgtcatttggcaaaggagatgacttaaaatccgcttaatctcttccagtgtccgtgttaatgtatttggctattagatcactagcactgctttaccgctcctcatcgccaacacccccatgctctgtggccttcttacacttctcagagggcagagtggcagccgggcaccctacagaaactcagagggcagagtggcagccaggcccacatgtctctcaagtacctgtcccctcgctctggtgattatttcttgcagaatcaccacacgagaccatcccggcagtcatggttttgctttagttttccaagtccgtttcagtcccttccttggtctgaagaaattctgcagtggcgagcagtttcccacttgccaaagatcccttttaaccaacactagcccttgtttttaacacacgctccagcccttcatcagcctgggcagtcttaccaaaatgtttaaagtgatctcagaggggcccatggattaacgccctcatcccaaggtccgtcccatgacataacactccacacccgccccagccaacttcatgggtcactttttctggaaaataatgatctgtacagacaggacagaagtggccactcttgtggcaggtgtagtatctggggcgagtgttgggggtaaaagcccaccctacagaaagtggaacagcccggagcctgatgtgaaaggaccacgggtgttgtaagctgggacacggaagccaaactggaatcaaacgccgactgtaaattgtatcttataacttattaaataaaacatttgctccgtaaa

SEQ ID NO: 9457 - protein, 53 aa, Homo sapiens
MGHFFWKIMICTDRTEVATLVAGVVSGASVGGKSPPYRKWNSPEPDVKGPRVL

SEQ ID NO: 9458 - DNA, 778 bp, Homo sapiens
cttgtggttgcttttgttgcttgtttgtaattcattttatacaaagccctccagcctgtttgtggggctgaaaccccatccctaaaatattgctgttgtaaaatgccttcagaaataagtcctagactggactcttgagggacatattggagaatcttaagaaatgcaagcttgttcagggggctgagaagatcctgagtacactaggtgcaaaccagaactcttggtggaacagaccagccactgcagcagacagaccaggaacacaatgagactgacatttcaaaaaaacaaaactggctagcctgagctgctggttcactcttcagcatttatgaaacaaggctaggggaagatgggcagagaaaaaggggacacctagtttggttgtcatttggcaaaggagatgacttaaaaaatccagaaatgaggtgtagggaattttgcctgccttcctgcagacctgagctggctttggaatgaggttaaagtgtcagggacgttgcctgagcccaaatgtgtagtgtggtctgggcaggcagacctttaggttttgctgcttagtcctgaggaagtggccactcttgtggcaggtgtagtatctggggcgagtgttgggggtaaaagcccaccctacagaaagtggaacagcccggagcctgatgtgaaaggaccacgggtgttgtaagctgggacacggaagccaaactggaatcaaacgccgactgtaaattgtatcttataacttattaaataaaacatttgctccgtaaagttg

SEQ ID NO: 9459 - protein, 48 aa, Homo sapiens
TGLLRDILENLKKCKLVQGAEKILSTLGANQNSWWNRPATAADRPGTQ

SEQ ID NO: 9460 - DNA, 1296 bp, Homo sapiens
agatgtcagagctggctcccggttgggatatgagtgactttgtggaggatggcgcctaaatgaggcatgccaatttctgcaccagggtgacgaacataagggctccttaaaggctagcccaatgtatctgtatttccttggggattaaaacccatgatcttcagttcctcagagaactgaaagttgcaaggagaaatccagtaattcctgttatctgcaggctttataagtcagtggagcctgcggaagtggccagaatccagcactccaagcactgctgtcttctcacagagtcttgaagccagagcagcgccaggatgtcacgggagctggccccactgctgcttctcctcctctccatccacagcgccctggccatgaggatctgctccttcaacgtcaggtcctttggggaaagcaagcaggaagacaagaatgccatggatgtcattgtgaaggtcatcaaacgctgtgacatcatactcgtgatggaaatcaaggacagcaacaacaggatctgccccatactgatggagaagctgaacagaaattcaaggagaggcataacgtacaactatgtgattagctctcggcttggaagaaacacatataaagaacaatatgcctttctctacaaggaaaagctggtgtctgtgaagaggagttatcactaccatgactatcaggatggagacgcagatgtgttttccagggagccctttgtggtctggttccaatctccccacactgctgtcaaagacttcgtgattatccccctgcacaccaccccagagacatccgttaaggagatcgatgagttggttgaggtctacacggacgtgaaacaccgctggaaggcggagaatttcattttcatgggtgacttcaatgccggctgcagctacgtccccaagaaggcctggaagaacatccgcttgaggactgaccccaggtttgtttggctgatcggggaccaagaggacaccacggtgaagaagagcaccaactgtgcatatgacaggattgtgcttagaggacaagaaatcgtcagttctgttgttcccaagtcaaacagtgtttttgacttccagaaagcttacaagctgactgaagaggaggccctggatgtcagcgaccactttccagttgaatttaaactacagtcttcaagggccttcaccaacagcaaaaaatctgtcactctaaggaagaaaacaaagagcaaacgctcctagacccaagggtctcatcttattaaccatttcttgcctctaaataaaatgtctctaacagata

SEQ ID NO: 9461 - protein, 305 aa, Homo sapiens; identical to SEQ ID NO: 800

SEQ ID NO: 9462 - DNA, 702 bp, Homo sapiens
agagcagcgccaggatgtcacgggagctggccccactgctgcttctcctcctctccatccacagcgccctggccatgaggatctgctccttcaacgtcaggtcctttggggaaagcaagcaggaagacaagaatgccatggatgtcattgtgaaggtcatcaaacgctgtgacatcatactcgtgatggaaatcaaggacagcaacaacaggatctgccccatactgatggagaagctgaacaggtaacatggggaagggtgggccctctagggctcaaggtcaagtgcaagggcatctgaaaacccctgggaactgaaagtaatgtgagatcccgcacttgaccaccagttcacacagccagtgttgcccaggagtccagctcccttagccacggtcctgagaactttcaaccagttgattttactgtgataaaatagaataggggaaatagatgaggggtctggacacagaaagaaatgaaaaaagcagatgaggctgagctaaaaagtacagttatgaagaaaatgttggagaaaagagaaaagattagaaaccaatagtagaagaaagataataaaattacaacatgctcacacacaggaatattatgcagctgttaaaagtcatgctggtggccaggtgtggtggcacgtgcctatagtctcacctacctgggaggctgaggtgggaggatcgcttg

SEQ ID NO: 9463 - protein, 77 aa, Homo sapiens
MSRELAPLLLLLLSIHSALAMRICSFNVRSFGESKQEDKNAMDVIVKVIKRCDIILVMEIKDSNNRICPILMEKLNR

SEQ ID NO: 9464 - DNA, 2430 bp, Homo sapiens
ggctttcgggtgctaggagacagttgccggcgttgggttgtgcgagacgctaactgtaccctccgggtttaacgctgtgaggcagcgcgcggaggaactggggataagcgccccggagcccccaaacagagcgcggccgctgggggacagcgcgcggcgccgggtcggggcggggcggcttttctgtcggaggacgcgaaccggcacgctgcgcctttaaggagtccagctgggctgggcgccggagctgggagcggcgcgggtaggagcccggcggcaggtcccagcccggggctagagaccgagggccggggtccgggcccggcggcgggacccaggcggttgaggctggtcagaatctcattttcagcttctgccagagccagtagcagttgggaaagaaggctgtgctctttgaagagagtcagccagcctgaaagagcaggatggatcttgatgtggttaacatgtttgtgattgcgggcggcacgctggccatcccaatcctggcatttgtggcttcatttcttctgtggccttcagcactgataagaatctattattggtactggcggaggacattgggcatgcaagtccgctatgttcaccatgaagactatcagttctgttattccttccggggcaggcctgggcacaaaccctccatcctcatgctccacggattctctgcccacaaggatatgtggctcagtgtggtcaagttccttccaaagaacctgcacttggtctgcgtggacatgccaggacatgagggcaccacccgctcctccctggatgacctgtccatagatgggcaagttaagaggatacaccagtttgtagaatgcctgaagctgaacaaaaaacctttccacctggtaggcacctccatgggtggccaggtggctggggtgtatgctgcttactacccatcggatgtctccagcctgtgtctcgtgtgtcctgctggcctgcagtactcaactgacaatcaatttgtacaacggctcaaagaactgcagggctctgccgccgtggagaagattcccttgatcccgtctaccccagaagagatgagtgaaatgcttcagctctgctcctatgtccgcttcaaggtgccccagcagatcctgcaaggccttgtcgatgtccgcatccctcataacaacttctaccgaaagttgtttttggaaatcgtcagtgagaagtccagatactctctccatcagaacatggacaagatcaaggttccgacgcagatcatctgggggaaacaagaccaggtgctggatgtgtctggggcagacatgttggccaagtcaattgccaactgccaggtggagcttctggaaaactgtgggcactcagtagtgatggaaagacccaggaagacagccaagctcataatcgactttttagcttctgtgcacaacacagacaacaacaagaagctggactgaggccccgactgcagcctgcattctgcacacagcatctgctcccatcccccaagtctgacgcagccaccactctcagggatcctgccccaaatgcggtcggagcgccagtgaccctgaggaagcccgtcccttatccctggtatccacggttccccagagctttggggaccacgcgaaaacctccaagatatttttcacaaaatagaaactcatatggaacaaaataagaaaccccagccatgaaatctaccatgaagtcttcaagttcatgtcactgagaagcttgtgcaaagcagccaccttggaccataattaaatcaaggacattttctttgagacattccttatagttggagactcaagatatttttgttgcatcaggtgtattcccttgcatgggcagtggcttttataggagcattagtcctcattcgctgaaccctgttgtttaggtctaatttaagttttacatagagacccatgtatgactgcagcccattggctgcaagaccagggaggaaagtggcaagctgtagaaaatgtttacacgcatggaggggcattgctctagccctcagagcgtccggagcagcagggtacatgggtgggaggttcattcagcacccaccagtcaggtatgttctgagtgaacccacagcagtcgcagaatgagcacctggcagggtgggtttcctaggaataatttattatttttaaaaataggcctaataaagcaataatgttctagacatctgtctaagtaatcagactcaggttccacacacaagcaacaactcgtgggcctcttttctatttcaatgtgctactaagaacccttggatgtaacatactagttagttaatgaattctgtgaattctgtgaagagtaatgtgattgaaaataagtctaaacagctgtaaaagtgaccacaatgacatgaaataaatttaataagtctagatcagcaac

SEQ ID NO: 9465 - protein, 337 aa, Homo sapiens
MDLDVVNMFVIAGGTLAIPILAFVASFLLWPSALIRIYYWYWRRTLGMQVRYVHHEDYQFCYSFRGRPGHKPSILMLHGFSAHKDMWLSVVKFLPKNLHLVCVDMPGHEGTTRSSLDDLSIDGQVKRIHQFVECLKLNKKPFHLVGTSMGGQVAGVYAAYYPSDVSSLCLVCPAGLQYSTDNQFVQRLKELQGSAAVEKIPLIPSTPEEMSEMLQLCSYVRFKVPQQILQGLVDVRIPHNNFYRKLFLEIVSEKSRYSLHQNMDKIKVPTQIIWGKQDQVLDVSGADMLAKSIANCQVELLENCGHSVVMERPRKTAKLIIDFLASVHNTDNNKKLD

SEQ ID NO: 9466 - DNA, 3099 bp, Homo sapiens
ggctttcgggtgctaggagacagttgccggcgttgggttgtgcgagacgctaactgtaccctccgggtttaacgctgtgaggcagcgcgcggaggaactggggataagcgccccggagcccccaaacagagcgcggccgctgggggacagcgcgcggcgccgggtcggggcggggcggcttttctgtcggaggacgcgaaccggcacgctgcgcctttaaggagtccagctgggctgggcgccggagctgggagcggcgcgggtaggagcccggcggcaggtcccagcccggggctagagaccgagggccggggtccgggcccggcggcgggacccaggcggttgaggctggtcagaatctcattttcagcttctgccagagccagtagcagttgggaaagaaggctgtgctctttgaagagagtcagccagcctgaaagagcaggatggatcttgatgtggttaacatgtttgtgattgcgggcggcacgctggccatcccaatcctggcatttgtggcttcatttcttctgtggccttcagcactgataagaatctattattggtactggcggaggacattgggcatgcaagtccgctatgttcaccatgaagactatcagttctgttattccttccggggcaggcctgggcacaaaccctccatcctcatgctccacggattctctgcccacaaggatatgtggctcagtgtggtcaagttccttccaaagaacctgcacttggtctgcgtggacatgccaggacatgagggcaccacccgctcctccctggatgacctgtccatagatgggcaagttaagaggatacaccagtttgtagaatgcctgaagctgaacaaaaaacctttccacctggtaggcacctccatgggtggccaggtggctggggtgtatgctgcttactacccatcggatgtctccagcctgtgtctcgtgtgtcctgctggcctgcagtactcaactgacaatcaatttgtacaacggctcaaagaactgcagggctctgccgccgtggagaagattcccttgatcccgtctaccccagaagagatgagtgaaatgcttcagctctgctcctatgtccgcttcaaggtgccccagcagatcctgcaaggccttgtcgatgtccgcatccctcataacaacttctaccgaaagttgtttttggaaatcgtcagtgagaagtccagatactctctccatcagaacatggacaagatcaaggttccgacgcagatcatctgggggaaacaagaccaggtgctggatgtgtctggggcagacatgttggccaagtcaattgccaactgccaggtggagcttctggaaaactgtgggcactcagtagtgatggaaagacccaggaagacagccaagctcataatcgactttttagcttctgtgcacaacacagacaacaacaagaagctggactgaggccccgactgcagcctgcattctgcacacagcatctgctcccatcccccaagtctgacgcagccaccactctcagggatcctgccccaaatgcggtcggagcgccagtgaccctgaggaagcccgtcccttatccctggtatccacggttccccagagctttggggaccacgcgaaaacctccaagatatttttcacaaaatagaaactcatatggaacaaaataagaaaccccagccatgaaatctaccatgaagtcttcaagttcatgtcactgagaagcttgtgcaaagcagccaccttggaccataattaaatcaaggacattttctttgagacattccttatagttggagactcaagatatttttgttgcatcaggtgtattcccttgcatgggcagtggcttttataggagcattagtcctcattcgctgaaccctgttgtttaggtctaatttaagttttacatagagacccatgtatgactgcagcccattggctgcaagaccagggaggaaagtggcaagctgtagaaaatgtttacacgcatggaggggcattgctctagccctcagagcgtccggagcagcagggtacatgggtgggaggttcattcagcacccaccagtcaggtatgttctgagtgaacccacagcagtcgcagaatgagcacctggcagggtgggtttcctaggaataatttattatttttaaaaataggcctaataaagcaataatgttctagacatctgtctaagtaatcagactcaggttccacacacaagcaacaactcgtgggcctcttttctatttcaatgtgctactaagaacccttggatgtaacatactagttagttaatgaattctgtgaattctgtgaagagtaatgtgattgaaaataagtctaaacagctgtaaaagtgaccacaatgacatgaaataaatttaataagtctagatcagcaacatgcaggtggtttctatttctgaactcctaattaggtgcaatgttggcagattttctgttaactttaaaatgtgttttttaaaataaggcttgtttaacaggctttggaagtctttgcatggatgatttattaggtttaaggaatcatgtttgcaatttttatccagttgaaattgtatatcaaaggccaggtgcagtggctcatgcctgtaatcccagcacttgagaaggccgaggtgggtcgattgcttgaggccaggagttcaagaccaacctggccaacatggcaaaatcttatctctactaaaaatgcaaaaattatctgggcgtggtgggacacacctgtaatcccagctacctgggagcctgaggcatgagaatcgcttgaacccgggaggcggaggttacagtgagccgagattgtgccattgcactccagcctgggcaataagcgcaaaaatccatctcaaaataatataataataattcactggaaattgtatatcaaaaaaggcaagagtcatcaaaatattctttttgactctttctgtaggatttaggagccctaaactccccaggagcttcactctttccaattttttttttacagaaaatctacagccaagtcattctgggaataaagtgagataaactttacagtttaaatct

SEQ ID NO: 9467 - protein, 337 aa, Homo sapiens; identical to SEQ ID NO: 9465

SEQ ID NO: 9468 - DNA, 2224 bp, Homo sapiens
gccgggtcggggcggggcggcttttctgtcggaggacgcgaaccggcacgctgcgcctttaaggagtccagctgggctgggcgccggagctgggagcggcgcgggtaggagcccggcggcaggtcccagcccggggctagagaccgagggccggggtccgggcccggcggcgggacccaggcggttgaggctggtcagaatctcattttcagcaggagtcagccagcctgaaagagcaggatggatcttgatgtggttaacatgtttgtgattgcgggcggcacgctggccatcccaatcctggcatttgtggcttcatttcttctgtggccttcagcactgataagaatctattattggtactggcggaggacattgggcatgcaagtccgctatgttcaccatgaagactatcagttctgttattccttccggggcaggcctgggcacaaaccctccatcctcatgctccacggattctctgcccacaaggatatgtggctcagtgtggtcaagttccttccaaagaacctgcacttggtctgcgtggacatgccaggacatgagggcaccacccgctcctccctggatgacctgtccatagatgggcaagttaagaggatacaccagtttgtagaatgcctgaagctgaacaaaaaacctttccacctggtaggcacctccatgggtggccaggtggctggggtgtatgctgcttactacccatcggatgtctccagcctgtgtctcgtgtgtcctgctggcctgcagtactcaactgacaatcaatttgtacaacggctcaaagaactgcagggctctgccgccgtggagaagattcccttgatcccgtctaccccagaagagatgagtgaaatgcttcagctctgctcctatgtccgcttcaaggtgccccagcagatcctgcaaggccttgtcgatgtccgcatccctcataacaacttctaccgaaagttgtttttggaaatcgtcagtgagaagtccagatactctctccatcagaacatggacaagatcaaggttccgacgcagatcatctgggggaaacaagaccaggtgctggatgtgtctggggcagacatgttggccaagtcaattgccaactgccaggtggagcttctggaaaactgtgggcactcagtagtgatggaaagacccaggaagacagccaagctcataatcgactttttagcttctgtgcacaacacagacaacaacaagaagctggactgaggccccgactgcagcctgcattctgcacacagcatctgctcccatcccccaagtctgacgcagccaccactctcagggatcctgccccaaatgcggtcggagcgccagtgaccctgaggaagcccgtcccttatccctggtatccacggttccccagagctttggggaccacgcgaaaacctccaagatatttttcacaaaatagaaactcatatggaacaaaataagaaaccccagccatgaaatctaccatgaagtcttcaagttcatgtcactgagaagcttgtgcaaagcagccaccttggaccataattaaatcaaggacattttctttgagacattccttatagttggagactcaagatatttttgttgcatcaggtgtattcccttgcatgggcagtggcttttataggagcattagtcctcattcgctgaaccctgttgtttaggtctaatttaagttttacatagagacccatgtatgactgcagcccattggctgcaagaccagggaggaaagtggcaagctgtagaaaatgtttacacgcatggaggggcattgctctagccctcagagcgtccggagcagcagggtacatgggtgggaggttcattcagcacccaccagtcaggtatgttctgagtgaacccacagcagtcgcagaatgagcacctggcagggtgggtttcctaggaataatttattatttttaaaaataggcctaataaagcaataatgttctagacatctgtctaagtaatcagactcaggttccacacacaagcaacaactcgtgggcctcttttctatttcaatgtgctactaagaacccttggatgtaacatactagttagttaatgaattctgtgaattctgtgaagagtaatgtgattgaaaataagtctaaacagctgtaaaagtgaccacaatgacatgaaataaatttaataagtctagatcagcaac

SEQ ID NO: 9469 - protein, 337 aa, Homo sapiens; identical to SEQ ID NO: 9465

SEQ ID NO: 9470 - DNA, 2893 bp, Homo sapiens
gccgggtcggggcggggcggcttttctgtcggaggacgcgaaccggcacgctgcgcctttaaggagtccagctgggctgggcgccggagctgggagcggcgcgggtaggagcccggcggcaggtcccagcccggggctagagaccgagggccggggtccgggcccggcggcgggacccaggcggttgaggctggtcagaatctcattttcagcaggagtcagccagcctgaaagagcaggatggatcttgatgtggttaacatgtttgtgattgcgggcggcacgctggccatcccaatcctggcatttgtggcttcatttcttctgtggccttcagcactgataagaatctattattggtactggcggaggacattgggcatgcaagtccgctatgttcaccatgaagactatcagttctgttattccttccggggcaggcctgggcacaaaccctccatcctcatgctccacggattctctgcccacaaggatatgtggctcagtgtggtcaagttccttccaaagaacctgcacttggtctgcgtggacatgccaggacatgagggcaccacccgctcctccctggatgacctgtccatagatgggcaagttaagaggatacaccagtttgtagaatgcctgaagctgaacaaaaaacctttccacctggtaggcacctccatgggtggccaggtggctggggtgtatgctgcttactacccatcggatgtctccagcctgtgtctcgtgtgtcctgctggcctgcagtactcaactgacaatcaatttgtacaacggctcaaagaactgcagggctctgccgccgtggagaagattcccttgatcccgtctaccccagaagagatgagtgaaatgcttcagctctgctcctatgtccgcttcaaggtgccccagcagatcctgcaaggccttgtcgatgtccgcatccctcataacaacttctaccgaaagttgtttttggaaatcgtcagtgagaagtccagatactctctccatcagaacatggacaagatcaaggttccgacgcagatcatctgggggaaacaagaccaggtgctggatgtgtctggggcagacatgttggccaagtcaattgccaactgccaggtggagcttctggaaaactgtgggcactcagtagtgatggaaagacccaggaagacagccaagctcataatcgactttttagcttctgtgcacaacacagacaacaacaagaagctggactgaggccccgactgcagcctgcattctgcacacagcatctgctcccatcccccaagtctgacgcagccaccactctcagggatcctgccccaaatgcggtcggagcgccagtgaccctgaggaagcccgtcccttatccctggtatccacggttccccagagctttggggaccacgcgaaaacctccaagatatttttcacaaaatagaaactcatatggaacaaaataagaaaccccagccatgaaatctaccatgaagtcttcaagttcatgtcactgagaagcttgtgcaaagcagccaccttggaccataattaaatcaaggacattttctttgagacattccttatagttggagactcaagatatttttgttgcatcaggtgtattcccttgcatgggcagtggcttttataggagcattagtcctcattcgctgaaccctgttgtttaggtctaatttaagttttacatagagacccatgtatgactgcagcccattggctgcaagaccagggaggaaagtggcaagctgtagaaaatgtttacacgcatggaggggcattgctctagccctcagagcgtccggagcagcagggtacatgggtgggaggttcattcagcacccaccagtcaggtatgttctgagtgaacccacagcagtcgcagaatgagcacctggcagggtgggtttcctaggaataatttattatttttaaaaataggcctaataaagcaataatgttctagacatctgtctaagtaatcagactcaggttccacacacaagcaacaactcgtgggcctcttttctatttcaatgtgctactaagaacccttggatgtaacatactagttagttaatgaattctgtgaattctgtgaagagtaatgtgattgaaaataagtctaaacagctgtaaaagtgaccacaatgacatgaaataaatttaataagtctagatcagcaacatgcaggtggtttctatttctgaactcctaattaggtgcaatgttggcagattttctgttaactttaaaatgtgttttttaaaataaggcttgtttaacaggctttggaagtctttgcatggatgatttattaggtttaaggaatcatgtttgcaatttttatccagttgaaattgtatatcaaaggccaggtgcagtggctcatgcctgtaatcccagcacttgagaaggccgaggtgggtcgattgcttgaggccaggagttcaagaccaacctggccaacatggcaaaatcttatctctactaaaaatgcaaaaattatctgggcgtggtgggacacacctgtaatcccagctacctgggagcctgaggcatgagaatcgcttgaacccgggaggcggaggttacagtgagccgagattgtgccattgcactccagcctgggcaataagcgcaaaaatccatctcaaaataatataataataattcactggaaattgtatatcaaaaaaggcaagagtcatcaaaatattctttttgactctttctgtaggatttaggagccctaaactccccaggagcttcactctttccaattttttttttacagaaaatctacagccaagtcattctgggaataaagtgagataaactttacagtttaaatct

SEQ ID NO: 9471 - protein, 337 aa, Homo sapiens; identical to SEQ ID NO: 9465

SEQ ID NO: 9472 - DNA, 2145 bp, Homo sapiens
ggagtccagctgggctgggcgccggagctgggagcggcgcgggtaggagcccggcggcaggtcccagcccggggctagagaccgagggccggggtccgggcccggcggcgggacccaggcggttgaggctggtcaggagtcagccagcctgaaagagcaggatggatcttgatgtggttaacatgtttgtgattgcgggcggcacgctggccatcccaatcctggcatttgtggcttcatttcttctgtggccttcagcactgataagaatctattattggtactggcggaggacattgggcatgcaagtccgctatgttcaccatgaagactatcagttctgttattccttccggggcaggcctgggcacaaaccctccatcctcatgctccacggattctctgcccacaaggatatgtggctcagtgtggtcaagttccttccaaagaacctgcacttggtctgcgtggacatgccaggacatgagggcaccacccgctcctccctggatgacctgtccatagatgggcaagttaagaggatacaccagtttgtagaatgcctgaagctgaacaaaaaacctttccacctggtaggcacctccatgggtggccaggtggctggggtgtatgctgcttactacccatcggatgtctccagcctgtgtctcgtgtgtcctgctggcctgcagtactcaactgacaatcaatttgtacaacggctcaaagaactgcagggctctgccgccgtggagaagattcccttgatcccgtctaccccagaagagatgagtgaaatgcttcagctctgctcctatgtccgcttcaaggtgccccagcagatcctgcaaggccttgtcgatgtccgcatccctcataacaacttctaccgaaagttgtttttggaaatcgtcagtgagaagtccagatactctctccatcagaacatggacaagatcaaggttccgacgcagatcatctgggggaaacaagaccaggtgctggatgtgtctggggcagacatgttggccaagtcaattgccaactgccaggtggagcttctggaaaactgtgggcactcagtagtgatggaaagacccaggaagacagccaagctcataatcgactttttagcttctgtgcacaacacagacaacaacaagaagctggactgaggccccgactgcagcctgcattctgcacacagcatctgctcccatcccccaagtctgacgcagccaccactctcagggatcctgccccaaatgcggtcggagcgccagtgaccctgaggaagcccgtcccttatccctggtatccacggttccccagagctttggggaccacgcgaaaacctccaagatatttttcacaaaatagaaactcatatggaacaaaataagaaaccccagccatgaaatctaccatgaagtcttcaagttcatgtcactgagaagcttgtgcaaagcagccaccttggaccataattaaatcaaggacattttctttgagacattccttatagttggagactcaagatatttttgttgcatcaggtgtattcccttgcatgggcagtggcttttataggagcattagtcctcattcgctgaaccctgttgtttaggtctaatttaagttttacatagagacccatgtatgactgcagcccattggctgcaagaccagggaggaaagtggcaagctgtagaaaatgtttacacgcatggaggggcattgctctagccctcagagcgtccggagcagcagggtacatgggtgggaggttcattcagcacccaccagtcaggtatgttctgagtgaacccacagcagtcgcagaatgagcacctggcagggtgggtttcctaggaataatttattatttttaaaaataggcctaataaagcaataatgttctagacatctgtctaagtaatcagactcaggttccacacacaagcaacaactcgtgggcctcttttctatttcaatgtgctactaagaacccttggatgtaacatactagttagttaatgaattctgtgaattctgtgaagagtaatgtgattgaaaataagtctaaacagctgtaaaagtgaccacaatgacatgaaataaatttaataagtctagatcagcaac

SEQ ID NO: 9473 - protein, 337 aa, Homo sapiens; identical to SEQ ID NO: 9465

SEQ ID NO: 9474 - DNA, 1404 bp, Homo sapiens
ggcttttatttcttaaatctctgacactttgaatgtctctttgggcccctgaagagaggaagtggtggcctggatctggtgactatcccttgattctgcggtggtgccacaggcacagtccagcacatactcactttgttttccttttctgacaagtgtttttggaaatcgtcagtgagaagtccagatactctctccatcagaacatggacaagatcaaggttccgacgcagatcatctgggggaaacaagaccaggtgctggatgtgtctggggcagacatgttggccaagtcaattgccaactgccaggtggagcttctggaaaactgtgggcactcagtagtgatggaaagacccaggaagacagccaagctcataatcgactttttagcttctgtgcacaacacagacaacaacaagaagctggactgaggccccgactgcagcctgcattctgcacacagcatctgctcccatcccccaagtctgacgcagccaccactctcagggatcctgccccaaatgcggtcggagcgccagtgaccctgaggaagcccgtcccttatccctggtatccacggttccccagagctttggggaccacgcgaaaacctccaagatatttttcacaaaatagaaactcatatggaacaaaataagaaaccccagccatgaaatctaccatgaagtcttcaagttcatgtcactgagaagcttgtgcaaagcagccaccttggaccataattaaatcaaggacattttctttgagacattccttatagttggagactcaagatatttttgttgcatcaggtgtattcccttgcatgggcagtggcttttataggagcattagtcctcattcgctgaaccctgttgtttaggtctaatttaagttttacatagagacccatgtatgactgcagcccattggctgcaagaccagggaggaaagtggcaagctgtagaaaatgtttacacgcatggaggggcattgctctagccctcagagcgtccggagcagcagggtacatgggtgggaggttcattcagcacccaccagtcaggtatgttctgagtgaacccacagcagtcgcagaatgagcacctggcagggtgggtttcctaggaataatttattatttttaaaaataggcctaataaagcaataatgttctagacatctgtctaagtaatcagactcaggttccacacacaagcaacaactcgtgggcctcttttctatttcaatgtgctactaagaacccttggatgtaacatactagttagttaatgaattctgtgaattctgtgaagagtaatgtgattgaaaataagtctaaacagctgtaaaagtgaccacaatgacatgaaataaatttaataagtctagatcagcaac

SEQ ID NO: 9475 - protein, 75 aa, Homo sapiens
MDKIKVPTQIIWGKQDQVLDVSGADMLAKSIANCQVELLENCGHSVVMERPRKTAKLIIDFLASVHNTDNNKKLD

SEQ ID NO: 9476 - DNA, 2073 bp, Homo sapiens
ggcttttatttcttaaatctctgacactttgaatgtctctttgggcccctgaagagaggaagtggtggcctggatctggtgactatcccttgattctgcggtggtgccacaggcacagtccagcacatactcactttgttttccttttctgacaagtgtttttggaaatcgtcagtgagaagtccagatactctctccatcagaacatggacaagatcaaggttccgacgcagatcatctgggggaaacaagaccaggtgctggatgtgtctggggcagacatgttggccaagtcaattgccaactgccaggtggagcttctggaaaactgtgggcactcagtagtgatggaaagacccaggaagacagccaagctcataatcgactttttagcttctgtgcacaacacagacaacaacaagaagctggactgaggccccgactgcagcctgcattctgcacacagcatctgctcccatcccccaagtctgacgcagccaccactctcagggatcctgccccaaatgcggtcggagcgccagtgaccctgaggaagcccgtcccttatccctggtatccacggttccccagagctttggggaccacgcgaaaacctccaagatatttttcacaaaatagaaactcatatggaacaaaataagaaaccccagccatgaaatctaccatgaagtcttcaagttcatgtcactgagaagcttgtgcaaagcagccaccttggaccataattaaatcaaggacattttctttgagacattccttatagttggagactcaagatatttttgttgcatcaggtgtattcccttgcatgggcagtggcttttataggagcattagtcctcattcgctgaaccctgttgtttaggtctaatttaagttttacatagagacccatgtatgactgcagcccattggctgcaagaccagggaggaaagtggcaagctgtagaaaatgtttacacgcatggaggggcattgctctagccctcagagcgtccggagcagcagggtacatgggtgggaggttcattcagcacccaccagtcaggtatgttctgagtgaacccacagcagtcgcagaatgagcacctggcagggtgggtttcctaggaataatttattatttttaaaaataggcctaataaagcaataatgttctagacatctgtctaagtaatcagactcaggttccacacacaagcaacaactcgtgggcctcttttctatttcaatgtgctactaagaacccttggatgtaacatactagttagttaatgaattctgtgaattctgtgaagagtaatgtgattgaaaataagtctaaacagctgtaaaagtgaccacaatgacatgaaataaatttaataagtctagatcagcaacatgcaggtggtttctatttctgaactcctaattaggtgcaatgttggcagattttctgttaactttaaaatgtgttttttaaaataaggcttgtttaacaggctttggaagtctttgcatggatgatttattaggtttaaggaatcatgtttgcaatttttatccagttgaaattgtatatcaaaggccaggtgcagtggctcatgcctgtaatcccagcacttgagaaggccgaggtgggtcgattgcttgaggccaggagttcaagaccaacctggccaacatggcaaaatcttatctctactaaaaatgcaaaaattatctgggcgtggtgggacacacctgtaatcccagctacctgggagcctgaggcatgagaatcgcttgaacccgggaggcggaggttacagtgagccgagattgtgccattgcactccagcctgggcaataagcgcaaaaatccatctcaaaataatataataataattcactggaaattgtatatcaaaaaaggcaagagtcatcaaaatattctttttgactctttctgtaggatttaggagccctaaactccccaggagcttcactctttccaattttttttttacagaaaatctacagccaagtcattctgggaataaagtgagataaactttacagtttaaatct

SEQ ID NO: 9477 - protein, 75 aa, Homo sapiens; identical to SEQ ID NO: 9475

SEQ ID NO: 9478 - DNA, 2083 bp, Homo sapiens
atttgagttggtgagaatagagcaaagacacagaaggtgcttgagtttgttggggcttttgcttttgccgttaaggatggggaggaggggccctcttgtctaggatgaattgaaggtaaaggcagctaagagaaggggagtgaatgcggatccacttctgagggaggatgttggggaaaaagatggaggtggattggcatagtagctgggaacccagaggaaaaggagaggaaatgagttgtttgaaaaggatcagccctggaaaagttctggctttcatgttggaaaagcattccccatatctgcagaggttagagccaagaaacacacagctctggggatccccagaggaccttcaaagagacctccagctgggtgcggtggctcaggcctgtaatcctagcactttgggaggctgaggcaggtggatcacctgaggtcaggagttcgagaccagcctggccaacgtggtgaaaccccatctctactagaaatacaaaaattagctgggcatggtggcgggcacctataatcccagctactggggaggctgaggcagaagatcacttgaacctgggaggcggaggttgcagtgagttgagatcacgccacttcattccagcctgggcgaaagagtgaaactccttttcaacaaataaagagatacccccagcttgtgataattagccttcccctcttgcatccttcctacagcttgggctgccctaaccagccacagggccagcctgatcaagtcactcaccttaacacagcctgtggttccccatggtccgtgtggctgtaggagcagcgccctcctctctgccccttctccccaccatgccacccccactgcccatgtgcttggtgtctcagccgccgtgctccttggtggcccctgcactcgccatgatctcccaccctgtgccattcccacatccgtgaatgctcctcccctgtcccctttctgctctcccgggactcaggaacgaggtcttccctcgaccctgctcatcccctgtgctctctgacttccccaccataccataacctcctcaagggcaaggaacgtttgttttctacctcagtattgctgacatcagcccaactcctggcacagagttgcagaataaaacaggaggcatcatggttacttccattcagacagccacaagccccaacaccaaagggacttggtcctaaaattcacatcctcctgccccactgacccctgccaggccttggtggaagttctgtccacagagtgcacacgtgggtgtctgaatctttgtgtatcatccagctccctttcttgcccagcaggtgctggatgtgtctggggcagacatgttggccaagtcaattgccaactgccaggtggagcttctggaaaactgtgggcactcagtagtgatggaaagacccaggaagacagccaagctcataatcgactttttagcttctgtgcacaacacagacaacaacaagaagctggactgaggccccgactgcagcctgcattctgcacacacattagtcctcattcgctgaaccctgttgtttaggtctaatttaagttttacatagagacccatgtatgactgcagcccattggctgcaagaccagggaggaaagtggcaagctgtagaaaatgtttacacgcatggaggggcattgctctagccctcagagcgtccggagcagcagggtacatgggtgggaggttcattcagcacccaccagtcaggtatgttctgagtgaacccacagcagtcgcagaatgagcacctggcagggtgggtttcctaggaataatttattatttttaaaaataggcctaataaagcaataatgttctagacatctgtctaagtaatcagactcaggttccacacacaagcaacaactcgtgggcctcttttctatttcaatgtgctactaagaacccttggatgtaacatactagttagttaatgaattctgtgaattctgtgaagagtaatgtgattgaaaataagtctaaacagctgtaaaagtgaccacaatgacatgaaataaatttaataagtctagatcagcaac

SEQ ID NO: 9479 - protein, 83 aa, Homo sapiens
MLGKKMEVDWHSSWEPRGKGEEMSCLKRISPGKVLAFMLEKHSPYLQRLEPRNTQLWGSPEDLQRDLQLGAVAQACNPSTLGG

SEQ ID NO: 9480 - DNA, 2752 bp, Homo sapiens
atttgagttggtgagaatagagcaaagacacagaaggtgcttgagtttgttggggcttttgcttttgccgttaaggatggggaggaggggccctcttgtctaggatgaattgaaggtaaaggcagctaagagaaggggagtgaatgcggatccacttctgagggaggatgttggggaaaaagatggaggtggattggcatagtagctgggaacccagaggaaaaggagaggaaatgagttgtttgaaaaggatcagccctggaaaagttctggctttcatgttggaaaagcattccccatatctgcagaggttagagccaagaaacacacagctctggggatccccagaggaccttcaaagagacctccagctgggtgcggtggctcaggcctgtaatcctagcactttgggaggctgaggcaggtggatcacctgaggtcaggagttcgagaccagcctggccaacgtggtgaaaccccatctctactagaaatacaaaaattagctgggcatggtggcgggcacctataatcccagctactggggaggctgaggcagaagatcacttgaacctgggaggcggaggttgcagtgagttgagatcacgccacttcattccagcctgggcgaaagagtgaaactccttttcaacaaataaagagatacccccagcttgtgataattagccttcccctcttgcatccttcctacagcttgggctgccctaaccagccacagggccagcctgatcaagtcactcaccttaacacagcctgtggttccccatggtccgtgtggctgtaggagcagcgccctcctctctgccccttctccccaccatgccacccccactgcccatgtgcttggtgtctcagccgccgtgctccttggtggcccctgcactcgccatgatctcccaccctgtgccattcccacatccgtgaatgctcctcccctgtcccctttctgctctcccgggactcaggaacgaggtcttccctcgaccctgctcatcccctgtgctctctgacttccccaccataccataacctcctcaagggcaaggaacgtttgttttctacctcagtattgctgacatcagcccaactcctggcacagagttgcagaataaaacaggaggcatcatggttacttccattcagacagccacaagccccaacaccaaagggacttggtcctaaaattcacatcctcctgccccactgacccctgccaggccttggtggaagttctgtccacagagtgcacacgtgggtgtctgaatctttgtgtatcatccagctccctttcttgcccagcaggtgctggatgtgtctggggcagacatgttggccaagtcaattgccaactgccaggtggagcttctggaaaactgtgggcactcagtagtgatggaaagacccaggaagacagccaagctcataatcgactttttagcttctgtgcacaacacagacaacaacaagaagctggactgaggccccgactgcagcctgcattctgcacacacattagtcctcattcgctgaaccctgttgtttaggtctaatttaagttttacatagagacccatgtatgactgcagcccattggctgcaagaccagggaggaaagtggcaagctgtagaaaatgtttacacgcatggaggggcattgctctagccctcagagcgtccggagcagcagggtacatgggtgggaggttcattcagcacccaccagtcaggtatgttctgagtgaacccacagcagtcgcagaatgagcacctggcagggtgggtttcctaggaataatttattatttttaaaaataggcctaataaagcaataatgttctagacatctgtctaagtaatcagactcaggttccacacacaagcaacaactcgtgggcctcttttctatttcaatgtgctactaagaacccttggatgtaacatactagttagttaatgaattctgtgaattctgtgaagagtaatgtgattgaaaataagtctaaacagctgtaaaagtgaccacaatgacatgaaataaatttaataagtctagatcagcaacatgcaggtggtttctatttctgaactcctaattaggtgcaatgttggcagattttctgttaactttaaaatgtgttttttaaaataaggcttgtttaacaggctttggaagtctttgcatggatgatttattaggtttaaggaatcatgtttgcaatttttatccagttgaaattgtatatcaaaggccaggtgcagtggctcatgcctgtaatcccagcacttgagaaggccgaggtgggtcgattgcttgaggccaggagttcaagaccaacctggccaacatggcaaaatcttatctctactaaaaatgcaaaaattatctgggcgtggtgggacacacctgtaatcccagctacctgggagcctgaggcatgagaatcgcttgaacccgggaggcggaggttacagtgagccgagattgtgccattgcactccagcctgggcaataagcgcaaaaatccatctcaaaataatataataataattcactggaaattgtatatcaaaaaaggcaagagtcatcaaaatattctttttgactctttctgtaggatttaggagccctaaactccccaggagcttcactctttccaattttttttttacagaaaatctacagccaagtcattctgggaataaagtgagataaactttacagtttaaatct

SEQ ID NO: 9481 - protein, 83 aa, Homo sapiens; identical to SEQ ID NO: 9479

SEQ ID NO: 9482 - DNA, 386 bp, Homo sapiens
tacatgggtgggaggttcattcagcacccaccagtcagaaaatctacagccaagtcattctgggaataaagtgagataaactttacagtttaaatctgaattcaggactgtgtttgaatatttcagtttaccagagaagaatggaacttagagcttaaaaacaagaagaagatatgaaaatatgacatcaagctgggctgcagctaaagcagtgcctcagagggaaattcataggcttcaatacgtatattagaagggaagaggctaggtggagtagctcacacctgtagtttcaacaccttgggaggccaaggcgggaggactgcttgagcccaggagtttgagaccagcctgggcaacatggcaagaccccatctcttatataa

SEQ ID NO: 9483 - protein, 35 aa, Homo sapiens
LTPVVSTPWEAKAGGLLEPRSLRPAWATWQDPISY

SEQ ID NO: 9484 - DNA, 1045 bp, Homo sapiens
acgcttcgtggggcgggacgaggagaagccaaacgtaaagacaccaggagtttctcgggcccagctgtggctgctgccggggagccccaagccttggcgggtccttgcggcgaataggagtctggtcaggcgtcaggctagtccgacgaagagtggagaatttcaagattgtggagttggactgaatgctgcacagttcaaacagctgcttatttcggctgtgaaggacctgtttggggaggttgatgccgccttacctttggacatcctaacctatgaagagaagaccttgtcagccatcttgagaatatgtagcagtggtcttgtcaaattgtggagctctttgaccctgttaggatcctataaaggcaaaaaatgtgctttccgggtgattcaggtttctccatttcttcttgcattatctggtaatagtagggaactagtattggattgaatgaatagtcttccattttggaaacgttcatccactctcatatttattttttggtgcctgcatgtttgaagactgaagcaggctaaaagctcttgatgaaatttgagggtgctgaagatgttcccactaatttccagccatcacctttggtggggtgggcttcggaggacagtctgtctgaacctgccagtgctgaccctgcagcactttcagcatatgcacatcaaagttggagaccgcgctgaacttaggagggccttcacacagactgatgtggctaccttctcagaattaacaggggatgtcaatcctttgcatttgaatgaagactttgcaaaacacaccaagtttggaaatacaattgtacatggagttttgatcaacggacttatctcagctctcctaggaactaaaatgccagggccaggctgtgtatttctttcccaggaaattagctttccagcccctttatatattggagaagttgttttagcttctgcagaagtgaaaaagctgaagcggttcattgctattattgcagtgtcatgttctgtaatagaaagtaaaaagactgttatggaaggctgggtt

SEQ ID NO: 9485 - protein, 157 aa, Homo sapiens
MFPLISSHHLWWGGLRRTVCLNLPVLTLQHFQHMHIKVGDRAELRRAFTQTDVATFSELTGDVNPLHLNEDFAKHTKFGNTIVHGVLINGLISALLGTKMPGPGCVFLSQEISFPAPLYIGEVVLASAEVKKLKRFIAIIAVSCSVIESKKTVMEGW

SEQ ID NO: 9486 - DNA, 960 bp, Homo sapiens
acgcttcgtggggcgggacgaggagaagccaaacgtaaagacaccaggagtttctcgggcccagctgtggctgctgccggggagccccaagccttggcgggtccttgcggcgaataggagtctggtcaggcgtcaggctagtccgacgaagagtgggttgatgccgccttacctttggacatcctaacctatgaagagaagaccttgtcagccatcttgagaatatgtagcagtggtcttgtcaaattgtggagctctttgaccctgttaggatcctataaaggcaaaaaatgtgctttccgggtgattcaggtttctccatttcttcttgcattatctggtaatagtagggaactagtattggattgaatgaatagtcttccattttggaaacgttcatccactctcatatttattttttggtgcctgcatgtttgaagactgaagcaggctaaaagctcttgatgaaatttgagggtgctgaagatgttcccactaatttccagccatcacctttggtggggtgggcttcggaggacagtctgtctgaacctgccagtgctgaccctgcagcactttcagcatatgcacatcaaagttggagaccgcgctgaacttaggagggccttcacacagactgatgtggctaccttctcagaattaacaggggatgtcaatcctttgcatttgaatgaagactttgcaaaacacaccaagtttggaaatacaattgtacatggagttttgatcaacggacttatctcagctctcctaggaactaaaatgccagggccaggctgtgtatttctttcccaggaaattagctttccagcccctttatatattggagaagttgttttagcttctgcagaagtgaaaaagctgaagcggttcattgctattattgcagtgtcatgttctgtaatagaaagtaaaaagactgttatggaaggctgggtt

SEQ ID NO: 9487 - protein, 157 aa, Homo sapiens; identical to SEQ ID NO: 9485

SEQ ID NO: 9488 - DNA, 2630 bp, Homo sapiens
acgcttcgtggggcgggacgaggagaagccaaacgtaaagacaccaggagtttctcgggcccagctgtggctgctgccggggagccccaagccttggcgggtccttgcggcgaataggagtctggtcaggcgtcaggctagtccgacgaagagtggagaatttcaagattgtggagttggactgaatgctgcacagttcaaacagctgcttatttcggctgtgaaggacctgtttggggaggttgatgccgccttacctttggacatcctaacctatgaagagaagaccttgtcagccatcttgagaatatgtagcagtggtcttgtcaaattgtggagctctttgaccctgttaggatcctataaaggcaaaaaatgtgctttccgggtgattcaggtttctccatttcttcttgcattatctggtaatagtagggaactagtattggattgaatgaatagtcttccattttggaaacgttcatccactctcatatttattttttggtgcctgcatgtttgaagactgaagcaggctaaaagctcttgatgaaatttgagggtgctgaagatgttcccactaatttccagccatcacctttggtggggtgggcttcggaggacagtctgtctgaacctgccagtgctgaccctgcagcactttcagcatatgcacatcaaagttggagaccgcgctgaacttaggagggccttcacacagactgatgtggctaccttctcagaattaacaggggatgtcaatcctttgcatttgaatgaagactttgcaaaacacaccaagtttggaaatacaattgtacatggagttttgatcaacggacttatctcagctctcctaggaactaaaatgccagggccaggctgtgtatttctttcccaggaaattagctttccagcccctttatatattggagaagttgttttagcttctgcagaagtgaaaaagctgaagcggttcattgctattattgcagtgtcatgttctgtaatagaaagtaaaaagactgttatggaaggctgggttaaagttatggttccagaagcttccaaatcctgaaatagatgttttaaagatgcaacctcaaacaccaatgctgttgttaaagagcctatggggaattgctgctctttaccaaagaatggttgataggcccagaagcccatcttagttaggggaagggagcaggaagagggttgttcaaatgcccactttccagtttggccttatgcttcatgcagacttgagtgtatgcaggatttcattatctgcctgggttttttgtttgttttttgttttttaattcaagaagtaggctgggcccggtggctcatgcctgtaatcctggcactttgggaggctgcggcaggcggatcacttgaggtcaggagtccaagaccagcctggccaacatggtgaaaccccatctctaccaaaaaaaaaaaaaaaaaaaaagtgcaactagctgtgcttggtgacttggccctgtagtcccagttgcttgggaggctgaggtgggagaattgcttgggcctgagagctggaggttatggtgagaaactgagattgcaccactgcactgtagcctgagtgacagagcgagaccctgtctcaagaaagaagtattgggaaggttatttaaagactctacttttaaatcaggcgtggcagctcacgcctgtaatcccagcattttgggaggctgaggcaggcgaatcacttgaggtcaggagttcaagaccagcctggccaacatgtgaaaccccatctctactaaaaatacaaaaactaaccgggcatggtggcgggcacctgtaatcccagctacttgggaggctgaggcaggagaatctcttgaacctgggaggttgcagtgagctgaaatcacaccactgcacttcagcctgggtgacagagcaaaactccacctcaaaaaaaaaaaaaagattctacttttagaaattcagacctagatagatttgcatttggataacaaatccctacctatagccatgtggaagcagcttgtcactgtattttaactgtgtaacaattattgaaggcgaaaatagaagttgggtcatctttgaacacctaccttttatcaatgaatatttttagactgttcttcagtatctgagtcagagtttattgtaatttgttatttacaccaaggtggcatcttagtctaccttcagtgagacttgcgtttcaggggaggggcgtatgtgcatcctcggtctcagttatgtaaacggtctgatctgtaaaatagtggtagcacatgccatgtgggatagttggtggagatgatagatggagttaagcacagggcccagcctgtcagcagtagctactattattgttgcccatttcccctgcaactgaggtgagaggttttcctgagtttgaagctgactggcccacagttaaacgtaacagaccagtttttcagggtgtcagccaacctctattagtgttcttaagtacagtttctgttataaaagttcagattattccttgaaaatttggatctacctcccattattatgagtaatacatgcttatagtaaaaaaaaaaaaattgtaagaaataaatattaagaagatt

SEQ ID NO: 9489 - protein, 168 aa, Homo sapiens [sequence omitted]

SEQ ID NO: 9490 - DNA, 2545 bp, Homo sapiens
acgcttcgtggggcgggacgaggagaagccaaacgtaaagacaccaggagtttctcgggcccagctgtggctgctgccggggagccccaagccttggcgggtccttgcggcgaataggagtctggtcaggcgtcaggctagtccgacgaagagtgggttgatgccgccttacctttggacatcctaacctatgaagagaagaccttgtcagccatcttgagaatatgtagcagtggtcttgtcaaattgtggagctctttgaccctgttaggatcctataaaggcaaaaaatgtgctttccgggtgattcaggtttctccatttcttcttgcattatctggtaatagtagggaactagtattggattgaatgaatagtcttccattttggaaacgttcatccactctcatatttattttttggtgcctgcatgtttgaagactgaagcaggctaaaagctcttgatgaaatttgagggtgctgaagatgttcccactaatttccagccatcacctttggtggggtgggcttcggaggacagtctgtctgaacctgccagtgctgaccctgcagcactttcagcatatgcacatcaaagttggagaccgcgctgaacttaggagggccttcacacagactgatgtggctaccttctcagaattaacaggggatgtcaatcctttgcatttgaatgaagactttgcaaaacacaccaagtttggaaatacaattgtacatggagttttgatcaacggacttatctcagctctcctaggaactaaaatgccagggccaggctgtgtatttctttcccaggaaattagctttccagcccctttatatattggagaagttgttttagcttctgcagaagtgaaaaagctgaagcggttcattgctattattgcagtgtcatgttctgtaatagaaagtaaaaagactgttatggaaggctgggttaaagttatggttccagaagcttccaaatcctgaaatagatgttttaaagatgcaacctcaaacaccaatgctgttgttaaagagcctatggggaattgctgctctttaccaaagaatggttgataggcccagaagcccatcttagttaggggaagggagcaggaagagggttgttcaaatgcccactttccagtttggccttatgcttcatgcagacttgagtgtatgcaggatttcattatctgcctgggttttttgtttgttttttgttttttaattcaagaagtaggctgggcccggtggctcatgcctgtaatcctggcactttgggaggctgcggcaggcggatcacttgaggtcaggagtccaagaccagcctggccaacatggtgaaaccccatctctaccaaaaaaaaaaaaaaaaaaaaagtgcaactagctgtgcttggtgacttggccctgtagtcccagttgcttgggaggctgaggtgggagaattgcttgggcctgagagctggaggttatggtgagaaactgagattgcaccactgcactgtagcctgagtgacagagcgagaccctgtctcaagaaagaagtattgggaaggttatttaaagactctacttttaaatcaggcgtggcagctcacgcctgtaatcccagcattttgggaggctgaggcaggcgaatcacttgaggtcaggagttcaagaccagcctggccaacatgtgaaaccccatctctactaaaaatacaaaaactaaccgggcatggtggcgggcacctgtaatcccagctacttgggaggctgaggcaggagaatctcttgaacctgggaggttgcagtgagctgaaatcacaccactgcacttcagcctgggtgacagagcaaaactccacctcaaaaaaaaaaaaaagattctacttttagaaattcagacctagatagatttgcatttggataacaaatccctacctatagccatgtggaagcagcttgtcactgtattttaactgtgtaacaattattgaaggcgaaaatagaagttgggtcatctttgaacacctaccttttatcaatgaatatttttagactgttcttcagtatctgagtcagagtttattgtaatttgttatttacaccaaggtggcatcttagtctaccttcagtgagacttgcgtttcaggggaggggcgtatgtgcatcctcggtctcagttatgtaaacggtctgatctgtaaaatagtggtagcacatgccatgtgggatagttggtggagatgatagatggagttaagcacagggcccagcctgtcagcagtagctactattattgttgcccatttcccctgcaactgaggtgagaggttttcctgagtttgaagctgactggcccacagttaaacgtaacagaccagtttttcagggtgtcagccaacctctattagtgttcttaagtacagtttctgttataaaagttcagattattccttgaaaatttggatctacctcccattattatgagtaatacatgcttatagtaaaaaaaaaaaaattgtaagaaataaatattaagaagatt

SEQ ID NO: 9491 - protein, 168 aa, Homo sapiens [sequence omitted]

SEQ ID NO: 9492 - DNA, 3150 bp, Homo sapiens
acgcttcgtggggcgggacgaggagaagccaaacgtaaagacaccaggagtttctcgggcccagctgtggctgctgccggggagccccaagccttggcgggtccttgcggcgaataggagtctggtcaggcgtcaggctagtccgacgaagagtggagaatttcaagattgtggagttggactgaatgctgcacagttcaaacagctgcttatttcggctgtgaaggacctgtttggggaggttgatgccgccttacctttggacatcctaacctatgaagagaagaccttgtcagccatcttgagaatatgtagcagtggtcttgtcaaattgtggagctctttgaccctgttaggatcctataaaggcaaaaaatgtgctttccgggtgattcaggtttctccatttcttcttgcattatctggtaatagtagggaactagtattggattgaatgaatagtcttccattttggaaacgttcatccactctcatatttattttttggtgcctgcatgtttgaagactgaagcaggctaaaagctcttgatgaaatttgagggtgctgaagatgttcccactaatttccagccatcacctttggtggggtgggcttcggaggacagtctgtctgaacctgccagtgctgaccctgcagcactttcagcatatgcacatcaaagttggagaccgcgctgaacttaggagggccttcacacagactgatgtggctaccttctcagaattaacaggggatgtcaatcctttgcatttgaatgaagactttgcaaaacacaccaagtttggaaatacaattgtacatggagttttgatcaacggacttatctcagctctcctaggaactaaaatgccagggccaggctgtgtatttctttcccaggaaattagctttccagcccctttatatattggagaagttgttttagcttctgcagaagtgaaaaagctgaagcggttcattgctattattgcagtgtcatgttctgtaatagaaagtaaaaagactgttatggaaggctgggttaaagttatggttccagaagcttccaaatcctgaaatagatgttttaaagatgcaacctcaaacaccaatgctgttgttaaagagcctatggggaattgctgctctttaccaaagaatggttgataggcccagaagcccatcttagttaggggaagggagcaggaagagggttgttcaaatgcccactttccagtttggccttatgcttcatgcagacttgagtgtatgcaggatttcattatctgcctgggttttttgtttgttttttgttttttaattcaagaagtaggctgggcccggtggctcatgcctgtaatcctggcactttgggaggctgcggcaggcggatcacttgaggtcaggagtccaagaccagcctggccaacatggtgaaaccccatctctaccaaaaaaaaaaaaaaaaaaaaagtgcaactagctgtgcttggtgacttggccctgtagtcccagttgcttgggaggctgaggtgggagaattgcttgggcctgagagctggaggttatggtgagaaactgagattgcaccactgcactgtagcctgagtgacagagcgagaccctgtctcaagaaagaagtattgggaaggttatttaaagactctacttttaaatcaggcgtggcagctcacgcctgtaatcccagcattttgggaggctgaggcaggcgaatcacttgaggtcaggagttcaagaccagcctggccaacatgtgaaaccccatctctactaaaaatacaaaaactaaccgggcatggtggcgggcacctgtaatcccagctacttgggaggctgaggcaggagaatctcttgaacctgggaggttgcagtgagctgaaatcacaccactgcacttcagcctgggtgacagagcaaaactccacctcaaaaaaaaaaaaaagattctacttttagaaattcagacctagatagatttgcatttggataacaaatccctacctatagccatgtggaagcagcttgtcactgtattttaactgtgtaacaattattgaaggcgaaaatagaagttgggtcatctttgaacacctaccttttatcaatgaatatttttagactgttcttcagtatctgagtcagagtttattgtaatttgttatttacaccaaggtggcatcttagtctaccttcagtgagacttgcgtttcaggggaggggcgtatgtgcatcctcggtctcagttatgtaaacggtctgatctgtaaaatagtggtagcacatgccatgtgggatagttggtggagatgatagatggagttaagcacagggcccagcctgtcagcagtagctactattattgttgcccatttcccctgcaactgaggtgagaggttttcctgagtttgaagctgactggcccacagttaaacgtaacagaccagtttttcagggtgtcagccaacctctattagtgttcttaagtacagtttctgttataaaagttcagattattccttgaaaatttggatctacctcccattattatgagtaatacatgcttatagtaaaaaaaaaaaaattgtaagaaataaatattaagaagattatggaggccaaattcttaagactttgggggctggggtcagggaggttatattgaaggggagatgtgcctaacatgttactactaaatggccatcccaacacagccaacacttttgtttcccatttttttttgtttcccgttttttaataaaattgagatataattcacataccataaaattcaccttttaaaagtgtacagtttagtggttttcagaatatccacaaagttgtacaaccatcaccaaatcaattttttatagcatttttcatcacccccaaaagaacctcccattagcagtcaatccatttctctcctccagtctttgggaatcaccagtctactttctgtctctatgggtttccctgttctggacatttcataaaagttcatacaatgtatgatcctttggaactggcttctttgatatagcatgttttcagggttcatccatgttacagcatgtatcagtacatcattttattttatggctgaataatattccattgtatttacccat

SEQ ID NO: 9493 - protein, 168 aa, Homo sapiens [sequence omitted]

SEQ ID NO: 9494 - DNA, 3065 bp, Homo sapiens
acgcttcgtggggcgggacgaggagaagccaaacgtaaagacaccaggagtttctcgggcccagctgtggctgctgccggggagccccaagccttggcgggtccttgcggcgaataggagtctggtcaggcgtcaggctagtccgacgaagagtgggttgatgccgccttacctttggacatcctaacctatgaagagaagaccttgtcagccatcttgagaatatgtagcagtggtcttgtcaaattgtggagctctttgaccctgttaggatcctataaaggcaaaaaatgtgctttccgggtgattcaggtttctccatttcttcttgcattatctggtaatagtagggaactagtattggattgaatgaatagtcttccattttggaaacgttcatccactctcatatttattttttggtgcctgcatgtttgaagactgaagcaggctaaaagctcttgatgaaatttgagggtgctgaagatgttcccactaatttccagccatcacctttggtggggtgggcttcggaggacagtctgtctgaacctgccagtgctgaccctgcagcactttcagcatatgcacatcaaagttggagaccgcgctgaacttaggagggccttcacacagactgatgtggctaccttctcagaattaacaggggatgtcaatcctttgcatttgaatgaagactttgcaaaacacaccaagtttggaaatacaattgtacatggagttttgatcaacggacttatctcagctctcctaggaactaaaatgccagggccaggctgtgtatttctttcccaggaaattagctttccagcccctttatatattggagaagttgttttagcttctgcagaagtgaaaaagctgaagcggttcattgctattattgcagtgtcatgttctgtaatagaaagtaaaaagactgttatggaaggctgggttaaagttatggttccagaagcttccaaatcctgaaatagatgttttaaagatgcaacctcaaacaccaatgctgttgttaaagagcctatggggaattgctgctctttaccaaagaatggttgataggcccagaagcccatcttagttaggggaagggagcaggaagagggttgttcaaatgcccactttccagtttggccttatgcttcatgcagacttgagtgtatgcaggatttcattatctgcctgggttttttgtttgttttttgttttttaattcaagaagtaggctgggcccggtggctcatgcctgtaatcctggcactttgggaggctgcggcaggcggatcacttgaggtcaggagtccaagaccagcctggccaacatggtgaaaccccatctctaccaaaaaaaaaaaaaaaaaaaaagtgcaactagctgtgcttggtgacttggccctgtagtcccagttgcttgggaggctgaggtgggagaattgcttgggcctgagagctggaggttatggtgagaaactgagattgcaccactgcactgtagcctgagtgacagagcgagaccctgtctcaagaaagaagtattgggaaggttatttaaagactctacttttaaatcaggcgtggcagctcacgcctgtaatcccagcattttgggaggctgaggcaggcgaatcacttgaggtcaggagttcaagaccagcctggccaacatgtgaaaccccatctctactaaaaatacaaaaactaaccgggcatggtggcgggcacctgtaatcccagctacttgggaggctgaggcaggagaatctcttgaacctgggaggttgcagtgagctgaaatcacaccactgcacttcagcctgggtgacagagcaaaactccacctcaaaaaaaaaaaaaagattctacttttagaaattcagacctagatagatttgcatttggataacaaatccctacctatagccatgtggaagcagcttgtcactgtattttaactgtgtaacaattattgaaggcgaaaatagaagttgggtcatctttgaacacctaccttttatcaatgaatatttttagactgttcttcagtatctgagtcagagtttattgtaatttgttatttacaccaaggtggcatcttagtctaccttcagtgagacttgcgtttcaggggaggggcgtatgtgcatcctcggtctcagttatgtaaacggtctgatctgtaaaatagtggtagcacatgccatgtgggatagttggtggagatgatagatggagttaagcacagggcccagcctgtcagcagtagctactattattgttgcccatttcccctgcaactgaggtgagaggttttcctgagtttgaagctgactggcccacagttaaacgtaacagaccagtttttcagggtgtcagccaacctctattagtgttcttaagtacagtttctgttataaaagttcagattattccttgaaaatttggatctacctcccattattatgagtaatacatgcttatagtaaaaaaaaaaaaattgtaagaaataaatattaagaagattatggaggccaaattcttaagactttgggggctggggtcagggaggttatattgaaggggagatgtgcctaacatgttactactaaatggccatcccaacacagccaacacttttgtttcccatttttttttgtttcccgttttttaataaaattgagatataattcacataccataaaattcaccttttaaaagtgtacagtttagtggttttcagaatatccacaaagttgtacaaccatcaccaaatcaattttttatagcatttttcatcacccccaaaagaacctcccattagcagtcaatccatttctctcctccagtctttgggaatcaccagtctactttctgtctctatgggtttccctgttctggacatttcataaaagttcatacaatgtatgatcctttggaactggcttctttgatatagcatgttttcagggttcatccatgttacagcatgtatcagtacatcattttattttatggctgaataatattccattgtatttacccat

SEQ ID NO: 9495 - protein, 168 aa, Homo sapiens [sequence omitted]

SEQ ID NO: 9496 - DNA, 1372 bp, Homo sapiens
tcgtggggcgggacgaggagaagccaaacgtaaagacaccaggagtttctcgggcccagctgtggctgctgccggggagccccaagccttggcgggtccttgcggcgaataggagtctggtcaggcgtcaggctagtccgacgaagagtgggtaggtggaagccttccaaagagcggcggttgtctgggagccgtctcagttggccgcgacccgggcgcatgcgcggggcgggcggtgcgccttgggtagcttgtcctctccgaccccgggcgctgagggcctctgtacggcgccgcgtagggtctcggccgcagaacgtggccgagaggcccgggcgagacttcgggaccgtgtcctgagcgctctccatgcgcccggcgcgaggtgtgatcagcactggaaaagatgcctgcccctgctgccacatatgaaagagtagtttacaaaaacccttccgagtaccactacatgaaagtctgcctagaatttcaagattgtggagttggactgaatgctgcacagttcaaacagctgcttatttcggctgtgaaggacctgtttggggaggttgatgccgccttacctttggacatcctaacctatgaagagaagaccttgtcagccatcttgagaatatgtagcagtggtcttgtcaaattgtggagctctttgaccctgttaggatcctataaaggcaaaaaatgtgctttccgggtgattcaggtttctccatttcttcttgcattatctggtaatagtagggaactagtattggattgaatgaatagtcttccattttggaaacgttcatccactctcatatttattttttggtgcctgcatgtttgaagactgaagcaggctaaaagctcttgatgaaatttgagggtgctgaagatgttcccactaatttccagccatcacctttggtggggtgggcttcggaggacagtctgtctgaacctgccagtgctgaccctgcagcactttcagcatatgcacatcaaagttggagaccgcgctgaacttaggagggccttcacacagactgatgtggctaccttctcagaattaacaggggatgtcaatcctttgcatttgaatgaagactttgcaaaacacaccaagtttggaaatacaattgtacatggagttttgatcaacggacttatctcagctctcctaggaactaaaatgccagggccaggctgtgtatttctttcccaggaaattagctttccagcccctttatatattggagaagttgttttagcttctgcagaagtgaaaaagctgaagcggttcattgctattattgcagtgtcatgttctgtaatagaaagtaaaaagactgttatggaaggctgggtt

SEQ ID NO: 9497 - protein, 124 aa, Homo sapiens; identical to SEQ ID NO: 804

SEQ ID NO: 9498 - DNA, 2957 bp, Homo sapiens
tcgtggggcgggacgaggagaagccaaacgtaaagacaccaggagtttctcgggcccagctgtggctgctgccggggagccccaagccttggcgggtccttgcggcgaataggagtctggtcaggcgtcaggctagtccgacgaagagtgggtaggtggaagccttccaaagagcggcggttgtctgggagccgtctcagttggccgcgacccgggcgcatgcgcggggcgggcggtgcgccttgggtagcttgtcctctccgaccccgggcgctgagggcctctgtacggcgccgcgtagggtctcggccgcagaacgtggccgagaggcccgggcgagacttcgggaccgtgtcctgagcgctctccatgcgcccggcgcgaggtgtgatcagcactggaaaagatgcctgcccctgctgccacatatgaaagagtagtttacaaaaacccttccgagtaccactacatgaaagtctgcctagaatttcaagattgtggagttggactgaatgctgcacagttcaaacagctgcttatttcggctgtgaaggacctgtttggggaggttgatgccgccttacctttggacatcctaacctatgaagagaagaccttgtcagccatcttgagaatatgtagcagtggtcttgtcaaattgtggagctctttgaccctgttaggatcctataaaggcaaaaaatgtgctttccgggtgattcaggtttctccatttcttcttgcattatctggtaatagtagggaactagtattggattgaatgaatagtcttccattttggaaacgttcatccactctcatatttattttttggtgcctgcatgtttgaagactgaagcaggctaaaagctcttgatgaaatttgagggtgctgaagatgttcccactaatttccagccatcacctttggtggggtgggcttcggaggacagtctgtctgaacctgccagtgctgaccctgcagcactttcagcatatgcacatcaaagttggagaccgcgctgaacttaggagggccttcacacagactgatgtggctaccttctcagaattaacaggggatgtcaatcctttgcatttgaatgaagactttgcaaaacacaccaagtttggaaatacaattgtacatggagttttgatcaacggacttatctcagctctcctaggaactaaaatgccagggccaggctgtgtatttctttcccaggaaattagctttccagcccctttatatattggagaagttgttttagcttctgcagaagtgaaaaagctgaagcggttcattgctattattgcagtgtcatgttctgtaatagaaagtaaaaagactgttatggaaggctgggttaaagttatggttccagaagcttccaaatcctgaaatagatgttttaaagatgcaacctcaaacaccaatgctgttgttaaagagcctatggggaattgctgctctttaccaaagaatggttgataggcccagaagcccatcttagttaggggaagggagcaggaagagggttgttcaaatgcccactttccagtttggccttatgcttcatgcagacttgagtgtatgcaggatttcattatctgcctgggttttttgtttgttttttgttttttaattcaagaagtaggctgggcccggtggctcatgcctgtaatcctggcactttgggaggctgcggcaggcggatcacttgaggtcaggagtccaagaccagcctggccaacatggtgaaaccccatctctaccaaaaaaaaaaaaaaaaaaaaagtgcaactagctgtgcttggtgacttggccctgtagtcccagttgcttgggaggctgaggtgggagaattgcttgggcctgagagctggaggttatggtgagaaactgagattgcaccactgcactgtagcctgagtgacagagcgagaccctgtctcaagaaagaagtattgggaaggttatttaaagactctacttttaaatcaggcgtggcagctcacgcctgtaatcccagcattttgggaggctgaggcaggcgaatcacttgaggtcaggagttcaagaccagcctggccaacatgtgaaaccccatctctactaaaaatacaaaaactaaccgggcatggtggcgggcacctgtaatcccagctacttgggaggctgaggcaggagaatctcttgaacctgggaggttgcagtgagctgaaatcacaccactgcacttcagcctgggtgacagagcaaaactccacctcaaaaaaaaaaaaaagattctacttttagaaattcagacctagatagatttgcatttggataacaaatccctacctatagccatgtggaagcagcttgtcactgtattttaactgtgtaacaattattgaaggcgaaaatagaagttgggtcatctttgaacacctaccttttatcaatgaatatttttagactgttcttcagtatctgagtcagagtttattgtaatttgttatttacaccaaggtggcatcttagtctaccttcagtgagacttgcgtttcaggggaggggcgtatgtgcatcctcggtctcagttatgtaaacggtctgatctgtaaaatagtggtagcacatgccatgtgggatagttggtggagatgatagatggagttaagcacagggcccagcctgtcagcagtagctactattattgttgcccatttcccctgcaactgaggtgagaggttttcctgagtttgaagctgactggcccacagttaaacgtaacagaccagtttttcagggtgtcagccaacctctattagtgttcttaagtacagtttctgttataaaagttcagattattccttgaaaatttggatctacctcccattattatgagtaatacatgcttatagtaaaaaaaaaaaaattgtaagaaataaatattaagaagatt

SEQ ID NO: 9499 - protein, 124 aa, Homo sapiens; identical to SEQ ID NO: 804

SEQ ID NO: 9500 - DNA, 3477 bp, Homo sapiens
tcgtggggcgggacgaggagaagccaaacgtaaagacaccaggagtttctcgggcccagctgtggctgctgccggggagccccaagccttggcgggtccttgcggcgaataggagtctggtcaggcgtcaggctagtccgacgaagagtgggtaggtggaagccttccaaagagcggcggttgtctgggagccgtctcagttggccgcgacccgggcgcatgcgcggggcgggcggtgcgccttgggtagcttgtcctctccgaccccgggcgctgagggcctctgtacggcgccgcgtagggtctcggccgcagaacgtggccgagaggcccgggcgagacttcgggaccgtgtcctgagcgctctccatgcgcccggcgcgaggtgtgatcagcactggaaaagatgcctgcccctgctgccacatatgaaagagtagtttacaaaaacccttccgagtaccactacatgaaagtctgcctagaatttcaagattgtggagttggactgaatgctgcacagttcaaacagctgcttatttcggctgtgaaggacctgtttggggaggttgatgccgccttacctttggacatcctaacctatgaagagaagaccttgtcagccatcttgagaatatgtagcagtggtcttgtcaaattgtggagctctttgaccctgttaggatcctataaaggcaaaaaatgtgctttccgggtgattcaggtttctccatttcttcttgcattatctggtaatagtagggaactagtattggattgaatgaatagtcttccattttggaaacgttcatccactctcatatttattttttggtgcctgcatgtttgaagactgaagcaggctaaaagctcttgatgaaatttgagggtgctgaagatgttcccactaatttccagccatcacctttggtggggtgggcttcggaggacagtctgtctgaacctgccagtgctgaccctgcagcactttcagcatatgcacatcaaagttggagaccgcgctgaacttaggagggccttcacacagactgatgtggctaccttctcagaattaacaggggatgtcaatcctttgcatttgaatgaagactttgcaaaacacaccaagtttggaaatacaattgtacatggagttttgatcaacggacttatctcagctctcctaggaactaaaatgccagggccaggctgtgtatttctttcccaggaaattagctttccagcccctttatatattggagaagttgttttagcttctgcagaagtgaaaaagctgaagcggttcattgctattattgcagtgtcatgttctgtaatagaaagtaaaaagactgttatggaaggctgggttaaagttatggttccagaagcttccaaatcctgaaatagatgttttaaagatgcaacctcaaacaccaatgctgttgttaaagagcctatggggaattgctgctctttaccaaagaatggttgataggcccagaagcccatcttagttaggggaagggagcaggaagagggttgttcaaatgcccactttccagtttggccttatgcttcatgcagacttgagtgtatgcaggatttcattatctgcctgggttttttgtttgttttttgttttttaattcaagaagtaggctgggcccggtggctcatgcctgtaatcctggcactttgggaggctgcggcaggcggatcacttgaggtcaggagtccaagaccagcctggccaacatggtgaaaccccatctctaccaaaaaaaaaaaaaaaaaaaaagtgcaactagctgtgcttggtgacttggccctgtagtcccagttgcttgggaggctgaggtgggagaattgcttgggcctgagagctggaggttatggtgagaaactgagattgcaccactgcactgtagcctgagtgacagagcgagaccctgtctcaagaaagaagtattgggaaggttatttaaagactctacttttaaatcaggcgtggcagctcacgcctgtaatcccagcattttgggaggctgaggcaggcgaatcacttgaggtcaggagttcaagaccagcctggccaacatgtgaaaccccatctctactaaaaatacaaaaactaaccgggcatggtggcgggcacctgtaatcccagctacttgggaggctgaggcaggagaatctcttgaacctgggaggttgcagtgagctgaaatcacaccactgcacttcagcctgggtgacagagcaaaactccacctcaaaaaaaaaaaaaagattctacttttagaaattcagacctagatagatttgcatttggataacaaatccctacctatagccatgtggaagcagcttgtcactgtattttaactgtgtaacaattattgaaggcgaaaatagaagttgggtcatctttgaacacctaccttttatcaatgaatatttttagactgttcttcagtatctgagtcagagtttattgtaatttgttatttacaccaaggtggcatcttagtctaccttcagtgagacttgcgtttcaggggaggggcgtatgtgcatcctcggtctcagttatgtaaacggtctgatctgtaaaatagtggtagcacatgccatgtgggatagttggtggagatgatagatggagttaagcacagggcccagcctgtcagcagtagctactattattgttgcccatttcccctgcaactgaggtgagaggttttcctgagtttgaagctgactggcccacagttaaacgtaacagaccagtttttcagggtgtcagccaacctctattagtgttcttaagtacagtttctgttataaaagttcagattattccttgaaaatttggatctacctcccattattatgagtaatacatgcttatagtaaaaaaaaaaaaattgtaagaaataaatattaagaagattatggaggccaaattcttaagactttgggggctggggtcagggaggttatattgaaggggagatgtgcctaacatgttactactaaatggccatcccaacacagccaacacttttgtttcccatttttttttgtttcccgttttttaataaaattgagatataattcacataccataaaattcaccttttaaaagtgtacagtttagtggttttcagaatatccacaaagttgtacaaccatcaccaaatcaattttttatagcatttttcatcacccccaaaagaacctcccattagcagtcaatccatttctctcctccagtctttgggaatcaccagtctactttctgtctctatgggtttccctgttctggacatttcataaaagttcatacaatgtatgatcctttggaactggcttctttgatatagcatgttttcagggttcatccatgttacagcatgtatcagtacatcattttattttatggctgaataatattccattgtatttacccat

SEQ ID NO: 9501 - protein, 124 aa, Homo sapiens; identical to SEQ ID NO: 804

SEQ ID NO: 9502 - DNA, 1136 bp, Homo sapiens
gtggggcgggacgaggagaagccaaacgtaaagacaccaggagtttctcgggcccagctgtggctgctgccggggagccccaagccttggcgggtccttgcggcgaataggagtctggtcaggcgtcaggctagtccgacgaagagtgggtgtgatcagcactggaaaagatgcctgcccctgctgccacatatgaaagagtagtttacaaaaacccttccgagtaccactacatgaaagtctgcctagaatttcaagattgtggagttggactgaatgctgcacagttcaaacagctgcttatttcggctgtgaaggacctgtttggggaggttgatgccgccttacctttggacatcctaacctatgaagagaagaccttgtcagccatcttgagaatatgtagcagtggtcttgtcaaattgtggagctctttgaccctgttaggatcctataaaggcaaaaaatgtgctttccgggtgattcaggtttctccatttcttcttgcattatctggtaatagtagggaactagtattggattgaatgaatagtcttccattttggaaacgttcatccactctcatatttattttttggtgcctgcatgtttgaagactgaagcaggctaaaagctcttgatgaaatttgagggtgctgaagatgttcccactaatttccagccatcacctttggtggggtgggcttcggaggacagtctgtctgaacctgccagtgctgaccctgcagcactttcagcatatgcacatcaaagttggagaccgcgctgaacttaggagggccttcacacagactgatgtggctaccttctcagaattaacaggggatgtcaatcctttgcatttgaatgaagactttgcaaaacacaccaagtttggaaatacaattgtacatggagttttgatcaacggacttatctcagctctcctaggaactaaaatgccagggccaggctgtgtatttctttcccaggaaattagctttccagcccctttatatattggagaagttgttttagcttctgcagaagtgaaaaagctgaagcggttcattgctattattgcagtgtcatgttctgtaatagaaagtaaaaagactgttatggaaggctgggtt

SEQ ID NO: 9503 - protein, 124 aa, Homo sapiens; identical to SEQ ID NO: 804

SEQ ID NO: 9504 - DNA, 1544 bp, Homo sapiens
gtggggcgggacgaggagaagccaaacgtaaagacaccaggagtttctcgggcccagctgtggctgctgccggggagccccaagccttggcgggtccttgcggcgaataggagtctggtcaggcgtcaggctagtccgacgaagagtgggtgtgatcagcactggaaaagatgcctgcccctgctgccacatatgaaagagtagtttacaaaaacccttccgagtaccactacatgaaagtctgcctagaatttcaagattgtggagttggactgaatgctgcacagttcaaacagctgcttatttcggctgtgaaggacctgtttggggaggttgatgccgccttacctttggacatcctaacctatgaagagaagaccttgtcagccatcttgagaatatgtagcagtggtcttgtcaaattgtggagctctttgaccctgttaggatcctataaaggcaaaaaatgtgctttccgggtgattcaggtttctccatttcttcttgcattatctggtaatagtagggaactagtattggattgaatgaatagtcttccattttggaaacgttcatccactctcatatttattttttggtgcctgcatgtttgaagactgaagcaggctaaaagctcttgatgaaatttgagggtgctgaagatgttcccactaatttccagccatcacctttggtggggtgggcttcggaggacagtctgtctgaacctgccagtgctgaccctgcagcactttcagcatatgcacatcaaagttggagaccgcgctgaacttaggagggccttcacacagactgatgtggctaccttctcagaattaacaggggatgtcaatcctttgcatttgaatgaagactttgcaaaacacaccaagtttggaaatacaattgtacatggagttttgatcaacggacttatctcagctctcctaggaactaaaatgccagggccaggctgtgtatttctttcccaggaaattagctttccagcccctttatatattggagaagttgttttagcttctgcagaagtgaaaaagctgaagcggttcattgctattattgcagtgtcatgttctgtaatagaaagtaaaaagactgttatggaaggctgggttaaagttatggttccagaagcttccaaatcctgaaatagatgttttaaagatgcaacctcaaacaccaatgctgttgttaaagagcctatggggaattgctgctctttaccaaagaatggttgataggcccagaagcccatcttagttaggggaagggagcaggaagagggttgttcaaatgcccactttccagtttggccttatgcttcatgcagacttgagtgtatgcaggatttcattatctgcctgggttttttgtttgttttttgttttttaattcaagaagtaggctgggcccggtggctcatgcctgtaatcctggcactttgggaggctgcggcaggcggatcacttgaggtcaggagtccaagaccagcctggccaacatggtgaaaccccatctctacc

SEQ ID NO: 9505 - protein, 124 aa, Homo sapiens; identical to SEQ ID NO: 804

SEQ ID NO: 9506 - DNA, 2721 bp, Homo sapiens
gtggggcgggacgaggagaagccaaacgtaaagacaccaggagtttctcgggcccagctgtggctgctgccggggagccccaagccttggcgggtccttgcggcgaataggagtctggtcaggcgtcaggctagtccgacgaagagtgggtgtgatcagcactggaaaagatgcctgcccctgctgccacatatgaaagagtagtttacaaaaacccttccgagtaccactacatgaaagtctgcctagaatttcaagattgtggagttggactgaatgctgcacagttcaaacagctgcttatttcggctgtgaaggacctgtttggggaggttgatgccgccttacctttggacatcctaacctatgaagagaagaccttgtcagccatcttgagaatatgtagcagtggtcttgtcaaattgtggagctctttgaccctgttaggatcctataaaggcaaaaaatgtgctttccgggtgattcaggtttctccatttcttcttgcattatctggtaatagtagggaactagtattggattgaatgaatagtcttccattttggaaacgttcatccactctcatatttattttttggtgcctgcatgtttgaagactgaagcaggctaaaagctcttgatgaaatttgagggtgctgaagatgttcccactaatttccagccatcacctttggtggggtgggcttcggaggacagtctgtctgaacctgccagtgctgaccctgcagcactttcagcatatgcacatcaaagttggagaccgcgctgaacttaggagggccttcacacagactgatgtggctaccttctcagaattaacaggggatgtcaatcctttgcatttgaatgaagactttgcaaaacacaccaagtttggaaatacaattgtacatggagttttgatcaacggacttatctcagctctcctaggaactaaaatgccagggccaggctgtgtatttctttcccaggaaattagctttccagcccctttatatattggagaagttgttttagcttctgcagaagtgaaaaagctgaagcggttcattgctattattgcagtgtcatgttctgtaatagaaagtaaaaagactgttatggaaggctgggttaaagttatggttccagaagcttccaaatcctgaaatagatgttttaaagatgcaacctcaaacaccaatgctgttgttaaagagcctatggggaattgctgctctttaccaaagaatggttgataggcccagaagcccatcttagttaggggaagggagcaggaagagggttgttcaaatgcccactttccagtttggccttatgcttcatgcagacttgagtgtatgcaggatttcattatctgcctgggttttttgtttgttttttgttttttaattcaagaagtaggctgggcccggtggctcatgcctgtaatcctggcactttgggaggctgcggcaggcggatcacttgaggtcaggagtccaagaccagcctggccaacatggtgaaaccccatctctaccaaaaaaaaaaaaaaaaaaaaagtgcaactagctgtgcttggtgacttggccctgtagtcccagttgcttgggaggctgaggtgggagaattgcttgggcctgagagctggaggttatggtgagaaactgagattgcaccactgcactgtagcctgagtgacagagcgagaccctgtctcaagaaagaagtattgggaaggttatttaaagactctacttttaaatcaggcgtggcagctcacgcctgtaatcccagcattttgggaggctgaggcaggcgaatcacttgaggtcaggagttcaagaccagcctggccaacatgtgaaaccccatctctactaaaaatacaaaaactaaccgggcatggtggcgggcacctgtaatcccagctacttgggaggctgaggcaggagaatctcttgaacctgggaggttgcagtgagctgaaatcacaccactgcacttcagcctgggtgacagagcaaaactccacctcaaaaaaaaaaaaaagattctacttttagaaattcagacctagatagatttgcatttggataacaaatccctacctatagccatgtggaagcagcttgtcactgtattttaactgtgtaacaattattgaaggcgaaaatagaagttgggtcatctttgaacacctaccttttatcaatgaatatttttagactgttcttcagtatctgagtcagagtttattgtaatttgttatttacaccaaggtggcatcttagtctaccttcagtgagacttgcgtttcaggggaggggcgtatgtgcatcctcggtctcagttatgtaaacggtctgatctgtaaaatagtggtagcacatgccatgtgggatagttggtggagatgatagatggagttaagcacagggcccagcctgtcagcagtagctactattattgttgcccatttcccctgcaactgaggtgagaggttttcctgagtttgaagctgactggcccacagttaaacgtaacagaccagtttttcagggtgtcagccaacctctattagtgttcttaagtacagtttctgttataaaagttcagattattccttgaaaatttggatctacctcccattattatgagtaatacatgcttatagtaaaaaaaaaaaaattgtaagaaataaatattaagaagatt

SEQ ID NO: 9507 - protein, 124 aa, Homo sapiens; identical to SEQ ID NO: 804

SEQ ID NO: 9508 - DNA, 3241 bp, Homo sapiens
gtggggcgggacgaggagaagccaaacgtaaagacaccaggagtttctcgggcccagctgtggctgctgccggggagccccaagccttggcgggtccttgcggcgaataggagtctggtcaggcgtcaggctagtccgacgaagagtgggtgtgatcagcactggaaaagatgcctgcccctgctgccacatatgaaagagtagtttacaaaaacccttccgagtaccactacatgaaagtctgcctagaatttcaagattgtggagttggactgaatgctgcacagttcaaacagctgcttatttcggctgtgaaggacctgtttggggaggttgatgccgccttacctttggacatcctaacctatgaagagaagaccttgtcagccatcttgagaatatgtagcagtggtcttgtcaaattgtggagctctttgaccctgttaggatcctataaaggcaaaaaatgtgctttccgggtgattcaggtttctccatttcttcttgcattatctggtaatagtagggaactagtattggattgaatgaatagtcttccattttggaaacgttcatccactctcatatttattttttggtgcctgcatgtttgaagactgaagcaggctaaaagctcttgatgaaatttgagggtgctgaagatgttcccactaatttccagccatcacctttggtggggtgggcttcggaggacagtctgtctgaacctgccagtgctgaccctgcagcactttcagcatatgcacatcaaagttggagaccgcgctgaacttaggagggccttcacacagactgatgtggctaccttctcagaattaacaggggatgtcaatcctttgcatttgaatgaagactttgcaaaacacaccaagtttggaaatacaattgtacatggagttttgatcaacggacttatctcagctctcctaggaactaaaatgccagggccaggctgtgtatttctttcccaggaaattagctttccagcccctttatatattggagaagttgttttagcttctgcagaagtgaaaaagctgaagcggttcattgctattattgcagtgtcatgttctgtaatagaaagtaaaaagactgttatggaaggctgggttaaagttatggttccagaagcttccaaatcctgaaatagatgttttaaagatgcaacctcaaacaccaatgctgttgttaaagagcctatggggaattgctgctctttaccaaagaatggttgataggcccagaagcccatcttagttaggggaagggagcaggaagagggttgttcaaatgcccactttccagtttggccttatgcttcatgcagacttgagtgtatgcaggatttcattatctgcctgggttttttgtttgttttttgttttttaattcaagaagtaggctgggcccggtggctcatgcctgtaatcctggcactttgggaggctgcggcaggcggatcacttgaggtcaggagtccaagaccagcctggccaacatggtgaaaccccatctctaccaaaaaaaaaaaaaaaaaaaaagtgcaactagctgtgcttggtgacttggccctgtagtcccagttgcttgggaggctgaggtgggagaattgcttgggcctgagagctggaggttatggtgagaaactgagattgcaccactgcactgtagcctgagtgacagagcgagaccctgtctcaagaaagaagtattgggaaggttatttaaagactctacttttaaatcaggcgtggcagctcacgcctgtaatcccagcattttgggaggctgaggcaggcgaatcacttgaggtcaggagttcaagaccagcctggccaacatgtgaaaccccatctctactaaaaatacaaaaactaaccgggcatggtggcgggcacctgtaatcccagctacttgggaggctgaggcaggagaatctcttgaacctgggaggttgcagtgagctgaaatcacaccactgcacttcagcctgggtgacagagcaaaactccacctcaaaaaaaaaaaaaagattctacttttagaaattcagacctagatagatttgcatttggataacaaatccctacctatagccatgtggaagcagcttgtcactgtattttaactgtgtaacaattattgaaggcgaaaatagaagttgggtcatctttgaacacctaccttttatcaatgaatatttttagactgttcttcagtatctgagtcagagtttattgtaatttgttatttacaccaaggtggcatcttagtctaccttcagtgagacttgcgtttcaggggaggggcgtatgtgcatcctcggtctcagttatgtaaacggtctgatctgtaaaatagtggtagcacatgccatgtgggatagttggtggagatgatagatggagttaagcacagggcccagcctgtcagcagtagctactattattgttgcccatttcccctgcaactgaggtgagaggttttcctgagtttgaagctgactggcccacagttaaacgtaacagaccagtttttcagggtgtcagccaacctctattagtgttcttaagtacagtttctgttataaaagttcagattattccttgaaaatttggatctacctcccattattatgagtaatacatgcttatagtaaaaaaaaaaaaattgtaagaaataaatattaagaagattatggaggccaaattcttaagactttgggggctggggtcagggaggttatattgaaggggagatgtgcctaacatgttactactaaatggccatcccaacacagccaacacttttgtttcccatttttttttgtttcccgttttttaataaaattgagatataattcacataccataaaattcaccttttaaaagtgtacagtttagtggttttcagaatatccacaaagttgtacaaccatcaccaaatcaattttttatagcatttttcatcacccccaaaagaacctcccattagcagtcaatccatttctctcctccagtctttgggaatcaccagtctactttctgtctctatgggtttccctgttctggacatttcataaaagttcatacaatgtatgatcctttggaactggcttctttgatatagcatgttttcagggttcatccatgttacagcatgtatcagtacatcattttattttatggctgaataatattccattgtatttacccat

SEQ ID NO: 9509 - protein, 124 aa, Homo sapiens; identical to SEQ ID NO: 804

SEQ ID NO: 9510 - DNA, 1128 bp, Homo sapiens
ggacgaggagaagccaaacgtaaagacaccaggagtttctcgggcccagctgtggctgctgccggggagccccaagccttggcgggtccttgcggcgaataggagtctggtcaggcgtcaggctagtccgacgaagagtggagaatttcaagattgtggagttggactgaatgctgcacagttcaaacagctgcttatttcggctgtgaaggacctgtttggggaggctggagtgcaatggcacgatcttggctcaccgcaccctccgcctcccaggttcaagcgattctcctgcctcagcctcgcaagtagctgggattacaggttgatgccgccttacctttggacatcctaacctatgaagagaagaccttgtcagccatcttgagaatatgtagcagtggtcttgtcaaattgtggagctctttgaccctgttaggatcctataaaggcaaaaaatgtgctttccgggtgattcaggtttctccatttcttcttgcattatctggtaatagtagggaactagtattggattgaatgaatagtcttccattttggaaacgttcatccactctcatatttattttttggtgcctgcatgtttgaagactgaagcaggctaaaagctcttgatgaaatttgagggtgctgaagatgttcccactaatttccagccatcacctttggtggggtgggcttcggaggacagtctgtctgaacctgccagtgctgaccctgcagcactttcagcatatgcacatcaaagttggagaccgcgctgaacttaggagggccttcacacagactgatgtggctaccttctcagaattaacaggggatgtcaatcctttgcatttgaatgaagactttgcaaaacacaccaagtttggaaatacaattgtacatggagttttgatcaacggacttatctcagctctcctaggaactaaaatgccagggccaggctgtgtatttctttcccaggaaattagctttccagcccctttatatattggagaagttgttttagcttctgcagaagtgaaaaagctgaagcggttcattgctattattgcagtgtcatgttctgtaatagaaagtaaaaagactgttatggaaggctgggtt

SEQ ID NO: 9511 - protein, 157 aa, Homo sapiens; identical to SEQ ID NO: 9485

SEQ ID NO: 9512 - DNA, 2713 bp, Homo sapiens
ggacgaggagaagccaaacgtaaagacaccaggagtttctcgggcccagctgtggctgctgccggggagccccaagccttggcgggtccttgcggcgaataggagtctggtcaggcgtcaggctagtccgacgaagagtggagaatttcaagattgtggagttggactgaatgctgcacagttcaaacagctgcttatttcggctgtgaaggacctgtttggggaggctggagtgcaatggcacgatcttggctcaccgcaccctccgcctcccaggttcaagcgattctcctgcctcagcctcgcaagtagctgggattacaggttgatgccgccttacctttggacatcctaacctatgaagagaagaccttgtcagccatcttgagaatatgtagcagtggtcttgtcaaattgtggagctctttgaccctgttaggatcctataaaggcaaaaaatgtgctttccgggtgattcaggtttctccatttcttcttgcattatctggtaatagtagggaactagtattggattgaatgaatagtcttccattttggaaacgttcatccactctcatatttattttttggtgcctgcatgtttgaagactgaagcaggctaaaagctcttgatgaaatttgagggtgctgaagatgttcccactaatttccagccatcacctttggtggggtgggcttcggaggacagtctgtctgaacctgccagtgctgaccctgcagcactttcagcatatgcacatcaaagttggagaccgcgctgaacttaggagggccttcacacagactgatgtggctaccttctcagaattaacaggggatgtcaatcctttgcatttgaatgaagactttgcaaaacacaccaagtttggaaatacaattgtacatggagttttgatcaacggacttatctcagctctcctaggaactaaaatgccagggccaggctgtgtatttctttcccaggaaattagctttccagcccctttatatattggagaagttgttttagcttctgcagaagtgaaaaagctgaagcggttcattgctattattgcagtgtcatgttctgtaatagaaagtaaaaagactgttatggaaggctgggttaaagttatggttccagaagcttccaaatcctgaaatagatgttttaaagatgcaacctcaaacaccaatgctgttgttaaagagcctatggggaattgctgctctttaccaaagaatggttgataggcccagaagcccatcttagttaggggaagggagcaggaagagggttgttcaaatgcccactttccagtttggccttatgcttcatgcagacttgagtgtatgcaggatttcattatctgcctgggttttttgtttgttttttgttttttaattcaagaagtaggctgggcccggtggctcatgcctgtaatcctggcactttgggaggctgcggcaggcggatcacttgaggtcaggagtccaagaccagcctggccaacatggtgaaaccccatctctaccaaaaaaaaaaaaaaaaaaaaagtgcaactagctgtgcttggtgacttggccctgtagtcccagttgcttgggaggctgaggtgggagaattgcttgggcctgagagctggaggttatggtgagaaactgagattgcaccactgcactgtagcctgagtgacagagcgagaccctgtctcaagaaagaagtattgggaaggttatttaaagactctacttttaaatcaggcgtggcagctcacgcctgtaatcccagcattttgggaggctgaggcaggcgaatcacttgaggtcaggagttcaagaccagcctggccaacatgtgaaaccccatctctactaaaaatacaaaaactaaccgggcatggtggcgggcacctgtaatcccagctacttgggaggctgaggcaggagaatctcttgaacctgggaggttgcagtgagctgaaatcacaccactgcacttcagcctgggtgacagagcaaaactccacctcaaaaaaaaaaaaaagattctacttttagaaattcagacctagatagatttgcatttggataacaaatccctacctatagccatgtggaagcagcttgtcactgtattttaactgtgtaacaattattgaaggcgaaaatagaagttgggtcatctttgaacacctaccttttatcaatgaatatttttagactgttcttcagtatctgagtcagagtttattgtaatttgttatttacaccaaggtggcatcttagtctaccttcagtgagacttgcgtttcaggggaggggcgtatgtgcatcctcggtctcagttatgtaaacggtctgatctgtaaaatagtggtagcacatgccatgtgggatagttggtggagatgatagatggagttaagcacagggcccagcctgtcagcagtagctactattattgttgcccatttcccctgcaactgaggtgagaggttttcctgagtttgaagctgactggcccacagttaaacgtaacagaccagtttttcagggtgtcagccaacctctattagtgttcttaagtacagtttctgttataaaagttcagattattccttgaaaatttggatctacctcccattattatgagtaatacatgcttatagtaaaaaaaaaaaaattgtaagaaataaatattaagaagatt

SEQ ID NO: 9513 - protein, 168 aa, Homo sapiens [sequence omitted]

SEQ ID NO: 9514 - DNA, 3233 bp, Homo sapiens
ggacgaggagaagccaaacgtaaagacaccaggagtttctcgggcccagctgtggctgctgccggggagccccaagccttggcgggtccttgcggcgaataggagtctggtcaggcgtcaggctagtccgacgaagagtggagaatttcaagattgtggagttggactgaatgctgcacagttcaaacagctgcttatttcggctgtgaaggacctgtttggggaggctggagtgcaatggcacgatcttggctcaccgcaccctccgcctcccaggttcaagcgattctcctgcctcagcctcgcaagtagctgggattacaggttgatgccgccttacctttggacatcctaacctatgaagagaagaccttgtcagccatcttgagaatatgtagcagtggtcttgtcaaattgtggagctctttgaccctgttaggatcctataaaggcaaaaaatgtgctttccgggtgattcaggtttctccatttcttcttgcattatctggtaatagtagggaactagtattggattgaatgaatagtcttccattttggaaacgttcatccactctcatatttattttttggtgcctgcatgtttgaagactgaagcaggctaaaagctcttgatgaaatttgagggtgctgaagatgttcccactaatttccagccatcacctttggtggggtgggcttcggaggacagtctgtctgaacctgccagtgctgaccctgcagcactttcagcatatgcacatcaaagttggagaccgcgctgaacttaggagggccttcacacagactgatgtggctaccttctcagaattaacaggggatgtcaatcctttgcatttgaatgaagactttgcaaaacacaccaagtttggaaatacaattgtacatggagttttgatcaacggacttatctcagctctcctaggaactaaaatgccagggccaggctgtgtatttctttcccaggaaattagctttccagcccctttatatattggagaagttgttttagcttctgcagaagtgaaaaagctgaagcggttcattgctattattgcagtgtcatgttctgtaatagaaagtaaaaagactgttatggaaggctgggttaaagttatggttccagaagcttccaaatcctgaaatagatgttttaaagatgcaacctcaaacaccaatgctgttgttaaagagcctatggggaattgctgctctttaccaaagaatggttgataggcccagaagcccatcttagttaggggaagggagcaggaagagggttgttcaaatgcccactttccagtttggccttatgcttcatgcagacttgagtgtatgcaggatttcattatctgcctgggttttttgtttgttttttgttttttaattcaagaagtaggctgggcccggtggctcatgcctgtaatcctggcactttgggaggctgcggcaggcggatcacttgaggtcaggagtccaagaccagcctggccaacatggtgaaaccccatctctaccaaaaaaaaaaaaaaaaaaaaagtgcaactagctgtgcttggtgacttggccctgtagtcccagttgcttgggaggctgaggtgggagaattgcttgggcctgagagctggaggttatggtgagaaactgagattgcaccactgcactgtagcctgagtgacagagcgagaccctgtctcaagaaagaagtattgggaaggttatttaaagactctacttttaaatcaggcgtggcagctcacgcctgtaatcccagcattttgggaggctgaggcaggcgaatcacttgaggtcaggagttcaagaccagcctggccaacatgtgaaaccccatctctactaaaaatacaaaaactaaccgggcatggtggcgggcacctgtaatcccagctacttgggaggctgaggcaggagaatctcttgaacctgggaggttgcagtgagctgaaatcacaccactgcacttcagcctgggtgacagagcaaaactccacctcaaaaaaaaaaaaaagattctacttttagaaattcagacctagatagatttgcatttggataacaaatccctacctatagccatgtggaagcagcttgtcactgtattttaactgtgtaacaattattgaaggcgaaaatagaagttgggtcatctttgaacacctaccttttatcaatgaatatttttagactgttcttcagtatctgagtcagagtttattgtaatttgttatttacaccaaggtggcatcttagtctaccttcagtgagacttgcgtttcaggggaggggcgtatgtgcatcctcggtctcagttatgtaaacggtctgatctgtaaaatagtggtagcacatgccatgtgggatagttggtggagatgatagatggagttaagcacagggcccagcctgtcagcagtagctactattattgttgcccatttcccctgcaactgaggtgagaggttttcctgagtttgaagctgactggcccacagttaaacgtaacagaccagtttttcagggtgtcagccaacctctattagtgttcttaagtacagtttctgttataaaagttcagattattccttgaaaatttggatctacctcccattattatgagtaatacatgcttatagtaaaaaaaaaaaaattgtaagaaataaatattaagaagattatggaggccaaattcttaagactttgggggctggggtcagggaggttatattgaaggggagatgtgcctaacatgttactactaaatggccatcccaacacagccaacacttttgtttcccatttttttttgtttcccgttttttaataaaattgagatataattcacataccataaaattcaccttttaaaagtgtacagtttagtggttttcagaatatccacaaagttgtacaaccatcaccaaatcaattttttatagcatttttcatcacccccaaaagaacctcccattagcagtcaatccatttctctcctccagtctttgggaatcaccagtctactttctgtctctatgggtttccctgttctggacatttcataaaagttcatacaatgtatgatcctttggaactggcttctttgatatagcatgttttcagggttcatccatgttacagcatgtatcagtacatcattttattttatggctgaataatattccattgtatttacccat

SEQ ID NO: 9515 - protein, 168 aa, Homo sapiens [sequence omitted]

SEQ ID NO: 9516 - DNA, 1242 bp, Homo sapiens
aagacaccaggagtttctcgggcccagctgtggctgctgccggggagccccaagccttggcgggtccttgcggcgaataggagtctggtcaggcgtcaggctagtccgacgaagagtgggtaggtggaagccttccaaagagcggcggttgtctgggagccgtctcagttggccgcgacccgggcgcatgcgcggggcgggcggtgcgccttgggtagcttgtcctctccgaccccgggcgctgagggcctctgtacggcgccgcgtagggtctcggccgcagaacgtggccgagaggcccgggcgagacttcgggaccgtgtcctgagcgctctccatgcgcccggcgcgagagaatttcaagattgtggagttggactgaatgctgcacagttcaaacagctgcttatttcggctgtgaaggacctgtttggggaggttgatgccgccttacctttggacatcctaacctatgaagagaagaccttgtcagccatcttgagaatatgtagcagtggtcttgtcaaattgtggagctctttgaccctgttaggatcctataaaggcaaaaaatgtgctttccgggtgattcaggtttctccatttcttcttgcattatctggtaatagtagggaactagtattggattgaatgaatagtcttccattttggaaacgttcatccactctcatatttattttttggtgcctgcatgtttgaagactgaagcaggctaaaagctcttgatgaaatttgagggtgctgaagatgttcccactaatttccagccatcacctttggtggggtgggcttcggaggacagtctgtctgaacctgccagtgctgaccctgcagcactttcagcatatgcacatcaaagttggagaccgcgctgaacttaggagggccttcacacagactgatgtggctaccttctcagaattaacaggggatgtcaatcctttgcatttgaatgaagactttgcaaaacacaccaagtttggaaatacaattgtacatggagttttgatcaacggacttatctcagctctcctaggaactaaaatgccagggccaggctgtgtatttctttcccaggaaattagctttccagcccctttatatattggagaagttgttttagcttctgcagaagtgaaaaagctgaagcggttcattgctattattgcagtgtcatgttctgtaatagaaagtaaaaagactgttatggaaggctgggtt

SEQ ID NO: 9517 - protein, 157 aa, Homo sapiens; identical to SEQ ID NO: 9485

SEQ ID NO: 9518 - DNA, 2827 bp, Homo sapiens
aagacaccaggagtttctcgggcccagctgtggctgctgccggggagccccaagccttggcgggtccttgcggcgaataggagtctggtcaggcgtcaggctagtccgacgaagagtgggtaggtggaagccttccaaagagcggcggttgtctgggagccgtctcagttggccgcgacccgggcgcatgcgcggggcgggcggtgcgccttgggtagcttgtcctctccgaccccgggcgctgagggcctctgtacggcgccgcgtagggtctcggccgcagaacgtggccgagaggcccgggcgagacttcgggaccgtgtcctgagcgctctccatgcgcccggcgcgagagaatttcaagattgtggagttggactgaatgctgcacagttcaaacagctgcttatttcggctgtgaaggacctgtttggggaggttgatgccgccttacctttggacatcctaacctatgaagagaagaccttgtcagccatcttgagaatatgtagcagtggtcttgtcaaattgtggagctctttgaccctgttaggatcctataaaggcaaaaaatgtgctttccgggtgattcaggtttctccatttcttcttgcattatctggtaatagtagggaactagtattggattgaatgaatagtcttccattttggaaacgttcatccactctcatatttattttttggtgcctgcatgtttgaagactgaagcaggctaaaagctcttgatgaaatttgagggtgctgaagatgttcccactaatttccagccatcacctttggtggggtgggcttcggaggacagtctgtctgaacctgccagtgctgaccctgcagcactttcagcatatgcacatcaaagttggagaccgcgctgaacttaggagggccttcacacagactgatgtggctaccttctcagaattaacaggggatgtcaatcctttgcatttgaatgaagactttgcaaaacacaccaagtttggaaatacaattgtacatggagttttgatcaacggacttatctcagctctcctaggaactaaaatgccagggccaggctgtgtatttctttcccaggaaattagctttccagcccctttatatattggagaagttgttttagcttctgcagaagtgaaaaagctgaagcggttcattgctattattgcagtgtcatgttctgtaatagaaagtaaaaagactgttatggaaggctgggttaaagttatggttccagaagcttccaaatcctgaaatagatgttttaaagatgcaacctcaaacaccaatgctgttgttaaagagcctatggggaattgctgctctttaccaaagaatggttgataggcccagaagcccatcttagttaggggaagggagcaggaagagggttgttcaaatgcccactttccagtttggccttatgcttcatgcagacttgagtgtatgcaggatttcattatctgcctgggttttttgtttgttttttgttttttaattcaagaagtaggctgggcccggtggctcatgcctgtaatcctggcactttgggaggctgcggcaggcggatcacttgaggtcaggagtccaagaccagcctggccaacatggtgaaaccccatctctaccaaaaaaaaaaaaaaaaaaaaagtgcaactagctgtgcttggtgacttggccctgtagtcccagttgcttgggaggctgaggtgggagaattgcttgggcctgagagctggaggttatggtgagaaactgagattgcaccactgcactgtagcctgagtgacagagcgagaccctgtctcaagaaagaagtattgggaaggttatttaaagactctacttttaaatcaggcgtggcagctcacgcctgtaatcccagcattttgggaggctgaggcaggcgaatcacttgaggtcaggagttcaagaccagcctggccaacatgtgaaaccccatctctactaaaaatacaaaaactaaccgggcatggtggcgggcacctgtaatcccagctacttgggaggctgaggcaggagaatctcttgaacctgggaggttgcagtgagctgaaatcacaccactgcacttcagcctgggtgacagagcaaaactccacctcaaaaaaaaaaaaaagattctacttttagaaattcagacctagatagatttgcatttggataacaaatccctacctatagccatgtggaagcagcttgtcactgtattttaactgtgtaacaattattgaaggcgaaaatagaagttgggtcatctttgaacacctaccttttatcaatgaatatttttagactgttcttcagtatctgagtcagagtttattgtaatttgttatttacaccaaggtggcatcttagtctaccttcagtgagacttgcgtttcaggggaggggcgtatgtgcatcctcggtctcagttatgtaaacggtctgatctgtaaaatagtggtagcacatgccatgtgggatagttggtggagatgatagatggagttaagcacagggcccagcctgtcagcagtagctactattattgttgcccatttcccctgcaactgaggtgagaggttttcctgagtttgaagctgactggcccacagttaaacgtaacagaccagtttttcagggtgtcagccaacctctattagtgttcttaagtacagtttctgttataaaagttcagattattccttgaaaatttggatctacctcccattattatgagtaatacatgcttatagtaaaaaaaaaaaaattgtaagaaataaatattaagaagatt

SEQ ID NO: 9519 - protein, 168 aa, Homo sapiens [sequence omitted]

SEQ ID NO: 9520 - DNA, 3347 bp, Homo sapiens
aagacaccaggagtttctcgggcccagctgtggctgctgccggggagccccaagccttggcgggtccttgcggcgaataggagtctggtcaggcgtcaggctagtccgacgaagagtgggtaggtggaagccttccaaagagcggcggttgtctgggagccgtctcagttggccgcgacccgggcgcatgcgcggggcgggcggtgcgccttgggtagcttgtcctctccgaccccgggcgctgagggcctctgtacggcgccgcgtagggtctcggccgcagaacgtggccgagaggcccgggcgagacttcgggaccgtgtcctgagcgctctccatgcgcccggcgcgagagaatttcaagattgtggagttggactgaatgctgcacagttcaaacagctgcttatttcggctgtgaaggacctgtttggggaggttgatgccgccttacctttggacatcctaacctatgaagagaagaccttgtcagccatcttgagaatatgtagcagtggtcttgtcaaattgtggagctctttgaccctgttaggatcctataaaggcaaaaaatgtgctttccgggtgattcaggtttctccatttcttcttgcattatctggtaatagtagggaactagtattggattgaatgaatagtcttccattttggaaacgttcatccactctcatatttattttttggtgcctgcatgtttgaagactgaagcaggctaaaagctcttgatgaaatttgagggtgctgaagatgttcccactaatttccagccatcacctttggtggggtgggcttcggaggacagtctgtctgaacctgccagtgctgaccctgcagcactttcagcatatgcacatcaaagttggagaccgcgctgaacttaggagggccttcacacagactgatgtggctaccttctcagaattaacaggggatgtcaatcctttgcatttgaatgaagactttgcaaaacacaccaagtttggaaatacaattgtacatggagttttgatcaacggacttatctcagctctcctaggaactaaaatgccagggccaggctgtgtatttctttcccaggaaattagctttccagcccctttatatattggagaagttgttttagcttctgcagaagtgaaaaagctgaagcggttcattgctattattgcagtgtcatgttctgtaatagaaagtaaaaagactgttatggaaggctgggttaaagttatggttccagaagcttccaaatcctgaaatagatgttttaaagatgcaacctcaaacaccaatgctgttgttaaagagcctatggggaattgctgctctttaccaaagaatggttgataggcccagaagcccatcttagttaggggaagggagcaggaagagggttgttcaaatgcccactttccagtttggccttatgcttcatgcagacttgagtgtatgcaggatttcattatctgcctgggttttttgtttgttttttgttttttaattcaagaagtaggctgggcccggtggctcatgcctgtaatcctggcactttgggaggctgcggcaggcggatcacttgaggtcaggagtccaagaccagcctggccaacatggtgaaaccccatctctaccaaaaaaaaaaaaaaaaaaaaagtgcaactagctgtgcttggtgacttggccctgtagtcccagttgcttgggaggctgaggtgggagaattgcttgggcctgagagctggaggttatggtgagaaactgagattgcaccactgcactgtagcctgagtgacagagcgagaccctgtctcaagaaagaagtattgggaaggttatttaaagactctacttttaaatcaggcgtggcagctcacgcctgtaatcccagcattttgggaggctgaggcaggcgaatcacttgaggtcaggagttcaagaccagcctggccaacatgtgaaaccccatctctactaaaaatacaaaaactaaccgggcatggtggcgggcacctgtaatcccagctacttgggaggctgaggcaggagaatctcttgaacctgggaggttgcagtgagctgaaatcacaccactgcacttcagcctgggtgacagagcaaaactccacctcaaaaaaaaaaaaaagattctacttttagaaattcagacctagatagatttgcatttggataacaaatccctacctatagccatgtggaagcagcttgtcactgtattttaactgtgtaacaattattgaaggcgaaaatagaagttgggtcatctttgaacacctaccttttatcaatgaatatttttagactgttcttcagtatctgagtcagagtttattgtaatttgttatttacaccaaggtggcatcttagtctaccttcagtgagacttgcgtttcaggggaggggcgtatgtgcatcctcggtctcagttatgtaaacggtctgatctgtaaaatagtggtagcacatgccatgtgggatagttggtggagatgatagatggagttaagcacagggcccagcctgtcagcagtagctactattattgttgcccatttcccctgcaactgaggtgagaggttttcctgagtttgaagctgactggcccacagttaaacgtaacagaccagtttttcagggtgtcagccaacctctattagtgttcttaagtacagtttctgttataaaagttcagattattccttgaaaatttggatctacctcccattattatgagtaatacatgcttatagtaaaaaaaaaaaaattgtaagaaataaatattaagaagattatggaggccaaattcttaagactttgggggctggggtcagggaggttatattgaaggggagatgtgcctaacatgttactactaaatggccatcccaacacagccaacacttttgtttcccatttttttttgtttcccgttttttaataaaattgagatataattcacataccataaaattcaccttttaaaagtgtacagtttagtggttttcagaatatccacaaagttgtacaaccatcaccaaatcaattttttatagcatttttcatcacccccaaaagaacctcccattagcagtcaatccatttctctcctccagtctttgggaatcaccagtctactttctgtctctatgggtttccctgttctggacatttcataaaagttcatacaatgtatgatcctttggaactggcttctttgatatagcatgttttcagggttcatccatgttacagcatgtatcagtacatcattttattttatggctgaataatattccattgtatttacccat

SEQ ID NO: 9521 - protein, 168 aa, Homo sapiens [sequence omitted]

SEQ ID NO: 9522 - DNA, 1090 bp, Homo sapiens
taccagtctgtacaaaataatttcccaggtatcctctcctttaatgtcagaacagcctgcagagggcagtgctgtcatttgtaagtctttttttttttttttaattgcaaaaaatacgtgacataaaatttatcgtaagtagcattgagtacattcacaacgctgtgcagccatcaccactgtccatctcgtgaatgttgtagaatttcaagattgtggagttggactgaatgctgcacagttcaaacagctgcttatttcggctgtgaaggacctgtttggggaggttgatgccgccttacctttggacatcctaacctatgaagagaagaccttgtcagccatcttgagaatatgtagcagtggtcttgtcaaattgtggagctctttgaccctgttaggatcctataaaggcaaaaaatgtgctttccgggtgattcaggtttctccatttcttcttgcattatctggtaatagtagggaactagtattggattgaatgaatagtcttccattttggaaacgttcatccactctcatatttattttttggtgcctgcatgtttgaagactgaagcaggctaaaagctcttgatgaaatttgagggtgctgaagatgttcccactaatttccagccatcacctttggtggggtgggcttcggaggacagtctgtctgaacctgccagtgctgaccctgcagcactttcagcatatgcacatcaaagttggagaccgcgctgaacttaggagggccttcacacagactgatgtggctaccttctcagaattaacaggggatgtcaatcctttgcatttgaatgaagactttgcaaaacacaccaagtttggaaatacaattgtacatggagttttgatcaacggacttatctcagctctcctaggaactaaaatgccagggccaggctgtgtatttctttcccaggaaattagctttccagcccctttatatattggagaagttgttttagcttctgcagaagtgaaaaagctgaagcggttcattgctattattgcagtgtcatgttctgtaatagaaagtaaaaagactgttatggaaggctgggtt

SEQ ID NO: 9523 - protein, 157 aa, Homo sapiens; identical to SEQ ID NO: 9485

SEQ ID NO: 9524 - DNA, 2675 bp, Homo sapiens
taccagtctgtacaaaataatttcccaggtatcctctcctttaatgtcagaacagcctgcagagggcagtgctgtcatttgtaagtctttttttttttttttaattgcaaaaaatacgtgacataaaatttatcgtaagtagcattgagtacattcacaacgctgtgcagccatcaccactgtccatctcgtgaatgttgtagaatttcaagattgtggagttggactgaatgctgcacagttcaaacagctgcttatttcggctgtgaaggacctgtttggggaggttgatgccgccttacctttggacatcctaacctatgaagagaagaccttgtcagccatcttgagaatatgtagcagtggtcttgtcaaattgtggagctctttgaccctgttaggatcctataaaggcaaaaaatgtgctttccgggtgattcaggtttctccatttcttcttgcattatctggtaatagtagggaactagtattggattgaatgaatagtcttccattttggaaacgttcatccactctcatatttattttttggtgcctgcatgtttgaagactgaagcaggctaaaagctcttgatgaaatttgagggtgctgaagatgttcccactaatttccagccatcacctttggtggggtgggcttcggaggacagtctgtctgaacctgccagtgctgaccctgcagcactttcagcatatgcacatcaaagttggagaccgcgctgaacttaggagggccttcacacagactgatgtggctaccttctcagaattaacaggggatgtcaatcctttgcatttgaatgaagactttgcaaaacacaccaagtttggaaatacaattgtacatggagttttgatcaacggacttatctcagctctcctaggaactaaaatgccagggccaggctgtgtatttctttcccaggaaattagctttccagcccctttatatattggagaagttgttttagcttctgcagaagtgaaaaagctgaagcggttcattgctattattgcagtgtcatgttctgtaatagaaagtaaaaagactgttatggaaggctgggttaaagttatggttccagaagcttccaaatcctgaaatagatgttttaaagatgcaacctcaaacaccaatgctgttgttaaagagcctatggggaattgctgctctttaccaaagaatggttgataggcccagaagcccatcttagttaggggaagggagcaggaagagggttgttcaaatgcccactttccagtttggccttatgcttcatgcagacttgagtgtatgcaggatttcattatctgcctgggttttttgtttgttttttgttttttaattcaagaagtaggctgggcccggtggctcatgcctgtaatcctggcactttgggaggctgcggcaggcggatcacttgaggtcaggagtccaagaccagcctggccaacatggtgaaaccccatctctaccaaaaaaaaaaaaaaaaaaaaagtgcaactagctgtgcttggtgacttggccctgtagtcccagttgcttgggaggctgaggtgggagaattgcttgggcctgagagctggaggttatggtgagaaactgagattgcaccactgcactgtagcctgagtgacagagcgagaccctgtctcaagaaagaagtattgggaaggttatttaaagactctacttttaaatcaggcgtggcagctcacgcctgtaatcccagcattttgggaggctgaggcaggcgaatcacttgaggtcaggagttcaagaccagcctggccaacatgtgaaaccccatctctactaaaaatacaaaaactaaccgggcatggtggcgggcacctgtaatcccagctacttgggaggctgaggcaggagaatctcttgaacctgggaggttgcagtgagctgaaatcacaccactgcacttcagcctgggtgacagagcaaaactccacctcaaaaaaaaaaaaaagattctacttttagaaattcagacctagatagatttgcatttggataacaaatccctacctatagccatgtggaagcagcttgtcactgtattttaactgtgtaacaattattgaaggcgaaaatagaagttgggtcatctttgaacacctaccttttatcaatgaatatttttagactgttcttcagtatctgagtcagagtttattgtaatttgttatttacaccaaggtggcatcttagtctaccttcagtgagacttgcgtttcaggggaggggcgtatgtgcatcctcggtctcagttatgtaaacggtctgatctgtaaaatagtggtagcacatgccatgtgggatagttggtggagatgatagatggagttaagcacagggcccagcctgtcagcagtagctactattattgttgcccatttcccctgcaactgaggtgagaggttttcctgagtttgaagctgactggcccacagttaaacgtaacagaccagtttttcagggtgtcagccaacctctattagtgttcttaagtacagtttctgttataaaagttcagattattccttgaaaatttggatctacctcccattattatgagtaatacatgcttatagtaaaaaaaaaaaaattgtaagaaataaatattaagaagatt

SEQ ID NO: 9525 - protein, 168 aa, Homo sapiens [sequence omitted]

SEQ ID NO: 9526 - DNA, 3195 bp, Homo sapiens
taccagtctgtacaaaataatttcccaggtatcctctcctttaatgtcagaacagcctgcagagggcagtgctgtcatttgtaagtctttttttttttttttaattgcaaaaaatacgtgacataaaatttatcgtaagtagcattgagtacattcacaacgctgtgcagccatcaccactgtccatctcgtgaatgttgtagaatttcaagattgtggagttggactgaatgctgcacagttcaaacagctgcttatttcggctgtgaaggacctgtttggggaggttgatgccgccttacctttggacatcctaacctatgaagagaagaccttgtcagccatcttgagaatatgtagcagtggtcttgtcaaattgtggagctctttgaccctgttaggatcctataaaggcaaaaaatgtgctttccgggtgattcaggtttctccatttcttcttgcattatctggtaatagtagggaactagtattggattgaatgaatagtcttccattttggaaacgttcatccactctcatatttattttttggtgcctgcatgtttgaagactgaagcaggctaaaagctcttgatgaaatttgagggtgctgaagatgttcccactaatttccagccatcacctttggtggggtgggcttcggaggacagtctgtctgaacctgccagtgctgaccctgcagcactttcagcatatgcacatcaaagttggagaccgcgctgaacttaggagggccttcacacagactgatgtggctaccttctcagaattaacaggggatgtcaatcctttgcatttgaatgaagactttgcaaaacacaccaagtttggaaatacaattgtacatggagttttgatcaacggacttatctcagctctcctaggaactaaaatgccagggccaggctgtgtatttctttcccaggaaattagctttccagcccctttatatattggagaagttgttttagcttctgcagaagtgaaaaagctgaagcggttcattgctattattgcagtgtcatgttctgtaatagaaagtaaaaagactgttatggaaggctgggttaaagttatggttccagaagcttccaaatcctgaaatagatgttttaaagatgcaacctcaaacaccaatgctgttgttaaagagcctatggggaattgctgctctttaccaaagaatggttgataggcccagaagcccatcttagttaggggaagggagcaggaagagggttgttcaaatgcccactttccagtttggccttatgcttcatgcagacttgagtgtatgcaggatttcattatctgcctgggttttttgtttgttttttgttttttaattcaagaagtaggctgggcccggtggctcatgcctgtaatcctggcactttgggaggctgcggcaggcggatcacttgaggtcaggagtccaagaccagcctggccaacatggtgaaaccccatctctaccaaaaaaaaaaaaaaaaaaaaagtgcaactagctgtgcttggtgacttggccctgtagtcccagttgcttgggaggctgaggtgggagaattgcttgggcctgagagctggaggttatggtgagaaactgagattgcaccactgcactgtagcctgagtgacagagcgagaccctgtctcaagaaagaagtattgggaaggttatttaaagactctacttttaaatcaggcgtggcagctcacgcctgtaatcccagcattttgggaggctgaggcaggcgaatcacttgaggtcaggagttcaagaccagcctggccaacatgtgaaaccccatctctactaaaaatacaaaaactaaccgggcatggtggcgggcacctgtaatcccagctacttgggaggctgaggcaggagaatctcttgaacctgggaggttgcagtgagctgaaatcacaccactgcacttcagcctgggtgacagagcaaaactccacctcaaaaaaaaaaaaaagattctacttttagaaattcagacctagatagatttgcatttggataacaaatccctacctatagccatgtggaagcagcttgtcactgtattttaactgtgtaacaattattgaaggcgaaaatagaagttgggtcatctttgaacacctaccttttatcaatgaatatttttagactgttcttcagtatctgagtcagagtttattgtaatttgttatttacaccaaggtggcatcttagtctaccttcagtgagacttgcgtttcaggggaggggcgtatgtgcatcctcggtctcagttatgtaaacggtctgatctgtaaaatagtggtagcacatgccatgtgggatagttggtggagatgatagatggagttaagcacagggcccagcctgtcagcagtagctactattattgttgcccatttcccctgcaactgaggtgagaggttttcctgagtttgaagctgactggcccacagttaaacgtaacagaccagtttttcagggtgtcagccaacctctattagtgttcttaagtacagtttctgttataaaagttcagattattccttgaaaatttggatctacctcccattattatgagtaatacatgcttatagtaaaaaaaaaaaaattgtaagaaataaatattaagaagattatggaggccaaattcttaagactttgggggctggggtcagggaggttatattgaaggggagatgtgcctaacatgttactactaaatggccatcccaacacagccaacacttttgtttcccatttttttttgtttcccgttttttaataaaattgagatataattcacataccataaaattcaccttttaaaagtgtacagtttagtggttttcagaatatccacaaagttgtacaaccatcaccaaatcaattttttatagcatttttcatcacccccaaaagaacctcccattagcagtcaatccatttctctcctccagtctttgggaatcaccagtctactttctgtctctatgggtttccctgttctggacatttcataaaagttcatacaatgtatgatcctttggaactggcttctttgatatagcatgttttcagggttcatccatgttacagcatgtatcagtacatcattttattttatggctgaataatattccattgtatttacccat

SEQ ID NO: 9527 - protein, 168 aa, Homo sapiens [sequence omitted]

SEQ ID NO: 9528 - DNA, 1242 bp, Homo sapiens
gctggatgtggtggcacgtgcctatactcccagctactcaggagtctgaggcaggaggatcacctgagcctcgagagccagaggtggaggctgcagtgaactctgattgtaccactgcacttcagcctaggtgacagggtgagaccctgccttaaaacaaacaaacaaaaaaaacccaaataggccaaattctcatcaaaactctgaaaaatagcatgtgcattggtcatttctagccctcttgacttactgtaggtgtgatcagcactggaaaagatgcctgcccctgctgccacatatgaaagagtagtttacaaaaacccttccgagtaccactacatgaaagtctgcctagaatttcaagattgtggagttggactgaatgctgcacagttcaaacagctgcttatttcggctgtgaaggacctgtttggggaggttgatgccgccttacctttggacatcctaacctatgaagagaagaccttgtcagccatcttgagaatatgtagcagtggtcttgtcaaattgtggagctctttgaccctgttaggatcctataaaggcaaaaaatgtgctttccgggtgattcaggtttctccatttcttcttgcattatctggtaatagtagggaactagtattggattgaatgaatagtcttccattttggaaacgttcatccactctcatatttattttttggtgcctgcatgtttgaagactgaagcaggctaaaagctcttgatgaaatttgagggtgctgaagatgttcccactaatttccagccatcacctttggtggggtgggcttcggaggacagtctgtctgaacctgccagtgctgaccctgcagcactttcagcatatgcacatcaaagttggagaccgcgctgaacttaggagggccttcacacagactgatgtggctaccttctcagaattaacaggggatgtcaatcctttgcatttgaatgaagactttgcaaaacacaccaagtttggaaatacaattgtacatggagttttgatcaacggacttatctcagctctcctaggaactaaaatgccagggccaggctgtgtatttctttcccaggaaattagctttccagcccctttatatattggagaagttgttttagcttctgcagaagtgaaaaagctgaagcggttcattgctattattgcagtgtcatgttctgtaatagaaagtaaaaagactgttatggaaggctgggtt

SEQ ID NO: 9529 - protein, 124 aa, Homo sapiens; identical to SEQ ID NO: 804

SEQ ID NO: 9530 - DNA, 2827 bp, Homo sapiens
gctggatgtggtggcacgtgcctatactcccagctactcaggagtctgaggcaggaggatcacctgagcctcgagagccagaggtggaggctgcagtgaactctgattgtaccactgcacttcagcctaggtgacagggtgagaccctgccttaaaacaaacaaacaaaaaaaacccaaataggccaaattctcatcaaaactctgaaaaatagcatgtgcattggtcatttctagccctcttgacttactgtaggtgtgatcagcactggaaaagatgcctgcccctgctgccacatatgaaagagtagtttacaaaaacccttccgagtaccactacatgaaagtctgcctagaatttcaagattgtggagttggactgaatgctgcacagttcaaacagctgcttatttcggctgtgaaggacctgtttggggaggttgatgccgccttacctttggacatcctaacctatgaagagaagaccttgtcagccatcttgagaatatgtagcagtggtcttgtcaaattgtggagctctttgaccctgttaggatcctataaaggcaaaaaatgtgctttccgggtgattcaggtttctccatttcttcttgcattatctggtaatagtagggaactagtattggattgaatgaatagtcttccattttggaaacgttcatccactctcatatttattttttggtgcctgcatgtttgaagactgaagcaggctaaaagctcttgatgaaatttgagggtgctgaagatgttcccactaatttccagccatcacctttggtggggtgggcttcggaggacagtctgtctgaacctgccagtgctgaccctgcagcactttcagcatatgcacatcaaagttggagaccgcgctgaacttaggagggccttcacacagactgatgtggctaccttctcagaattaacaggggatgtcaatcctttgcatttgaatgaagactttgcaaaacacaccaagtttggaaatacaattgtacatggagttttgatcaacggacttatctcagctctcctaggaactaaaatgccagggccaggctgtgtatttctttcccaggaaattagctttccagcccctttatatattggagaagttgttttagcttctgcagaagtgaaaaagctgaagcggttcattgctattattgcagtgtcatgttctgtaatagaaagtaaaaagactgttatggaaggctgggttaaagttatggttccagaagcttccaaatcctgaaatagatgttttaaagatgcaacctcaaacaccaatgctgttgttaaagagcctatggggaattgctgctctttaccaaagaatggttgataggcccagaagcccatcttagttaggggaagggagcaggaagagggttgttcaaatgcccactttccagtttggccttatgcttcatgcagacttgagtgtatgcaggatttcattatctgcctgggttttttgtttgttttttgttttttaattcaagaagtaggctgggcccggtggctcatgcctgtaatcctggcactttgggaggctgcggcaggcggatcacttgaggtcaggagtccaagaccagcctggccaacatggtgaaaccccatctctaccaaaaaaaaaaaaaaaaaaaaagtgcaactagctgtgcttggtgacttggccctgtagtcccagttgcttgggaggctgaggtgggagaattgcttgggcctgagagctggaggttatggtgagaaactgagattgcaccactgcactgtagcctgagtgacagagcgagaccctgtctcaagaaagaagtattgggaaggttatttaaagactctacttttaaatcaggcgtggcagctcacgcctgtaatcccagcattttgggaggctgaggcaggcgaatcacttgaggtcaggagttcaagaccagcctggccaacatgtgaaaccccatctctactaaaaatacaaaaactaaccgggcatggtggcgggcacctgtaatcccagctacttgggaggctgaggcaggagaatctcttgaacctgggaggttgcagtgagctgaaatcacaccactgcacttcagcctgggtgacagagcaaaactccacctcaaaaaaaaaaaaaagattctacttttagaaattcagacctagatagatttgcatttggataacaaatccctacctatagccatgtggaagcagcttgtcactgtattttaactgtgtaacaattattgaaggcgaaaatagaagttgggtcatctttgaacacctaccttttatcaatgaatatttttagactgttcttcagtatctgagtcagagtttattgtaatttgttatttacaccaaggtggcatcttagtctaccttcagtgagacttgcgtttcaggggaggggcgtatgtgcatcctcggtctcagttatgtaaacggtctgatctgtaaaatagtggtagcacatgccatgtgggatagttggtggagatgatagatggagttaagcacagggcccagcctgtcagcagtagctactattattgttgcccatttcccctgcaactgaggtgagaggttttcctgagtttgaagctgactggcccacagttaaacgtaacagaccagtttttcagggtgtcagccaacctctattagtgttcttaagtacagtttctgttataaaagttcagattattccttgaaaatttggatctacctcccattattatgagtaatacatgcttatagtaaaaaaaaaaaaattgtaagaaataaatattaagaagatt

SEQ ID NO: 9531 - protein, 124 aa, Homo sapiens; identical to SEQ ID NO: 804

SEQ ID NO: 9532 - DNA, 3347 bp, Homo sapiens
gctggatgtggtggcacgtgcctatactcccagctactcaggagtctgaggcaggaggatcacctgagcctcgagagccagaggtggaggctgcagtgaactctgattgtaccactgcacttcagcctaggtgacagggtgagaccctgccttaaaacaaacaaacaaaaaaaacccaaataggccaaattctcatcaaaactctgaaaaatagcatgtgcattggtcatttctagccctcttgacttactgtaggtgtgatcagcactggaaaagatgcctgcccctgctgccacatatgaaagagtagtttacaaaaacccttccgagtaccactacatgaaagtctgcctagaatttcaagattgtggagttggactgaatgctgcacagttcaaacagctgcttatttcggctgtgaaggacctgtttggggaggttgatgccgccttacctttggacatcctaacctatgaagagaagaccttgtcagccatcttgagaatatgtagcagtggtcttgtcaaattgtggagctctttgaccctgttaggatcctataaaggcaaaaaatgtgctttccgggtgattcaggtttctccatttcttcttgcattatctggtaatagtagggaactagtattggattgaatgaatagtcttccattttggaaacgttcatccactctcatatttattttttggtgcctgcatgtttgaagactgaagcaggctaaaagctcttgatgaaatttgagggtgctgaagatgttcccactaatttccagccatcacctttggtggggtgggcttcggaggacagtctgtctgaacctgccagtgctgaccctgcagcactttcagcatatgcacatcaaagttggagaccgcgctgaacttaggagggccttcacacagactgatgtggctaccttctcagaattaacaggggatgtcaatcctttgcatttgaatgaagactttgcaaaacacaccaagtttggaaatacaattgtacatggagttttgatcaacggacttatctcagctctcctaggaactaaaatgccagggccaggctgtgtatttctttcccaggaaattagctttccagcccctttatatattggagaagttgttttagcttctgcagaagtgaaaaagctgaagcggttcattgctattattgcagtgtcatgttctgtaatagaaagtaaaaagactgttatggaaggctgggttaaagttatggttccagaagcttccaaatcctgaaatagatgttttaaagatgcaacctcaaacaccaatgctgttgttaaagagcctatggggaattgctgctctttaccaaagaatggttgataggcccagaagcccatcttagttaggggaagggagcaggaagagggttgttcaaatgcccactttccagtttggccttatgcttcatgcagacttgagtgtatgcaggatttcattatctgcctgggttttttgtttgttttttgttttttaattcaagaagtaggctgggcccggtggctcatgcctgtaatcctggcactttgggaggctgcggcaggcggatcacttgaggtcaggagtccaagaccagcctggccaacatggtgaaaccccatctctaccaaaaaaaaaaaaaaaaaaaaagtgcaactagctgtgcttggtgacttggccctgtagtcccagttgcttgggaggctgaggtgggagaattgcttgggcctgagagctggaggttatggtgagaaactgagattgcaccactgcactgtagcctgagtgacagagcgagaccctgtctcaagaaagaagtattgggaaggttatttaaagactctacttttaaatcaggcgtggcagctcacgcctgtaatcccagcattttgggaggctgaggcaggcgaatcacttgaggtcaggagttcaagaccagcctggccaacatgtgaaaccccatctctactaaaaatacaaaaactaaccgggcatggtggcgggcacctgtaatcccagctacttgggaggctgaggcaggagaatctcttgaacctgggaggttgcagtgagctgaaatcacaccactgcacttcagcctgggtgacagagcaaaactccacctcaaaaaaaaaaaaaagattctacttttagaaattcagacctagatagatttgcatttggataacaaatccctacctatagccatgtggaagcagcttgtcactgtattttaactgtgtaacaattattgaaggcgaaaatagaagttgggtcatctttgaacacctaccttttatcaatgaatatttttagactgttcttcagtatctgagtcagagtttattgtaatttgttatttacaccaaggtggcatcttagtctaccttcagtgagacttgcgtttcaggggaggggcgtatgtgcatcctcggtctcagttatgtaaacggtctgatctgtaaaatagtggtagcacatgccatgtgggatagttggtggagatgatagatggagttaagcacagggcccagcctgtcagcagtagctactattattgttgcccatttcccctgcaactgaggtgagaggttttcctgagtttgaagctgactggcccacagttaaacgtaacagaccagtttttcagggtgtcagccaacctctattagtgttcttaagtacagtttctgttataaaagttcagattattccttgaaaatttggatctacctcccattattatgagtaatacatgcttatagtaaaaaaaaaaaaattgtaagaaataaatattaagaagattatggaggccaaattcttaagactttgggggctggggtcagggaggttatattgaaggggagatgtgcctaacatgttactactaaatggccatcccaacacagccaacacttttgtttcccatttttttttgtttcccgttttttaataaaattgagatataattcacataccataaaattcaccttttaaaagtgtacagtttagtggttttcagaatatccacaaagttgtacaaccatcaccaaatcaattttttatagcatttttcatcacccccaaaagaacctcccattagcagtcaatccatttctctcctccagtctttgggaatcaccagtctactttctgtctctatgggtttccctgttctggacatttcataaaagttcatacaatgtatgatcctttggaactggcttctttgatatagcatgttttcagggttcatccatgttacagcatgtatcagtacatcattttattttatggctgaataatattccattgtatttacccat

SEQ ID NO: 9533 - protein, 124 aa, Homo sapiens; identical to SEQ ID NO: 804

SEQ ID NO: 9534 - DNA, 1061 bp, Homo sapiens
aggtttctccatttcttcttgcattatctggtaatagtagggaactagtattggattgaatgaatagtcttccattttggaaacgttcatccactctcatatttattttttggtgcctgcatgtttgaagactgaagcaggctaaaagctcttgatgaaatttgagggtgctgaagatgttcccactaatttccagccatcacctttggtggggtgggcttcggaggacagtctgtctgaacctgccagtgctgaccctgcagcactttcagcatatgcacatcaaagttggagaccgcgctgaacttaggagggccttcacacagactgatgtggctaccttctcagaattaacaggggatgtcaatcctttgcatttgaatgaagactttgcaaaacacaccaagtttggaaatacaattgtacatggagttttgatcaacggacttatctcagctctcctaggaactaaaatgccagggccaggctgtgtatttctttcccaggaaattagctttccagcccctttatatattggagaagttgttttagcttctgcagaagtgaaaaagctgaagcggttcattgctattattgcagtgtcatgttctgtaatagaaagtaaaaagactgttatggaaggctgggttaaagttatggttccagaagcttccaaatcctgaaatagatgttttaaagatgcaacctcaaacaccaatgctgttgttaaagagcctatggggaattgctgctctttaccaaagaatggttgataggcccagaagcccatcttagttaggggaagggagcaggaagagggttgttcaaatgcccactttccagtttggccttatgcttcatgcagacttgagtgtatgcaggatttcattatctgctgggattacaggtgtgagcctctgtactcagcccatattttgatatattttcttctggtgtttgtcctgtagatatgttgggattatacggatgctaaattgcttttttcatttactattatatcaagagcatttctcaagatcataaaatattttttaatcatg

SEQ ID NO: 9535 - protein, 36 aa, Homo sapiens
MPTFQFGLMLHADLSVCRISLSAGITGVSLCTQPIF

SEQ ID NO: 9536 - DNA, 2112 bp, Homo sapiens
tctggtaatagtagggaactagtattggattgaatgaatagtcttccattttggaaacgttcatccactctcatatttattttttggtgcctgcatgtttgaagactgaagcaggctaaaagctcttgatgaaatttgagggtgctgaagatgttcccactaatttccagccatcacctttggtggggtgggcttcggaggacagtctgtctgaacctgccagtgctgaccctgcagcactttcagcatatgcacatcaaagttggagaccgcgctgaacttaggagggccttcacacagactgatgtggctaccttctcagaattaacaggggatgtcaatcctttgcatttgaatgaagactttgcaaaacacaccaagtttggaaatacaattgtacatggagttttgatcaacggacttatctcagctctcctaggaactaaaatgccagggccaggctgtgtatttctttcccaggaaattagctttccagcccctttatatattggagaagttgttttagcttctgcagaagtgaaaaagctgaagcggttcattgctattattgcagtgtcatgttctgtaatagaaagtaaaaagactgttatggaaggctgggttaaagttatggttccagaagcttccaaatcctgaaatagatgttttaaagatgcaacctcaaacaccaatgctgttgttaaagagcctatggggaattgctgctctttaccaaagaatggttgataggcccagaagcccatcttagttaggggaagggagcaggaagagggttgttcaaatgcccactttccagtttggcccggtggctcatgcctgtaatcctggcactttgggaggctgcggcaggcggatcacttgaggtcaggagtccaagaccagcctggccaacatggtgaaaccccatctctaccaaaaaaaaaaaaaaaaaaaaagtgcaactagctgtgcttggtgacttggccctgtagtcccagttgcttgggaggctgaggtgggagaattgcttgggcctgagagctggaggttatggtgagaaactgagattgcaccactgcactgtagcctgagtgacagagcgagaccctgtctcaagaaagaagtattgggaaggttatttaaagactctacttttaaatcaggcgtggcagctcacgcctgtaatcccagcattttgggaggctgaggcaggcgaatcacttgaggtcaggagttcaagaccagcctggccaacatgtgaaaccccatctctactaaaaatacaaaaactaaccgggcatggtggcgggcacctgtaatcccagctacttgggaggctgaggcaggagaatctcttgaacctgggaggttgcagtgagctgaaatcacaccactgcacttcagcctgggtgacagagcaaaactccacctcaaaaaaaaaaaaaagattctacttttagaaattcagacctagatagatttgcatttggataacaaatccctacctatagccatgtggaagcagcttgtcactgtattttaactgtgtaacaattattgaaggcgaaaatagaagttgggtcatctttgaacacctaccttttatcaatgaatatttttagactgttcttcagtatctgagtcagagtttattgtaatttgttatttacaccaaggtggcatcttagtctaccttcagtgagacttgcgtttcaggggaggggcgtatgtgcatcctcggtctcagttatgtaaacggtctgatctgtaaaatagtggtagcacatgccatgtgggatagttggtggagatgatagatggagttaagcacagggcccagcctgtcagcagtagctactattattgttgcccatttcccctgcaactgaggtgagaggttttcctgagtttgaagctgactggcccacagttaaacgtaacagaccagtttttcagggtgtcagccaacctctattagtgttcttaagtacagtttctgttataaaagttcagattattccttgaaaatttggatctacctcccattattatgagtaatacatgcttatagtaaaaaaaaaaaaattgtaagaaataaatattaagaagatt

SEQ ID NO: 9537 - protein, 168 aa, Homo sapiens [sequence omitted]

SEQ ID NO: 9538 - DNA, 2632 bp, Homo sapiens
tctggtaatagtagggaactagtattggattgaatgaatagtcttccattttggaaacgttcatccactctcatatttattttttggtgcctgcatgtttgaagactgaagcaggctaaaagctcttgatgaaatttgagggtgctgaagatgttcccactaatttccagccatcacctttggtggggtgggcttcggaggacagtctgtctgaacctgccagtgctgaccctgcagcactttcagcatatgcacatcaaagttggagaccgcgctgaacttaggagggccttcacacagactgatgtggctaccttctcagaattaacaggggatgtcaatcctttgcatttgaatgaagactttgcaaaacacaccaagtttggaaatacaattgtacatggagttttgatcaacggacttatctcagctctcctaggaactaaaatgccagggccaggctgtgtatttctttcccaggaaattagctttccagcccctttatatattggagaagttgttttagcttctgcagaagtgaaaaagctgaagcggttcattgctattattgcagtgtcatgttctgtaatagaaagtaaaaagactgttatggaaggctgggttaaagttatggttccagaagcttccaaatcctgaaatagatgttttaaagatgcaacctcaaacaccaatgctgttgttaaagagcctatggggaattgctgctctttaccaaagaatggttgataggcccagaagcccatcttagttaggggaagggagcaggaagagggttgttcaaatgcccactttccagtttggcccggtggctcatgcctgtaatcctggcactttgggaggctgcggcaggcggatcacttgaggtcaggagtccaagaccagcctggccaacatggtgaaaccccatctctaccaaaaaaaaaaaaaaaaaaaaagtgcaactagctgtgcttggtgacttggccctgtagtcccagttgcttgggaggctgaggtgggagaattgcttgggcctgagagctggaggttatggtgagaaactgagattgcaccactgcactgtagcctgagtgacagagcgagaccctgtctcaagaaagaagtattgggaaggttatttaaagactctacttttaaatcaggcgtggcagctcacgcctgtaatcccagcattttgggaggctgaggcaggcgaatcacttgaggtcaggagttcaagaccagcctggccaacatgtgaaaccccatctctactaaaaatacaaaaactaaccgggcatggtggcgggcacctgtaatcccagctacttgggaggctgaggcaggagaatctcttgaacctgggaggttgcagtgagctgaaatcacaccactgcacttcagcctgggtgacagagcaaaactccacctcaaaaaaaaaaaaaagattctacttttagaaattcagacctagatagatttgcatttggataacaaatccctacctatagccatgtggaagcagcttgtcactgtattttaactgtgtaacaattattgaaggcgaaaatagaagttgggtcatctttgaacacctaccttttatcaatgaatatttttagactgttcttcagtatctgagtcagagtttattgtaatttgttatttacaccaaggtggcatcttagtctaccttcagtgagacttgcgtttcaggggaggggcgtatgtgcatcctcggtctcagttatgtaaacggtctgatctgtaaaatagtggtagcacatgccatgtgggatagttggtggagatgatagatggagttaagcacagggcccagcctgtcagcagtagctactattattgttgcccatttcccctgcaactgaggtgagaggttttcctgagtttgaagctgactggcccacagttaaacgtaacagaccagtttttcagggtgtcagccaacctctattagtgttcttaagtacagtttctgttataaaagttcagattattccttgaaaatttggatctacctcccattattatgagtaatacatgcttatagtaaaaaaaaaaaaattgtaagaaataaatattaagaagattatggaggccaaattcttaagactttgggggctggggtcagggaggttatattgaaggggagatgtgcctaacatgttactactaaatggccatcccaacacagccaacacttttgtttcccatttttttttgtttcccgttttttaataaaattgagatataattcacataccataaaattcaccttttaaaagtgtacagtttagtggttttcagaatatccacaaagttgtacaaccatcaccaaatcaattttttatagcatttttcatcacccccaaaagaacctcccattagcagtcaatccatttctctcctccagtctttgggaatcaccagtctactttctgtctctatgggtttccctgttctggacatttcataaaagttcatacaatgtatgatcctttggaactggcttctttgatatagcatgttttcagggttcatccatgttacagcatgtatcagtacatcattttattttatggctgaataatattccattgtatttacccat

SEQ ID NO: 9539 - protein, 168 aa, Homo sapiens [sequence omitted]

SEQ ID NO: 9540 - DNA, 2580 bp, Homo sapiens
ctgtctgaacctgccagtgctgaccctgcagcactttcagcatatgcacatcaaagttggagaccgcgctgaacttaggagggccttcacacagactgatgtggctaccttctcagaattaacaggggatgtcaatcctttgcatttgaatgaagactttgcaaaacacaccaagtttggaaatacaattgtacatggagttttgatcaacggacttatctcagctctcctaggaactaaaatgccagggccaggctgtgtatttctttcccaggaaattagctttccagcccctttatatattggagaagttgttttagcttctgcagaagtgaaaaagctgaagcggttcattgctattattgcagtgtcatgttctgtaatagaaagtaaaaagactgttatggaaggctgggttaaagttatggttccagaagcttccaaatcctgaaatagatgttttaaagatgcaacctcaaacaccaatgctgttgttaaagagcctatggggaattgctgctctttaccaaagaatggttgataggcccagaagcccatcttagttaggggaagggagcaggaagagggttgttcaaatgcccactttccagtttggccttatgcttcatgcagacttgagtgtatgcaggatttcattatctgcctgggttttttgtttgttttttgttttttaattcaagaagtaggctgggcccggtggctcatgcctgtaatcctggcatgctgggattacagatgtgagccaccatgtccagcatgtttcagacctttaaagtgtcagactaagttaatcttcccgagatccagacaagggaaggcctggctgcatcaagcagattctctgcaaatgcaagttttctccaaaaaagacagctttgcagggctgcttcttttggctctctgaacagccatctgaaaatatgacaaatatattttggggtgaaatatttttatttccctcattcgtgttgctggaactggagcactgtcagtttctataatggcatcttacatggcattaaaataattggaatcattctatagcaatctttttgctttcggaatgttctagatcttattccccgctagagttgtagcgttttcctaatactattagttgaaagtcttccacccatgcatatcacctacacattttctaagccgacattcagtgattatttgtcttcaccgaagaatggcttaaagggttaaagatgaaaaatatagggtacggaagggatgtcagatctgaatgatagttgatttatactgtgtaactttcaaaagtagctactcaatgtgagcatttccactgtttttttttttgtttgttttctgagacagagtctcactctgtctcccaggctggagttgcagtggtgcaatgactgcagcacctcctgggcttacacaatcctgcctcagcctcctatatagcagagaacagaggtgcacaccaccatatctggcttattttttgattttttgcagagatgaggtctcactttgttgcccaggctagtctcaaactcctgggctcaagcaatcctcccaccttggcttcccaaagtgctgggattacaggcatgagccactgtgctcagccttcatgttcacttttttaaaatgtatgtattttttatagagatgtgggtctcactgtgtcgcccaggttgtctcgaactcctggtctcaagcgatactcctgctttggcctcccaaaatgctggaatgagcctctgcatacagagttccacatttttatgctccctgagtcatggtctttgaaatctataaatcaataaaggttggaaacagagaagtagacaagaagttatcagtacttctctttagtaacttgtcatttttatccagagtcaagattctcaaaccacacgtgctttgttaaagctggctataaggaaaactggttgcttggctttttcattgagtctatacaaactgctcaaaagaatgactcttaatgaaagcctgagtgaccctcaaattaggaaattctctcccagataattgagaagtggccttgactgtaccaggtcacacatggaaataagtacaaaagtaatgactaaaataggccaagttgaccgagcactttgtacataggggtattatacgactgcaaattgtgtgatgtttaattgtcacagaaagagatactcgttttaagcacttttagcctaatgtactggaaaattgcttaatggatttttatactctattggaaacatttccatattggtgaaatgccactcattcctttttctgaggagcaaatcttgagtagcaatgggaagaaagcctggcaacagccaccatttgtcttgtggacctgacatgcttattcacctagaaaaagaagaaattgctaaatgcacactgatacctcttaggtaaccacaggttttcattttgtgctgaattattagtcatttttcctttatgtttttagagtatgattcagagaccaatttattcccaaagaaaattgccattacatctactaagttttcatattaaaacattttctaccaaggg

SEQ ID NO: 9541 - protein, 93 aa, Homo sapiens
MQDFIICLGFLFVFCFLIQEVGWARWLMPVILACWDYRCEPPCPACFRPLKCQTKLIFPRSRQGKAWLHQADSLQMQVFSKKDSFAGLLLLAL

SEQ ID NO: 9542 - DNA, 957 bp, Homo sapiens
ctagctgtgcttggtgacttggccctgtagtcccagttgcttgggaggctgaggcaggcgaatcacttgaggtcaggagttcaagaccagcctggccaacatgtgaaaccccatctctactaaaaatacaaaaactaaccgggcatggtggcgggcacctgtaatcccagctacttgggaggctgaggcaggagaatctcttgaacctgggaggttgcagtgagctgaaatcacaccactgcacttcagcctgggtgacagagcaaaactccacctcaaaaaaaaaaaaaagattctacttttagaaattcagacctagatagatttgcatttggataacaaatccctacctatagccatgtggaagcagcttgtcactgtattttaactgtgtaacaattattgaaggcgaaaatagaagttgggtcatctttgaacacctaccttttatcaatgaatatttttagactgttcttcagtatctgagtcagagtttattgtaatttgttatttacaccaaggtggcatcttagtctaccttcagtgagacttgcgtttcaggggaggggcgtatgtgcatcctcggtctcagttatgtaaacggtctgatctgtaaaatagtggtagcacatgccatgtgggatagttggtggagatgatagatggagttaagcacagggcccagcctgtcagcagtagctactattattgttgcccatttcccctgcaactgaggtgagaggttttcctgagtttgaagctgactggcccacagttaaacgtaacagaccagtttttcagggtgtcagccaacctctattagtgttcttaagtacagtttctgttataaaagttcagattattccttgaaaatttggatctacctcccattattatgagtaatacatgcttatagtaaaaaaaaaaaaattgtaagaaataaatattaagaagatt

SEQ ID NO: 9543 - protein, 48 aa, Homo sapiens
LGPVVPVAWEAEAGESLEVRSSRPAWPTCETPSLLKIQKLTGHGGGHL

SEQ ID NO: 9544 - DNA, 1477 bp, Homo sapiens
ctagctgtgcttggtgacttggccctgtagtcccagttgcttgggaggctgaggcaggcgaatcacttgaggtcaggagttcaagaccagcctggccaacatgtgaaaccccatctctactaaaaatacaaaaactaaccgggcatggtggcgggcacctgtaatcccagctacttgggaggctgaggcaggagaatctcttgaacctgggaggttgcagtgagctgaaatcacaccactgcacttcagcctgggtgacagagcaaaactccacctcaaaaaaaaaaaaaagattctacttttagaaattcagacctagatagatttgcatttggataacaaatccctacctatagccatgtggaagcagcttgtcactgtattttaactgtgtaacaattattgaaggcgaaaatagaagttgggtcatctttgaacacctaccttttatcaatgaatatttttagactgttcttcagtatctgagtcagagtttattgtaatttgttatttacaccaaggtggcatcttagtctaccttcagtgagacttgcgtttcaggggaggggcgtatgtgcatcctcggtctcagttatgtaaacggtctgatctgtaaaatagtggtagcacatgccatgtgggatagttggtggagatgatagatggagttaagcacagggcccagcctgtcagcagtagctactattattgttgcccatttcccctgcaactgaggtgagaggttttcctgagtttgaagctgactggcccacagttaaacgtaacagaccagtttttcagggtgtcagccaacctctattagtgttcttaagtacagtttctgttataaaagttcagattattccttgaaaatttggatctacctcccattattatgagtaatacatgcttatagtaaaaaaaaaaaaattgtaagaaataaatattaagaagattatggaggccaaattcttaagactttgggggctggggtcagggaggttatattgaaggggagatgtgcctaacatgttactactaaatggccatcccaacacagccaacacttttgtttcccatttttttttgtttcccgttttttaataaaattgagatataattcacataccataaaattcaccttttaaaagtgtacagtttagtggttttcagaatatccacaaagttgtacaaccatcaccaaatcaattttttatagcatttttcatcacccccaaaagaacctcccattagcagtcaatccatttctctcctccagtctttgggaatcaccagtctactttctgtctctatgggtttccctgttctggacatttcataaaagttcatacaatgtatgatcctttggaactggcttctttgatatagcatgttttcagggttcatccatgttacagcatgtatcagtacatcattttattttatggctgaataatattccattgtatttacccat

SEQ ID NO: 9545 - protein, 48 aa, Homo sapiens; identical to SEQ ID NO: 9543

SEQ ID NO: 9546 - DNA, 2922 bp, Homo sapiens
gtgttgacagcggcggcggtggaaccgggcgggcggcgggagtcggcgcctcgggttcctacctcgcgtccctaggcggcggcggccgggcgtcccgggatggccttcatggagaagccgccagccggcaaggtgctgctggacgacacggtgccgctgacagcagccatcgaggcgagccagagcctgcagtcccacacggaatatattattcgagtgcaaagaggaatttctgtggaaaacagctggcagattgttagaagatacagtgactttgatttgcttaacaacagcttacagattgcaggcctaagtctacctcttcctcccaaaaaattgattggtaacatggatcgtgaattcatagctgaaaggcagaaaggtcttcagaactatctcaacgtgatcacaacaaatcatatcttgtctaattgtgagctggttaagaagtttttagatccaaacaactattccgcaaactatactgagattgccttgcaacaggtttccatgttcttccgatcagaaccaaagtgggaggtggtggaacctttgaaagacataggttggagaataaggaagaaatatttcttgatgaagattaaaaatcagccaaaggaacggctagtgttaagctgggctgaccttggcccagacaagtatttgtcagataaagattttcagtgtctaatcaaacttctgccttcttgtttgcacccttacatctatcgggttacctttgccacagctaatgaatcctcagcgttgctaattaggatgtttaacgaaaagggaacattgaaggatctgatctacaaggcaaaaccaaaagacccatttctaaagaagtactgcaaccctaagaagattcagggcctggaactccagcaaataaaaacatatggacggcaaatattagaggtactgaagtttcttcatgacaagggattcccttatgggcatcttcacgcctccaatgtgatgctcgatggggacacttgccggctgctggaccttgagaattccttattgggcctgccttccttctaccgatcttatttttcacaattcaggaaaatcaatacattggaaagtgtggatgtccactgctttggccacttactgtatgaaatgacttatggacgaccgccagactcggtgcctgtggactccttccctcctgccccgtccatggctgtggtggccgtgttggagtctacgctgtcttgtgaagcctgtaaaaatggcatgcctaccatctcccggctcttacagatgccattattcagcgatgttttactaaccacttctgaaaaaccacagtttaagatccctacaaagttaaaagaggcattgagaattgccaaagaatgtatagagaagagactaattgaggaacagaaacagattcaccagcatcgaagactgacaagagctcagtcccaccatggatctgaggaggaaagaaaaaaaagaaagattttagctcgaaagaagtcaaaacgatctgctcttgaaaatagtgaagagcattcagcgaagtacagcaactccaataattcagcaggatctggggccagctcacctctcacgtccccgtcatcgccaactccaccctctacatcagggatatctgcattacctccacctcctccacctccaccaccaccagcagctcccttgcctcctgcgagcaccgaggcacctgcccagctctcgtctcaggctgtgaatggcatgagccgaggggccttgctcagctccatccagaatttccaaaaaggaactttgaggaaagccaaaacctgtgatcacagtgctccgaagatcggctgaagcttcctgtttacacttggagggaaaagttcttttttattcctactcacccctaccccccaaactaccctcttcctgggaaagtaattgctgagccagtacagccacaaacagtactattttgcagatgctcatgtaagcagcttttcgagagaaataattctttaagcagaataaagttaggctggcattgctcccttaagatcttgctcctttattaaccctgtaaaggagtcttgtttatcctctaatggccaggcttttgggacagcagcatattgaaatattttcaccaactaaaggaaatagacagaaaaacaatgacaatattcaatcacagcagtaaatggcctttgtgttgcaatcccttctaccccatcagacagctcctagaaacattcctcttacagttcatttctctaaagcattttctgattcttagataactccaatttttgctacctttatcttagacattaacactatagcccaaagcatagttactttgctaaatcagaaagcaactgagttctttgttttctcctcaaatagaatggggaacgttcacaacattctcttaagttctaacaggaataccattgtggttatagaactcagggctgctaaagcaactactctagacccatagttctttttagttagatgtattgaaacagacaaaaatattaacatcagaaaaagctcttgccaattagaggatcttcttaatcctcagcaattaagtttggggtttgaggggggcaggtcattgttacaacagaagtaaatttggcatctatagaaatcaattatgatttttgaaagatttatctaaatatatcaatatagcatctctttaatgttagtcatttattagaaagatcctttatcctgatttgcttaaacctttcaataaattgcactttaaaggattataaataatccatttaaaaattcaagtacacacatcagtgttggttactatgcagagaatgtcattgtgtatagtttcatgtaatctgttatgtcagctgtattttttattaaaatcatgtcaagaaaacgtgttgtctgtagcttgacaag

SEQ ID NO: 9547 - protein, 578 aa, Homo sapiens; identical to SEQ ID NO: 806

SEQ ID NO: 9548 - DNA, 1464 bp, Homo sapiens
gttgacagcggcggcggtggaaccgggcgggcggcgggagtcggcgcctcgggttcctacctcgcgtccctaggcggcggcggccgggcgtcccgggatggccttcatggagaagccgccagccggcaaggtgctgctggacgacacggtgccgctgacagcagccatcgaggcgagccagagcctgcagtcccacacggaatatattattcgagtgcaaagaggaatttctgtggaaaacagctggcagattgttagaagatacagtgactttgatttgcttaacaacagcttacagattgcaggcctaagtctacctcttcctcccaaaaaattgattggtaacatggatcgtgaattcatagctgaaaggcagaaaggtcttcagaactatctcaacgtgatcacaacaaatcatatcttgtctaattgtgagctggttaagaagtttttagatccaaacaactattccgcaaactatactgagattgccttgcaacaggtttccatgttcttccgatcagaaccaaagtgggaggtggtggaacctttgaaagacataggttggagaataaggaagaaatatttcttgatgaagattaaaaatcagccaaaggaacggctagtgttaagctgggctgaccttggcccagacaagtatttgtcagataaagattttcagtgtctaatcaaacttctgccttcttgtttgcacccttacatctatcgggttacctttgccacagctaatgaatcctcagcgttgctaattaggatgtttaacgaaaagggaacattgaaggatctgatctacaaggcaaaaccaaaagacccatttctaaagaagtactgcaaccctaagaagattcagggcctggaactccagcaaataaaaacatatggacggcaaatattagaggtactgaagtttcttcatgacaagggattcccttatgggcatcttcacgcctccaatgtgatgctcgatggggacacttgccggctgctggaccttgagaattccttattgggcctgccttccttctaccgatcttatttttcacaattcaggaaaatcaatacattggaaagtgtggatgtccactgctttggccacttactgtatgaaatgacttatggacgaccgccagactcggtgcctgtggactccttccctcctgccccgtccatggctgtggtggccgtgttggagtctacgctgtcttgtgaagcctgtaaaaatggcatgcctaccatctcccggctcttacagatgccattattcagcgatgttttactaaccacttctgaaaaaccacagtttaagatccctacaaagttaaaagaggcattgagaattgccaaagaatgtatagagaagagactaattgaggaacagaaacagattcaccagcatcgaagactgacaagagctcagtcccaccatggatctgaggaggaaag

SEQ ID NO: 9549 - protein, 454 aa, Homo sapiens
MAFMEKPPAGKVLLDDTVPLTAAIEASQSLQSHTEYIIRVQRGISVENSWQIVRRYSDFDLLNNSLQIAGLSLPLPPKKLIGNMDREFIAERQKGLQNYLNVITTNHILSNCELVKKFLDPNNYSANYTEIALQQVSMFFRSEPKWEVVEPLKDIGWRIRKKYFLMKIKNQPKERLVLSWADLGPDKYLSDKDFQCLIKLLPSCLHPYIYRVTFATANESSALLIRMFNEKGTLKDLIYKAKPKDPFLKKYCNPKKIQGLELQQIKTYGRQILEVLKFLHDKGFPYGHLHASNVMLDGDTCRLLDLENSLLGLPSFYRSYFSQFRKINTLESVDVHCFGHLLYEMTYGRPPDSVPVDSFPPAPSMAVVAVLESTLSCEACKNGMPTISRLLQMPLFSDVLLTTSEKPQFKIPTKLKEALRIAKECIEKRLIEEQKQIHQHRRLTRAQSHHGSEE

SEQ ID NO: 9550 - DNA, 473 bp, Homo sapiens
actttgatgtaagatggaattactgggtttccattttagcaaattatgtaatttgcgtgggtgtcatttaagggtcattatactatagaatgctgcaggaagtggctatttaaaaagctgtatccattctgtagtcatgtttgaggtcaaaaggattttggagtgcttctttgcagtgtttttcttctctggaacatcagctgtctttgaagtcggtgtggagaccagctctcctggtagggcaggagaccatcccacagcggagagtgtagacttcaaaaggcccggagaagggagaagagaagcatgcatgatcatgacgctcatctcactgcagggatcaaagcgtgtttgcaatgtgtgcttcatctcttcttttgcctgtgagccagtgggagccatggaaggtcctggagcagagaagtagcgtggtggtagattccagccaggtcacttgttttcagcattctttt

SEQ ID NO: 9551 - protein, 96 aa, Homo sapiens
MFEVKRILECFFAVFFFSGTSAVFEVGVETSSPGRAGDHPTAESVDFKRPGEGRREACMIMTLISLQGSKRVCNVCFISSFACEPVGAMEGPGAEK

SEQ ID NO: 9552 - DNA, 522 bp, Homo sapiens
tgctagggcttgacacagcagcctccctggcatgccaagatagggggtgttgtgtcaagaggaggggcagaaaggagtgggccctttggggaagtggcagcagatggcagggtttggtggcaggctgaaatccgtctgactcaggtctgccctgcagggctgttagctctcctttccatgcctgatgggccttggtgctttatcttctcttttatgtacttctgtctcaaaaaaaaaaaacaaaaactaagacataaacacacacattagcctgggcctacacagtatcaagatcatcagtatgactgtcttccacttccacatcctgtcccactggaaggtcttctggggcaataacacacatggagctctcctatgatagcaatgccttctggacacctcctgaaggacctgtctgaggctgttttacagttacctttcatttctaagtagaaggagtatactctgaaataactataaaaagcagtaggtttatttacaccaccatactacaaacacatg

SEQ ID NO: 9553 - protein, 30 aa, Homo sapiens
MPDGPWCFIFSFMYFCLKKKKQKLRHKHTH

SEQ ID NO: 9554 - DNA, 680 bp, Homo sapiens
accaccaaaacaaaatcgtctccttctctcatttgggtctcctgggatcctgtcatctgtgctcccacacactgtacctcaggaaaagataggaaaggcaaggagacgaaagctcagcaagtcctcagtttccccagatcacacattcaaggtctgtctgaatctatgatgtgtgcctgccacacttggtcctaagaaggtcatagcaagaacagcaagagaagtaacagccacagccatggagttccagatggttttagcaccacctgtcagccatttgctcttgggttcttcagctatgccacttcccctctctccatgcctagatgggttatgctgactttctactttaactcttctttcaaagccaagcggtatcaaaataatcacgtaattccataagaagtgttcttctgcaggaagaaagtgtagctgagatagttaattttccggacaacacaagagttccctttcaaatcactgaagtcagaggcatctgataacaaatggagtgtgccatttttctgaagcgagagacaaccctggagctgattttctgtgtgtgtaacaatggtgtctacaggcagagctgagcctccgcacaggagtctgcacatctttgcgtctgagacagttggtacaagtcagaacaattcactggaattccccaaggaattaaa

SEQ ID NO: 9555 - protein, 33 aa, Homo sapiens
MEFQMVLAPPVSHLLLGSSAMPLPLSPCLDGLC

SEQ ID NO: 9556 - DNA, 627 bp, Homo sapiens
ctaactgcccttggcctgtttctatgaagctccctggtgagaagagtttgtcttttcctttgcaccccgaagcccctgcctgggctaaaaacgtgcaggaatgcggcatttggagaaattacacctctgagctgccaggatatattcaaacagccaagaacagaagttggcccaactgggacgcatccgtggagcagcaaatatgcacactcctggcagtcatgcaagcaagatggtcaacgtcagatacacaaggctggcttgagcagtgttcactggggaaaattcatggacaggggagcagaaacagaagaaaaaccacccaccccaatgtcttgcacactgcaacaactctgtgaacactggtcattattctactgttgttattggtgctctttactggccaaagctcagtgggaggactactatctaacacaagtgccctgcaggacagaaagaacaagagtgctagagcttttgtgcatctgggccattttttcatttgacatatgaagaatctaagaacctgcaaggtggaagtgacctgttcaaatagcagcaaagtcaaaagcagatgtagctctctatctctgagcctctaataaaattaatctaaatagttgtcaa

SEQ ID NO: 9557 - protein, 111 aa, Homo sapiens; identical to SEQ ID NO: 808

SEQ ID NO: 9558 - DNA, 677 bp, Homo sapiens
agagggtgcagttttgtaatcagaagcagaatgatcctattgtagaaagaaggaatcgtgaccaatccagtggactgctccagaaacatgacaaggaggactttcctgcctcttggagatcagaggaggaaatggcagcagaagccgcagctctgcgggtctactttcagtgacacagatcctgaattccagcaaaagagctattgccaaccagtttgaagaccgccccccgcctctccccaagaggaactgaatcagcatgaaaatgcagtttcttcatctcaccatcctgtattcttcaaccagtgatcccccacctcggtcactccaactcccttaaaatacctagacctaaacggctcagacaggcagatttgaggtttccccctgtctccttattcggcagccttatgattaaacttccttctctgctgcaaccctgtgtctcggtgtattgacttgccatgaattaggcaacaaacctattacagttacagttacttttttaaaggaaattcaatcgttggattggtccacctgcttatttcttcccttttcaaaaaaaatgtctacatattgaatttttatacattaagtggttcatgaaacccctgaaatgtgttagtaaatagggcaattatgaaatatttggacatagctagactttaaaaattgtt

SEQ ID NO: 9559 - protein, 43 aa, Homo sapiens
MTRRTFLPLGDQRRKWQQKPQLCGSTFSDTDPEFQQKSYCQPV

SEQ ID NO: 9560 - DNA, 1230 bp, Homo sapiens
ctctgtccggtcacaggactttttgccctctgttcccgggtccctcaggcggccacccagtgggcacactcccaggcggcgctccggccccgcgctccctccctctgcctttcattcccagctgtcaacatcctggaagctttgaagctcaggaaagaagagaaatccactgagaacagtctgtaaaggtccgtagtgctatctacatccagacggtggaagggagagaaagagaaagaaggtatcctaggaatacctgcctgcttagaccctctataaaagctctgtgcatcctgccactgaggactccgaagaggtagcagtcttctgaaagacttcaactgtgaggacatgtcgttcagatttggccaacatctcatcaagccctctgtagtgtttctcaaaacagaactgtccttcgctcttgtgaataggaaacctgtggtaccaggacatgtccttgtgtgcccgctgcggccagtggagcgcttccatgacctgcgtcctgatgaagtggccgatttgtttcagacgacccagagagtcgggacagtggtggaaaaacatttccatgggacctctctcaccttttccatgcaggatggccccgaagccggacagactgtgaagcacgttcacgtccatgttcttcccaggaaggctggagactttcacaggaatgacagcatctatgaggagctccagaaacatgacaaggaggactttcctgcctcttggagatcagaggaggaaatggcagcagaagccgcagctctgcgggtctactttcagtgacacagatcctgaattccagcaaaagagctattgccaaccagtttgaagaccgccccccgcctctccccaagaggaactgaatcagcatgaaaatgcagtttcttcatctcaccatcctgtattcttcaaccagtgatcccccacctcggtcactccaactcccttaaaatacctagacctaaacggctcagacaggcagatttgaggtttccccctgtctccttattcggcagccttatgattaaacttccttctctgctgcaaccctgtgtctcggtgtattgacttgccatgaattaggcaacaaacctattacagttacagttacttttttaaaggaaattcaatcgttggattggtccacctgcttatttcttcccttttcaaaaaaaatgtctacatattgaatttttatacattaagtggttcatgaaa

SEQ ID NO: 9561 - protein, 147 aa, Homo sapiens; identical to SEQ ID NO: 4466

SEQ ID NO: 9562 - DNA, 411 bp, Homo sapiens
agcagaatgatcctattgtagaaagaaggaatcgtgaccaatccagtggactgctccagaaacatgacaaggaggactttcctgcctcttggagatcagaggaggaaatggcagcagaagccgcagctctgcgggtctactttcagtgacacagatcctgaattccagcaaaagagctattgccaaccagtttgaagaccgccccccgcctctccccaagaggaactgaatcagcatgaaaatgcagtttcttcatctcaccatcctgtattcttcaaccagtgatcccccacctcggtcactccaactcccttaaaatacctagacctaaacggctcagacaggcagatttgaggtttccccctgtctccttattcggcagccttatgattaaacttccttctctgctgc

SEQ ID NO: 9563 - protein, 43 aa, Homo sapiens; identical to SEQ ID NO: 9559

SEQ ID NO: 9564 - DNA, 2992 bp, Homo sapiens
aatcactgcattcagttttgagatttgtcatcaaacaaactgcacccttgccatttgtaactttgtggcaccacaggatattctaatctcatcttgttcctgtcctgtcccattaatggagccaaccacttctccaaggaggtctggttccttttttatttttattttttggagaatggtatttagaaaccaagatctggacatcagagctccagaaacatgacaaggaggactttcctgcctcttggagatcagaggaggaaatggcagcagaagccgcagctctgcgggtctactttcagtgacacaggtaaagactgcatttcgtcattacccagaccctcccgtgggcctcaggaaagaggctgcactctcagaatggggatgcacaaaaacaccttcaccagcatccttgggtggtggctgcaaaggacaaagagctggaggggagaaaaccctggcccttgagtactgtattcccagcctcccagtctcttccaactctcctgcctcttcactctcttcttccaagccagtgcccccagcccaccaccacctttctccagtctttcctgcggtggtgctcctccagaatccaatgttcacaaagcagaccttctgtcatgcacaacttcttgtttaaaaggtcaaccccaacttaacttaaaggtgtgacatggcccttaggctcaagtctgtctgcaaagccctgtaaaccagctttctctgcctccctaacacgcccccgggcaaactcctctgctttcactgagtggactcttctcttcagttgctatttggtaaattgcccttcatgtttccctttatgttcggctcctaggaagctcaggccacagggaaaagtcaaggcttgatagaattaatctttgtcttaatgatgactaactgttgagagatcataggtttaagactctggtagaaagatagctatagccaatttccttgtcaaaatgcttctactccaaatttttatgcagtgtctaacgagctcatgcctagatctatctggcaatctatattatccctcctagtctcagttcacatagtagactgctggaatgactgagggtgatgtttggcctgtaaacaaaaagtgttaaagaaggccaggtacagtggctcatgcctataatcccaactacttgggaagctgaggcaggagaactgcttgaacctgggaggcagaggttgcagtgagctgagatcatgccactgcattccagcctgggtgacagagcaagactcagtttcaaaaaaacaggagagagagagagagaaatgtatctatctctctgaaatttgtttataaatatagggttaccatgcaatactggcatatatctagactaaaaaaattacttgtttatctgaaattcaaatttaactggtatcttgtatttttttctggcaaacctgttaataaactcccatggaccccagttacagatcctctcctataaatagtttcttttttgtttttagaattagataattccaaattaaaattaggcaattcttcatctgacctgtgaataaatatgttcatgttataagttgcagaagtagatcagacacaaataaaaaacaaaattagtgaataaatgctgttagcaattgattggaaaaaattgtatcaaccacttagtgatcatgatttttagctagaaaacacattcattgtattctgatttcaccttgaaatgtaagtaagtctttactggatagctttaaatatatgtgcacttggcctttctctccccagccctctttttagagtattctaaatagttaaagacccagactaccttgccccctattgttgttcaaatatggtgttgtactcagatccttgcattctagaaagcttatttcattctcccatgtcataagtttgtcagctctgcactcagttgcctggggggatatggcaagtgctataacagaggctgtctttcatattttattttgaaccttttccactgttcaccatctctctctcgttttttaaggatcaagctagtttagtttacctaagaacataggcctatgggcatgactacaaacctctttctgttcctcttatgaaggccagtatgtcattttagagtgccctgttcaaatttaaatggggtgacaatacctcagacttgactgcctaggttgaattttttctcctgggttttctatgcagtgggtattttcaggtagaggctagaaagctttagcctttttcccaaggcttgctgaattgtaggagttttgtcttagaatgctttttctagacactttaagaactttaagaagattcaaacttattacccaaatttcctgtaggctttgttttgtcagtttttgcttctgtcttgcctggaggcctgacacctcctgtcttccaggtaaattgacttcccttgtacatcttaccagaaagatatttaccctaacttgttacacaaactattgccacagtacctgtggatttttaagttaactaacatgtgtatttctctttaaaggttttgtgcacagaccaaacaaatcaccctcagtcttcccagcagtcagatgtggtaactaagactaggacggataatataggttgtgaggtggcaaacaacttagggtcctaagattttgccaagactgtcatcattacctggagtataatgggactaactatacctccctttaaggacaatggaaacattctattgaaaccatcctcacagggttaacaagaattagatgctgggttctggacagaaatatagttgtaattaagcattaatcaggctgcactttggcccacttttcatctcaccatcctgtattcttcaaccagtgatcccccacctcggtcactccaactcccttaaaatacctagacctaaacggctcagacaggcagatttgaggtttccccctgtctccttattcggcagccttatgattaaacttccttctctgctgc

SEQ ID NO: 9565 - protein, 35 aa, Homo sapiens [sequence omitted]

SEQ ID NO: 9566 - DNA, 1068 bp, Homo sapiens
tccccgctctgctctgtccggtcacaggactttttgccctctgttcccgggtccctcaggcggccacccagtgggcacactcccaggcggcgctccggccccgcgctccctccctctgcctttcattcccagctgtcaacatcctggaagctttgaagctcaggaaagaagagaaatccactgagaacagtctgtaaaggtccgtagtgctatctacatccagacggtggaagggagagaaagagaaagaaggtatcctaggaatacctgcctgcttagaccctctataaaagctctgtgcatcctgccactgaggactccgaagaggtagcagtcttctgaaagacttcaactgtgaggacatgtcgttcagatttggccaacatctcatcaagccctctgtagtgtttctcaaaacagaactgtccttcgctcttgtgaataggaaacctgtggtaccaggacatgtccttgtgtgcccgctgcggccagtggagcgcttccatgacctgcgtcctgatgaagtggccgatttgtttcagacgacccagagagtcgggacagtggtggaaaaacatttccatgggacctctctcaccttttccatgcaggatggccccgaagccggacagactgtgaagcacgttcacgtccatgttcttcccaggaaggctggagactttcacaggaatgacagcatctatgaggagctccagaaacatgacaaggaggactttcctgcctcttggagatcagaggaggaaatggcagcagaagccgcagctctgcgggtctactttcagtgacacagatcctgaattccagcaaaagagctattgccaaccagtttgaagaccgccccccgcctctccccaagaggaactgaatcagcatgaaaatgcagtttcttcatctcaccatcctgtattcttcaaccagtgatcccccacctcggtcactccaactcccttaaaatacctagacctaaacggctcagacaggcagatttgaggtttccccctgtctccttattcggcagccttatgattaaacttccttctctgctgc

SEQ ID NO: 9567 - protein, 147 aa, Homo sapiens; identical to SEQ ID NO: 4466

SEQ ID NO: 9568 - DNA, 1291 bp, Homo sapiens
atagcccacaccttgacagtacattcagtcactggatgattttgtattgaagtctgtaagttcaagaactaaaacaatccaaaacggctactacaggtgaagttgagagcaatggcccaacctcagctgtatctaccagaaccctttaagattgcctacagaaaagttggacagtgccgaagattccagcaactcaagaagaaaaatggctcattcaaaaggaaggggatagaaagatggcatagagctgtgtctaccaacttactaaaacaaaatgtattggtccctaaagaggaatcatccagtgatagtgacatgggatttcatgaaagccagcaaaatcagaaaagtaatttgaagacgaaagtgaagactgcttttgggaggatgctgtcctacaagtatagaagcaagccagcatgtgccagccaagagggctccactgaccataaagaagccctcctgtcaaacacgcagagccttctccctaggattgtcaaggagttttcatctcccaagttatttacagcaaaaatgagaaagctctcagagaatgcgactatacaacttgatgttgtagaggcagagacagaggagataacccagggaaacacactccttcgggccaggagaaccaccaagcggttatctgtgacatctcttccttcaggactgcaaaaggggccatattcaccaaaaaagagaccacactttccagcacttaaaaaaaagaagcgtggcatggaaaacatccttcgaaaatcagatttgacagtaggaaagcttcaaatgcaggtggatgacctcatagaaacagtgactgataaatccatgaagctactggcccaaagacatgctgagcttcaacagtgtgagtttctgggggatgaaattcttcagtcttctaaacagttccagaggatatccaagagaaccatgaggaagtataaattaaaaaatatgaccacaaaaggacctggagacagctgacctgagactccttgaggaacacaggaaaaggtcttcagacaataacttaaccaattaccaatcagaaaatcgactccacctatgagctggaagtccttcccaccccccaccttcaagctgtcctgcttttctgtactgaaccaatatacatcttacgtgtattcattgatgtctgcctgtaacttctgtccccctaaaatgcataaaatcagctgtaattcaaccaccttcggcacatctcaggacctcctgatgctgtggcatgtctttaaccttggcaaaataaactcctaaattgatt

SEQ ID NO: 9569 - protein, 292 aa, Homo sapiens
MAQPQLYLPEPFKIAYRKVGQCRRFQQLKKKNGSFKRKGIERWHRAVSTNLLKQNVLVPKEESSSDSDMGFHESQQNQKSNLKTKVKTAFGRMLSYKYRSKPACASQEGSTDHKEALLSNTQSLLPRIVKEFSSPKLFTAKMRKLSENATIQLDVVEAETEEITQGNTLLRARRTTKRLSVTSLPSGLQKGPYSPKKRPHFPALKKKKRGMENILRKSDLTVGKLQMQVDDLIETVTDKSMKLLAQRHAELQQCEFLGDEILQSSKQFQRISKRTMRKYKLKNMTTKGPGDS

SEQ ID NO: 9570 - DNA, 992 bp, Homo sapiens
gcctcctcctccatggctgtttacccggctgcattgtgggagtttgacctccgccgccgccaaccgccgcctcagcttgcgccgccgccgccgccgccgccgccgcgcacgccatgggagccgtgactgacgacgaagttatacggaagcgtctcctcattgatggagatggtgctggagatgatcggagaattaatctgctagtgaagagtttcattaaatggtgcaactctgggtcccaggaagagggatatagccagtaccaacgtatgctgagcacgctgtctcaatgtgaattttcaatgggcaaaactttactagtatatgatatgaatctcagagaaatggaaaattatgaaaaaatttacaaggaaatagaatgtagcatagctggagcacatgaaaaaattgctgagtgcaaaaagcaaattcttcaagcaaaacgaatacgaaaaaatcgccaagaatatgatgctttggcaaaagtgattcagcaccatccagacaggcatgagacattaaaggaactagaggctctgggaaaagaattagagcatctttcacacattaaagaaagtgttgaagataagctggaattgagacggaaacagtttcatgttcttcttagtaccatccatgaacttcagcaaacattggaaaatgatgaaaaactctcagaggtagaagaagctcaggaagcaagcatggaaacagatcctaagccatagacaggctaattgcccaccactcccaggaatattgaaatagctacatgaccataatgtgtttaaaatgtggtatgctcttgagatatttaaagttttggcagtaaaatactctgtttttaagtatgaatgtatttcattcatatttcctctcacaaaggaaaatgacttcagtatagatttgtttttattaaaatgcattttttattcttaagtggtaggaagcaacatccaaaaatgcttaataaaatgcttttaagctgcata

SEQ ID NO: 9571 - protein, 204 aa, Homo sapiens
MGAVTDDEVIRKRLLIDGDGAGDDRRINLLVKSFIKWCNSGSQEEGYSQYQRMLSTLSQCEFSMGKTLLVYDMNLREMENYEKIYKEIECSIAGAHEKIAECKKQILQAKRIRKNRQEYDALAKVIQHHPDRHETLKELEALGKELEHLSHIKESVEDKLELRRKQFHVLLSTIHELQQTLENDEKLSEVEEAQEASMETDPKP

SEQ ID NO: 9572 - DNA, 892 bp, Homo sapiens
gcggccgcgggcgccgccgcctcctcctccatggctgtttacccggctgcattgtgggagtttgacctccgccgccgccaaccgccgcctcagcttgcgccgccgccgccgccgccgccgccgcgcacgccatgggagccgtgactgacgatatagccagtaccaacgtatgctgagcacgctgtctcaatgtgaattttcaatgggcaaaactttactagtatatgatatgaatctcagagaaatggaaaattatgaaaaaatttacaaggaaatagaatgtagcatagctggagcacatgaaaaaattgctgagtgcaaaaagcaaattcttcaagcaaaacgaatacgaaaaaatcgccaagaatatgatgctttggcaaaagtgattcagcaccatccagacaggcatgagacattaaaggaactagaggctctgggaaaagaattagagcatctttcacacattaaagaaagtgttgaagataagctggaattgagacggaaacagtttcatgttcttcttagtaccatccatgaacttcagcaaacattggaaaatgatgaaaaactctcagaggtagaagaagctcaggaagcaagcatggaaacagatcctaagccatagacaggctaattgcccaccactcccaggaatattgaaatagctacatgaccataatgtgtttaaaatgtggtatgctcttgagatatttaaagttttggcagtaaaatactctgtttttaagtatgaatgtatttcattcatatttcctctcacaaaggaaaatgacttcagtatagatttgtttttattaaaatgcattttttattcttaagtggtaggaagcaacatccaaaaatgcttaataaaatgcttttaagctgcata

SEQ ID NO: 9573 - protein, 152 aa, Homo sapiens
MLSTLSQCEFSMGKTLLVYDMNLREMENYEKIYKEIECSIAGAHEKIAECKKQILQAKRIRKNRQEYDALAKVIQHHPDRHETLKELEALGKELEHLSHIKESVEDKLELRRKQFHVLLSTIHELQQTLENDEKLSEVEEAQEASMETDPKP

SEQ ID NO: 9574 - DNA, 945 bp, Homo sapiens
gcggccgcccccggggagtaccgggagcgcggggagcgcgggtcccgcgccgccgccgcgcacgccatgggagccgtgactgacgacgaagttatacggaagcgtctcctcattgatggagatggtgctggagatgatcggagaattaatctgctagtgaagagtttcattaaatggtgcaactctgggtcccaggaagagggatatagccagtaccaacgtatgctgagcacgctgtctcaatgtgaattttcaatgggcaaaactttactagtatatgatatgaatctcagagaaatggaaaattatgaaaaaatttacaaggaaatagaatgtagcatagctggagcacatgaaaaaattgctgagtgcaaaaagcaaattcttcaagcaaaacgaatacgaaaaaatcgccaagaatatgatgctttggcaaaagtgattcagcaccatccagacaggcatgagacattaaaggaactagaggctctgggaaaagaattagagcatctttcacacattaaagaaagtgttgaagataagctggaattgagacggaaacagtttcatgttcttcttagtaccatccatgaacttcagcaaacattggaaaatgatgaaaaactctcagaggtagaagaagctcaggaagcaagcatggaaacagatcctaagccatagacaggctaattgcccaccactcccaggaatattgaaatagctacatgaccataatgtgtttaaaatgtggtatgctcttgagatatttaaagttttggcagtaaaatactctgtttttaagtatgaatgtatttcattcatatttcctctcacaaaggaaaatgacttcagtatagatttgtttttattaaaatgcattttttattcttaagtggtaggaagcaacatccaaaaatgcttaataaaatgcttttaagctgcata

SEQ ID NO: 9575 - protein, 204 aa, Homo sapiens; identical to SEQ ID NO: 9571

SEQ ID NO: 9576 - DNA, 673 bp, Homo sapiens
ccgtgtctcattaaaaaaaaaaaaaacacacacacacatacacactgtctctgttatgtgcagaatgattagaggaagagaaaatgaggagctaagtttcctcgccacttactaacgtttacgtagtgctgttaggtattattctaattgttatccccattttacagatgaaacagacacaggttagcttgcctaaggtcgcacagatagtagttatagagggtcaaaggcagggagaccacctgccgagttcctgctcttcactattatgcgtcctgtgtctgctacttctgcagtggccctggtgagagacaatgaggacttctctcttaatctgcacaggttgccttttcctgccttttctatcaggtgacactccacttattcctcaagacccacctcaaaaatcccctcttttctttcctagaagtagttgaccttctgcctactagccatattattttatgcatattgctgctgtcacccttaatacgttatttatatgccttatgctagaaaacatttaaggcagttcactgtaatgagaaaatataaaaattaaacggattagaaaacaagacaaaaagaacattgagattaggaaaaataaagggaagtcagaagtggggtgatcctcaaaatgcaggaggataaagtctagtacattaattaa

SEQ ID NO: 9577 - protein, 40 aa, Homo sapiens
MRTSLLICTGCLFLPFLSGDTPLIPQDPPQKSPLFFPRSS

SEQ ID NO: 9578 - DNA, 3513 bp, Homo sapiens
gaaaaagggtgaaagagaaacttggcgacctcccggaggagttcgcgaagcgaccaggagcgtgttgccatcgtcctcacccggcacccaattccaccacagagtcgggatttcgtcggtgatcgtgatggggtgcttttatttttctctttgattttcaaaaaatgtctatgtgactgtccctatcttaaggggaagttgaaagtgggggcgggggtgctcaatgagaaacgttgccttgtgtgtagttgtttggagcacactgcaaattatattggcatctctttccaaaagtcactttgattcaacttcgatagctttctcgtaaatggcacgtttaggtggtgagaggtggatgaggaaacaggcaccagtgcagctgatttgacctccagtgggatagatacgattagcaccaggatcgtgtctcattttgaacccagatctgaacagaattaagacgaacgagctttcacaattgcagcagatgaagatccattggtaaattgatcaggatttttggcctaccctccaaagaaaaggagcggaaagaatgtcggagcgggccgcggatgacgtcaggggggagccgcgccgcgcggcggcggcggcgggcggagcagcggccgcggccgcccggcagcagcagcagcagcagcagcagcagcagccgccgcctccgcagccccagcggcagcagcacccgccaccgccgccacggcgcacacggccggaggacggcgggcccggcgccgcctccacctcggccgccgcaatggcgacggtcggggagcgcaggcctctgcccagtcctgaagtgatgctgggacagtcgtggaatctgtgggttgaggcttccaaacttcctgggaaggacgggacagaattggacgaaagtttcaaggagtttgggaaaaaccgcgaagtcatggggctctgtcgggaagacatgccaatatttggtttctgtccagcccatgatgatttctacttggtggtgtgtaacgactgtaatcaggttgtcaaaccgcaggcatttcaatcacattatgaaagaagacatagctcatccagcaagccgcctttggccgttcctcccacttcagtattttccttcttcccttctctgtccaaaagcaaaggaggcagtgcaagtggaagcaaccgttcttccagtggaggtgttcttagcgcatcctcatcaagttccaagttgttgaaatcacccaaagagaaactgcagctcagggggaacaccaggccaatgcatcccattcagcaaagtagagttccccatggtagaatcatgacaccctctgtgaaagtggaaaagattcatccgaaaatggatggcacactactgaaatctgcggtggggccaacctgtcctgctactgtgagttccttagtcaagcctggccttaactgcccctcaataccaaagccaaccttgccttcacctggacagattctgaatggcaaagggcttcctgcaccgcccactctggaaaagaaacctgaagacaattccaataataggaaatttttaaataagagattatcagaaagagagtttgatcctgacatccactgtggggttattgatctcgacaccaagaagccctgcacccggtctttgacatgcaagacacattccttaacccagcgcagggctgtccagggtagaagaaaacgatttgatgtgttattagccgagcacaaaaacaaaaccagggaaaaggaattgattcgccatccggactctcagcaaccaccgcagcctctcagggacccgcatcccgcccctcctagaacgtcacaggagccgcaccaaaaccctcacggagtgattccttccgaatcaaagccttttgtagctagtaaacctaaacctcacacccccagtcttccaaggcctccaggctgccctgctcagcaaggtgggagtgcccccattgaccctcctccagtccatgaatctccacaccctcccctgcctgccactgagccagcttctcggttatccagtgaggagggcgaaggcgatgacaaagaagagtctgttgaaaaactggactgtcattattcaggtcatcatcctcagccagcatctttttgcacatttgggagccggcagataggaagaggctattacgtgtttgactccaggtggaatcgacttcgctgcgccctcaacctcatggtggagaagcatctgaatgcacagctatggaagaaaatcccaccagtgcccagtaccacctcacccatctccacacgtattcctcaccggacaaactctgtgccgacatcacaatgtggagtcagctatctggcagcagccaccgtctctacatccccagtcctgctctcatctacctgcatctccccaaatagcaaatcggtaccagctcatggaaccacactaaatgcacagcctgctgcttcaggggcgatggatcctgtgtgcagtatgcaatccagacaagtgtcctcttcatcctcatccccttccacgccctctggcctttcctcggttccttcctcccccatgtccaggaaacctcagaaattgaaatccagcaaatctttgaggcccaaggagtcttctggtaacagcactaactgtcaaaatgccagtagcagtaccagtggcggctcaggaaagaaacgcaaaaacagttccccactgttggttcactcttcctcctcctcttcctcctcctcctcttcttctcattccatggagtcttttaggaaaaactgtgtggctcactctgggcctccctacccctcaacggtaacatcttcccatagcatcggcctcaactgtgtgacgaataaagcaaatgcggtgaacgtccggcatgaccagtcagggaggggcccccccaccgggagccctgctgaatccatcaagaggatgagtgtgatggtgaacagcagtgattctactctttctcttgggccattcattcaccagtccaatgaactgcctgtcaactcccacggcagtttttcccactcacacactcctctagacaaactcataggaaagaaaagaaagtgctcacccagctcgagcagcatcaacaacagcagcagcaaacccacaaaggttgccaaagtgccagccgtgaacaatgtccacatgaaacacacaggcaccatcccaggggcacaaggactgatgaacagttccctccttcatcaggtaggaaatggactgtgagccccatgggaatgcccatttcttctcccttaagatcttttgtcagctcagaaatgtgtttggttgggttggttggttggtttgtaaacagatattcagcttcatggtgtcttcttaaaaaaaaaaaaaaaaaaaaaaaaggttcacggccgtatgaaggtaaaacaggctcttctgccagaatttctggtgcctttggaagatgttcttcagtaaagaaactacagtaatgcatttttagtagagctgcagaaagcatcggttgtgacagcaaaatcata

SEQ ID NO: 9579 - protein, 892 aa, Homo sapiens
MSERAADDVRGEPRRAAAAAGGAAAAAARQQQQQQQQQQPPPPQPQRQQHPPPPPRRTRPEDGGPGAASTSAAAMATVGERRPLPSPEVMLGQSWNLWVEASKLPGKDGTELDESFKEFGKNREVMGLCREDMPIFGFCPAHDDFYLVVCNDCNQVVKPQAFQSHYERRHSSSSKPPLAVPPTSVFSFFPSLSKSKGGSASGSNRSSSGGVLSASSSSSKLLKSPKEKLQLRGNTRPMHPIQQSRVPHGRIMTPSVKVEKIHPKMDGTLLKSAVGPTCPATVSSLVKPGLNCPSIPKPTLPSPGQILNGKGLPAPPTLEKKPEDNSNNRKFLNKRLSEREFDPDIHCGVIDLDTKKPCTRSLTCKTHSLTQRRAVQGRRKRFDVLLAEHKNKTREKELIRHPDSQQPPQPLRDPHPAPPRTSQEPHQNPHGVIPSESKPFVASKPKPHTPSLPRPPGCPAQQGGSAPIDPPPVHESPHPPLPATEPASRLSSEEGEGDDKEESVEKLDCHYSGHHPQPASFCTFGSRQIGRGYYVFDSRWNRLRCALNLMVEKHLNAQLWKKIPPVPSTTSPISTRIPHRTNSVPTSQCGVSYLAAATVSTSPVLLSSTCISPNSKSVPAHGTTLNAQPAASGAMDPVCSMQSRQVSSSSSSPSTPSGLSSVPSSPMSRKPQKLKSSKSLRPKESSGNSTNCQNASSSTSGGSGKKRKNSSPLLVHSSSSSSSSSSSSHSMESFRKNCVAHSGPPYPSTVTSSHSIGLNCVTNKANAVNVRHDQSGRGPPTGSPAESIKRMSVMVNSSDSTLSLGPFIHQSNELPVNSHGSFSHSHTPLDKLIGKKRKCSPSSSSINNSSSKPTKVAKVPAVNNVHMKHTGTIPGAQGLMNSSLLHQVGNGL

SEQ ID NO: 9580 - DNA, 7393 bp, Homo sapiens
aaagggtgaaagagaaacttggcgacctcccggaggagttcgcgaagcgaccaggagcgtgttgccatcgtcctcacccggcacccaattccaccacagagtcgggatttcgtcggtgatcgtgatggggtgcttttatttttctctttgattttcaaaaaatgtctatgtgactgtccctatcttaaggggaagttgaaagtgggggcgggggtgctcaatgagaaacgttgccttgtgtgtagttgtttggagcacactgcaaattatattggcatctctttccaaaagtcactttgattcaacttcgatagctttctcgtaaatggcacgtttaggtggtgagaggtggatgaggaaacaggcaccagtgcagctgatttgacctccagtgggatagatacgattagcaccaggatcgtgtctcattttgaacccagatctgaacagaattaagacgaacgagctttcacaattgcagcagatgaagatccattggtaaattgatcaggatttttggcctaccctccaaagaaaaggagcggaaagaatgtcggagcgggccgcggatgacgtcaggggggagccgcgccgcgcggcggcggcggcgggcggagcagcggccgcggccgcccggcagcagcagcagcagcagcagcagcagcagccgccgcctccgcagccccagcggcagcagcacccgccaccgccgccacggcgcacacggccggaggacggcgggcccggcgccgcctccacctcggccgccgcaatggcgacggtcggggagcgcaggcctctgcccagtcctgaagtgatgctgggacagtcgtggaatctgtgggttgaggcttccaaacttcctgggaaggacgggacagaattggacgaaagtttcaaggagtttgggaaaaaccgcgaagtcatggggctctgtcgggaagacatgccaatatttggtttctgtccagcccatgatgatttctacttggtggtgtgtaacgactgtaatcaggttgtcaaaccgcaggcatttcaatcacattatgaaagaagacatagctcatccagcaagccgcctttggccgttcctcccacttcagtattttccttcttcccttctctgtccaaaagcaaaggaggcagtgcaagtggaagcaaccgttcttccagtggaggtgttcttagcgcatcctcatcaagttccaagttgttgaaatcacccaaagagaaactgcagctcagggggaacaccaggccaatgcatcccattcagcaaagtagagttccccatggtagaatcatgacaccctctgtgaaagtggaaaagattcatccgaaaatggatggcacactactgaaatctgcggtggggccaacctgtcctgctactgtgagttccttagtcaagcctggccttaactgcccctcaataccaaagccaaccttgccttcacctggacagattctgaatggcaaagggcttcctgcaccgcccactctggaaaagaaacctgaagacaattccaataataggaaatttttaaataagagattatcagaaagagagtttgatcctgacatccactgtggggttattgatctcgacaccaagaagccctgcacccggtctttgacatgcaagacacattccttaacccagcgcagggctgtccagggtagaagaaaacgatttgatgtgttattagccgagcacaaaaacaaaaccagggaaaaggaattgattcgccatccggactctcagcaaccaccgcagcctctcagggacccgcatcccgcccctcctagaacgtcacaggagccgcaccaaaaccctcacggagtgattccttccgaatcaaagccttttgtagctagtaaacctaaacctcacacccccagtcttccaaggcctccaggctgccctgctcagcaaggtgggagtgcccccattgaccctcctccagtccatgaatctccacaccctcccctgcctgccactgagccagcttctcggttatccagtgaggagggcgaaggcgatgacaaagaagagtctgttgaaaaactggactgtcattattcaggtcatcatcctcagccagcatctttttgcacatttgggagccggcagataggaagaggctattacgtgtttgactccaggtggaatcgacttcgctgcgccctcaacctcatggtggagaagcatctgaatgcacagctatggaagaaaatcccaccagtgcccagtaccacctcacccatctccacacgtattcctcaccggacaaactctgtgccgacatcacaatgtggagtcagctatctggcagcagccaccgtctctacatccccagtcctgctctcatctacctgcatctccccaaatagcaaatcggtaccagctcatggaaccacactaaatgcacagcctgctgcttcaggggcgatggatcctgtgtgcagtatgcaatccagacaagtgtcctcttcatcctcatccccttccacgccctctggcctttcctcggttccttcctcccccatgtccaggaaacctcagaaattgaaatccagcaaatctttgaggcccaaggagtcttctggtaacagcactaactgtcaaaatgccagtagcagtaccagtggcggctcaggaaagaaacgcaaaaacagttccccactgttggttcactcttcctcctcctcttcctcctcctcctcttcttctcattccatggagtcttttaggaaaaactgtgtggctcactctgggcctccctacccctcaacggtaacatcttcccatagcatcggcctcaactgtgtgacgaataaagcaaatgcggtgaacgtccggcatgaccagtcagggaggggcccccccaccgggagccctgctgaatccatcaagaggatgagtgtgatggtgaacagcagtgattctactctttctcttgggccattcattcaccagtccaatgaactgcctgtcaactcccacggcagtttttcccactcacacactcctctagacaaactcataggaaagaaaagaaagtgctcacccagctcgagcagcatcaacaacagcagcagcaaacccacaaaggttgccaaagtgccagccgtgaacaatgtccacatgaaacacacaggcaccatcccaggggcacaaggactgatgaacagttccctccttcatcagccaaaggcacgtccctgacagctgaaaatagcacggggaggaataatgcggacacttttgaggacaagttacacctccactcagcactctggactccacgatgcctttgagtctgttttcccaacctcctgtgggcctcaagggtagaaacctgccgggctgttgttttaacgaggatttccctgaagctatgtctctagcagtgagtactcataaaggacactggatcaagttcagccaccgaattgcttttatcagtgttaaagtggtctgaactgcttgctaccaatctgtgagaagtttttgtttttgttttgttttttaacttgcagtatatcacagagccactcttcaagtagattggctgggcaaaagaatgttttggcaagagcgttactgtagacctttctccctccttccttttactaccatttttttttaacactgtcatctgtaggtcactctccagcagttaggcaccttaactggagaccagaaaccttccagagaacacagggctgcatcccgagcaaccctctgaagaagggaattaggctttagattttgatagcaatgttccaggaatgaaatatagatgttagcccaagacaccatgacaaaatagcccagccttttgagagtaatttgggaaaagaagctgtcagaagtttctaacttacaaactggtttgaaatttttgatgcccagacagcaagtataaatcattttggaggcttacttttcatgatacaaaagcaattctgtgtgatttttttttttaagaagaaagaaaatgcaagctagttttgagaaaggaaggccaaattgggtcgggggagggtgggagtgaggaagttaaaatcactatagggagaaaaaacttttttcaagatttccaaagagatgaaattttcttaatccttttaagttttcatagtaaacagtatggcagattgggttggttgtcctacctggtctatttttaaaagtcaccttttaaagtgacattattagatacacttaaatgtttccaaggcactctctacattacccttgtttttctctttggatactgtcctgggactaagtgtagatttctgcttcaagcacttctggcattgtgtgtttttgtatgcactccccttcatgccacttcagatgtttatttggatgtggttggggacgagagcagacaccaaggaaagggagttggagagaatgtaagtcctgacctgaaggtcttttgtgatgcatgtataggattgccctgacacacaccctcctttcttgggattataccagccatcttcctgagagttttggagccctctaggatattttttctagtaccccaccccccacccctaaagaaagaccttaatatgttaaaacagcattgcttggagaaggtgtcattgaattccgggacgagccggagcctttaaatgggtgcttccaccactacaggctcctgacacgagtaacaggcactgttgcttagaagaacacacgaagttgccgaacacagggtaaaatttccaaggcgctgatcgttgccctggccagggcctgatgagagccagtcagtacattctttttttcctacagttcttgggtttcaaacttcagtttcagggaatttcaagtcaacaacaggtagaatgaataaacttggttaccagcctaataatgtgaattgctacagaattattcttattatgtaagaaaacaaaaactttatgcagatactttagctataaattgatgtaaaatactgatttttttaaaggaaggagagaacagtatcttgttcaattattatgcaatcaatcagtaaatgtttttaaaatgatactacaggagagcttagtaaggagagggcatggatgggccagtttggcatagttgggagaaatcagtctggtttccatcccagtcggggaagagagaggtgagagggaatcagaacgtacctagttgattccttggtgacaagtgcaatggggtatgggtagaatttattttcagagccaagaggacttgatggttataaataaagttgcctttagcaatggaatttacagatcgatcatgttgttccgaaagatgtgaataggatccacaataacaagttgattcagactaatgtagatatttagattagcaagtattgaacatttgatttcttagactgaggttttaaatgaatttcattatttctcccggtaatacacagagcatcgggattaggaaattagccattttggattctgtctgccacaaacagacctattctaaacagtgctattaaattttagactgttgttcaaatattttattttctcctaaactactttttatggtgatgaataattaagaccatttaaaacacgggagtacaagtatttttttgaattaaattaacttgcaaaaaccaaatttgcagtggttgggttgtttctagacagactttggtatcaatttaaaaccaagataatttttatattctttccaatagaatttcatgacaactcctgcagttttcttaacctacaaaaaaaaaaaaaaagtgctgcaatgatgaacaaagaattatacaaaacctacttttgtatctttattttggaatttcttgttctattataaatatggaagtatccctatttcagaagacatattttgttaaaaatgaattgtacatatttaaatatgtatttttgcacaggtctttttttctgatatcctgttttggtacaattgagatcatctagtatttatttattaattaataaaagtaaatacctttttataatttgaagtggttcactgccaagccaatagttctagaacctgcctcctttacagttttaagggatgcctctgttctgtgaaaagtctttgtcccttttagtgtctcgggagtggattcatacagatgaagtgggcattgcttcttcctggttgcctggtttcccgatagactacatgtaactaagtgacacactgcttttcttttgttagtattttatgtgtgggagtatgtgactgcgtgtgtgtgtgcctgtgcgtgtgtgtgtatactcagcacatgtatgttactatgtgatgtggtttaaaactaatggaaaaaactgaaagtgcctgaaactagttttaagcttagacagaatctctttaaaaagacttgaatgttcagttgaacttttggagtttgctttttccacctaaatattgtttctaaaattttaggggcggagttgaaaaccaccaatgctggtaattttataaggtattttaaaattaagacctcttggttcatagtaattcaattggtgatggattgcctggtggcaccaagggttacagatctttttgtcagccagcaacttacacgatgtgtccgttttgttattcactcatgaaatacaatttaaaatatttaaaatattttgtattccaaaaatataatacaaagaagtacctctgagaacattgaaaaaaatgtataatttgaaaaatgtaacttataagggcagctgtcttcctgcaagagttctgttgccaaggaatttcttaatgtcgctcattctgtccagggggtttggggcgattgggctttgaaaaaatattcttaaaagtttgtttagcagaaaataatcacttttacattttgtgcaaaacattttacattttcagataatttaaatgagcactacatactgtcagtgtgaatgtagggccttgaaagcattttgcttttttttttttttttttttttttgagcttggttataaaagcaatctcctgtgttaaaaacgtgtgaatagtttgataatttgtacacataatcaagagcatctcagctggactttgtgttggctgctgtatagaacatgaacaaatgtcaagggatagaaaattactttggatatttaaaagagaagaaatatatagtctatttgttttgtaacaagtttctgtaaataaaataatttatactatttataagaaaaggttgtgctttgctttataagaaattagcttgtggaacaaacatgttactaaacgggcaataaaattaggacttctcaataaataaggttggctgcatgaaatattgtacgtttctgcctcgttgtgatactaaaccctttcagtctactctgacttttcatcactttt

SEQ ID NO: 9581 - protein, 892 aa, Homo sapiens; identical to SEQ ID NO: 812

SEQ ID NO: 9582 - DNA, 1698 bp, Homo sapiens
gcgcgccagggatcttggcatgcccgtatgtgtgggacgcggtcaaggtgtgagagaagttcaaaacagggtgccccagaggcagcacacactctgtacgggggacatctcgtgcttttttccctttctcttccatgacgctcagggctaggcattgtcactctcatgcttcacagcctccggtactcagaggcagttctgtctttcctgattagctcctttcctgaaggatctagaaccctgactgggcatgccagtgtgggagtcagcaagcacgcggctatgttttctcttgcagttttgcacatttgggagccggcagataggaagaggctattacgtgtttgactccaggtggaatcgacttcgctgcgccctcaacctcatggtggagaagcatctgaatgcacagctatggaagaaaatcccaccagtgcccagtaccacctcacccatctccacacgtattcctcaccggacaaactctgtgccgacatcacaatgtggagtcagctatctggcagcagccaccgtctctacatccccagtcctgctctcatctacctgcatctccccaaatagcaaatcggtaccagctcatggaaccacactaaatgcacagcctgctgcttcaggggcgatggatcctgtgtgcagtatgcaatccagacaagtgtcctcttcatcctcatccccttccacgccctctggcctttcctcggttccttcctcccccatgtccaggaaacctcagaaattgaaatccagcaaatctttgaggcccaaggagtcttctggtaacagcactaactgtcaaaatgccagtagcagtaccagtggcggctcaggaaagaaacgcaaaaacagttccccactgttggttcactcttcctcctcctcttcctcctcctcctcttcttctcattccatggagtcttttaggaaaaactgtgtggctcactctgggcctccctacccctcaacggtaacatcttcccatagcatcggcctcaactgtgtgacgaataaagcaaatgcggtgaacgtccggcatgaccagtcagggaggggcccccccaccgggagccctgctgaatccatcaagaggatgagtgtgatggtgaacagcagtgattctactctttctcttgggccattcattcaccagtccaatgaactgcctgtcaactcccacggcagtttttcccactcacacactcctctagacaaactcataggaaagaaaagaaagtgctcacccagctcgagcagcatcaacaacagcagcagcaaacccacaaaggttgccaaagtgccagccgtgaacaatgtccacatgaaacacacaggcaccatcccaggggcacaaggactgatgaacagttccctccttcatcaggtaggaaatggactgtgagccccatgggaatgcccatttcttctcccttaagatcttttgtcagctcagaaatgtgtttggttgggttggttggttggtttgtaaacagatattcagcttcatggtgtcttcttaaaaaaaaaaaaaaaaaaaaaaaaggttcacggccgtatgaaggtaaaacaggctcttctgccagaatttctggtgcctttggaagatgttcttcagtaaagaaactacagtaatgcatttttagtagagctgcagaaagcatcggttgtgacagcaaaatcata

SEQ ID NO: 9583 - protein, 388 aa, Homo sapiens
MPVWESASTRLCFLLQFCTFGSRQIGRGYYVFDSRWNRLRCALNLMVEKHLNAQLWKKIPPVPSTTSPISTRIPHRTNSVPTSQCGVSYLAAATVSTSPVLLSSTCISPNSKSVPAHGTTLNAQPAASGAMDPVCSMQSRQVSSSSSSPSTPSGLSSVPSSPMSRKPQKLKSSKSLRPKESSGNSTNCQNASSSTSGGSGKKRKNSSPLLVHSSSSSSSSSSSSHSMESFRKNCVAHSGPPYPSTVTSSHSIGLNCVTNKANAVNVRHDQSGRGPPTGSPAESIKRMSVMVNSSDSTLSLGPFIHQSNELPVNSHGSFSHSHTPLDKLIGKKRKCSPSSSSINNSSSKPTKVAKVPAVNNVHMKHTGTIPGAQGLMNSSLLHQVGNGL

SEQ ID NO: 9584 - DNA, 4777 bp, Homo sapiens
ccactgttggttcactcttcctcctcctcttcctcctcctcctcttcttctcattccatggagtcttttaggaaaaactgtgtggctcactctgggcctccctacccctcaacggtaacatcttcccatagcatcggcctcaactgtgtgacgaataaagcaaatgcggtgaacgtccggcatgaccagtcagggaggggcccccccaccgggagccctgctgaatccatcaagaggatgagtgtgatggtgaacagcagtgattctactctttctcttgggccattcattcaccagtccaatgaactgcctgtcaactcccacggcagtttttcccactcacacactcctctagacaaactcataggaaagaaaagaaagtgctcacccagctcgagcagcatcaacaacagcagcagcaaacccacaaaggttgccaaagtgccagccgtgaacaatgtccacatgaaacacacaggcaccatcccaggggcacaaggactgatgaacagttccctccttcatcaggatatctcctcaccttgcttacgaacaggaatttcagcaacatcaccccagagccctgacttaaaatccaaaggcacgtccctgacagctgaaaatagcacggggaggaataatgcggacacttttgaggacaagttacacctccactcagcactctggactccacgatgcctttgagtctgttttcccaacctcctgtgggcctcaagggtagaaacctgccgggctgttgttttaacgaggatttccctgaagctatgtctctagcagtgagtactcataaaggacactggatcaagttcagccaccgaattgcttttatcagtgttaaagtggtctgaactgcttgctaccaatctgtgagaagtttttgtttttgttttgttttttaacttgcagtatatcacagagccactcttcaagtagattggctgggcaaaagaatgttttggcaagagcgttactgtagacctttctccctccttccttttactaccatttttttttaacactgtcatctgtaggtcactctccagcagttaggcaccttaactggagaccagaaaccttccagagaacacagggctgcatcccgagcaaccctctgaagaagggaattaggctttagattttgatagcaatgttccaggaatgaaatatagatgttagcccaagacaccatgacaaaatagcccagccttttgagagtaatttgggaaaagaagctgtcagaagtttctaacttacaaactggtttgaaatttttgatgcccagacagcaagtataaatcattttggaggcttacttttcatgatacaaaagcaattctgtgtgatttttttttttaagaagaaagaaaatgcaagctagttttgagaaaggaaggccaaattgggtcgggggagggtgggagtgaggaagttaaaatcactatagggagaaaaaacttttttcaagatttccaaagagatgaaattttcttaatccttttaagttttcatagtaaacagtatggcagattgggttggttgtcctacctggtctatttttaaaagtcaccttttaaagtgacattattagatacacttaaatgtttccaaggcactctctacattacccttgtttttctctttggatactgtcctgggactaagtgtagatttctgcttcaagcacttctggcattgtgtgtttttgtatgcactccccttcatgccacttcagatgtttatttggatgtggttggggacgagagcagacaccaaggaaagggagttggagagaatgtaagtcctgacctgaaggtcttttgtgatgcatgtataggattgccctgacacacaccctcctttcttgggattataccagccatcttcctgagagttttggagccctctaggatattttttctagtaccccaccccccacccctaaagaaagaccttaatatgttaaaacagcattgcttggagaaggtgtcattgaattccgggacgagccggagcctttaaatgggtgcttccaccactacaggctcctgacacgagtaacaggcactgttgcttagaagaacacacgaagttgccgaacacagggtaaaatttccaaggcgctgatcgttgccctggccagggcctgatgagagccagtcagtacattctttttttcctacagttcttgggtttcaaacttcagtttcagggaatttcaagtcaacaacaggtagaatgaataaacttggttaccagcctaataatgtgaattgctacagaattattcttattatgtaagaaaacaaaaactttatgcagatactttagctataaattgatgtaaaatactgatttttttaaaggaaggagagaacagtatcttgttcaattattatgcaatcaatcagtaaatgtttttaaaatgatactacaggagagcttagtaaggagagggcatggatgggccagtttggcatagttgggagaaatcagtctggtttccatcccagtcggggaagagagaggtgagagggaatcagaacgtacctagttgattccttggtgacaagtgcaatggggtatgggtagaatttattttcagagccaagaggacttgatggttataaataaagttgcctttagcaatggaatttacagatcgatcatgttgttccgaaagatgtgaataggatccacaataacaagttgattcagactaatgtagatatttagattagcaagtattgaacatttgatttcttagactgaggttttaaatgaatttcattatttctcccggtaatacacagagcatcgggattaggaaattagccattttggattctgtctgccacaaacagacctattctaaacagtgctattaaattttagactgttgttcaaatattttattttctcctaaactactttttatggtgatgaataattaagaccatttaaaacacgggagtacaagtatttttttgaattaaattaacttgcaaaaaccaaatttgcagtggttgggttgtttctagacagactttggtatcaatttaaaaccaagataatttttatattctttccaatagaatttcatgacaactcctgcagttttcttaacctacaaaaaaaaaaaaaaagtgctgcaatgatgaacaaagaattatacaaaacctacttttgtatctttattttggaatttcttgttctattataaatatggaagtatccctatttcagaagacatattttgttaaaaatgaattgtacatatttaaatatgtatttttgcacaggtctttttttctgatatcctgttttggtacaattgagatcatctagtatttatttattaattaataaaagtaaatacctttttataatttgaagtggttcactgccaagccaatagttctagaacctgcctcctttacagttttaagggatgcctctgttctgtgaaaagtctttgtcccttttagtgtctcgggagtggattcatacagatgaagtgggcattgcttcttcctggttgcctggtttcccgatagactacatgtaactaagtgacacactgcttttcttttgttagtattttatgtgtgggagtatgtgactgcgtgtgtgtgtgcctgtgcgtgtgtgtgtatactcagcacatgtatgttactatgtgatgtggtttaaaactaatggaaaaaactgaaagtgcctgaaactagttttaagcttagacagaatctctttaaaaagacttgaatgttcagttgaacttttggagtttgctttttccacctaaatattgtttctaaaattttaggggcggagttgaaaaccaccaatgctggtaattttataaggtattttaaaattaagacctcttggttcatagtaattcaattggtgatggattgcctggtggcaccaagggttacagatctttttgtcagccagcaacttacacgatgtgtccgttttgttattcactcatgaaatacaatttaaaatatttaaaatattttgtattccaaaaatataatacaaagaagtacctctgagaacattgaaaaaaatgtataatttgaaaaatgtaacttataagggcagctgtcttcctgcaagagttctgttgccaaggaatttcttaatgtcgctcattctgtccagggggtttggggcgattgggctttgaaaaaatattcttaaaagtttgtttagcagaaaataatcacttttacattttgtgcaaaacattttacattttcagataatttaaatgagcactacatactgtcagtgtgaatgtagggccttgaaagcattttgcttttttttttttttttttttttttgagcttggttataaaagcaatctcctgtgttaaaaacgtgtgaatagtttgataatttgtacacataatcaagagcatctcagctggactttgtgttggctgctgtatagaacatgaacaaatgtcaagggatagaaaattactttggatatttaaaagagaagaaatatatagtctatttgttttgtaacaagtttctgtaaataaaataatttatactatttataagaaaaggttgtgctttgctttataagaaattagcttgtggaacaaacatgttactaaacgggcaataaaattaggacttctcaataaataaggttggctgcatgaaatattgtacgtttctgcctcgttgtgatactaaaccctttcagtctactctgacttttcatcactttt

SEQ ID NO: 9585 - protein, 215 aa, Homo sapiens
MESFRKNCVAHSGPPYPSTVTSSHSIGLNCVTNKANAVNVRHDQSGRGPPTGSPAESIKRMSVMVNSSDSTLSLGPFIHQSNELPVNSHGSFSHSHTPLDKLIGKKRKCSPSSSSINNSSSKPTKVAKVPAVNNVHMKHTGTIPGAQGLMNSSLLHQDISSPCLRTGISATSPQSPDLKSKGTSLTAENSTGRNNADTFEDKLHLHSALWTPRCL

SEQ ID NO: 9586 - DNA, 2773 bp, Homo sapiens
ttgtgaaagaaacgagggagttgatggattgagaaacacattctatttgtacttaggtgcaaatttgatgacatgtagttttggtttaagataagctttttatccagacccggtctaatctcttcctttcttttacatacctcccttactggcaatacaagtgcattttagtattatttggaacacagcataatcatttacctctagaaatccagacatttttactgtttgcaaataaaccattctgataaattatttttgttgcttaaaataagaggaggaaccgctgtgtgttagcaagaatgtccatacctgatatgaaagagtcatgttggcttcagttcctactgccctgtggacttcccattccctccttacttgagtcaaccatccactcagtactttccacaaatctaataatgaggtgctctctgtaggtaaatcctttcactatggcttgtcctcaaacctcccaagaaaaggttcaactgctcaatctcttaacctttttaattccattcccttgcaggtatcccggccctgcataacaagatgatcccaactcaaggaaaggggtttagcagtgttggatcttggcgtatgtgggatttaaccaggcagaaaggcagacaagagtaagattctaggcagagagagcaaatgcgtcgagcatgggtatgaacatgtgagggatagagaataattctgcaggaagtttgctggatggaagggccttatagggttagaaaagctggtgtcagattgtcaaggactttgaatgtcatggggcttctcttccaggaacacatgggatcaggcttagattaacccaaatgtaattgtcagagcccagagatatttcatggtccagtcctagcactgtgcagctgccaaaagtcaaagccattcaaatctgtactgaaaactgtggaaaagcaaaggagcacttaagtctctttccccatgtcttgcattctcactctcttttgcttcaaagatctgtctttacctgcccctgtccccagtcctaacaaaaagcactcccctaaatcaactcttaagttcctctcccttctcactcctttcttagtctcctctttctgtaagaagttcttgctcctgttgttaatggaagttaattaaagtagtatttcaccttgtaaggctgtaattcttggcacttgttatcctcattttctacatccaaagaccatggaccagaatatctcttaggaggtaagggagagtgaggctatcagccaaagaaaaagtctccagggggaaggggagaatcacttataatttaatactttgtggaaaaaacatctctgccacctatggccctccaataacaatggaagacagaatcaacaggtgagaaccttgggacaaaaataagttacaaagctgttgtaatccaggtaagagctattaagtttccaaacgaaggctgactgtgaggataagtgatactgatttcagaaatctttaaaaagtagaaccaacaagccttgaggtctaactctgttcaacattaaagggaagagtgagtctaagaagacttcaggtttctagcttggccaaaccaattgagctttaagtgaaatgtgcgatatggtaacagagaaggaaaaagacataacgatagatttgagctgctggtgggaaattctggtttagtgcccagctggctgtacaggctggttggactttaggagggaggtttgagctggaaaataaagatggagagttgtctttcagttttagatcatcagtgaggtcataagggtagatggagtttacctgggaaaattaagtagctattcgatttggcttattattatgttaaaataatacttctctagtgaagtacttaatatgccagatactgtgccaagcattttatatacatcctctcttttactaagccctcatagggcaggtattttgattccaatcatactgattggaactcctaagaaggtatcttgcttaaggtcccacaacgaataggtggcagatccagggtaattcaggtctgtcagaacagtgattcttaattttttccctcctcagactccaggagtcacatgaagttatgcatcctgtctgaccgaggcacaggcacaccacatttttatattccgcttccaggatatcacaaacctgaagcccatcctccatggcccagagagaaaacccaggacaaaaccttggagaagactattttcatgaagacaaatggagaaggagcagtagagtaaaaagagagcaaatccagctgcctgtacaatccatgccaccgaatgccgtaagtgagacgtaaaagttacgatactgaagagacgtaacctgaccaaggccacagagctggaaaaagaagcaaagccaagccgtttttctcatgcactgctcacaacaagcccctccttccactgactcatgaaaaacacactcataatgcccagcccgcaccctaatgaacagccctcttaagagtggtcatcagacttcaatttcacagactagaattgagaaatggaacaaaaccttgggataccagccttccattttggtagggatcatttaaaaaatggtagggatcatttaaaaaatgtgttggtgtctgaaacttactttgaagtggttaaaaaacataaaatgtatagattgtaacaagcaaatatgttaaaatgtactgtacaattctttctttacaattttatggatgttcgaaatttaaaaaatactagaaagagaatggtcttattta

SEQ ID NO: 9587 - protein, 47 aa, Homo sapiens
MAQRENPGQNLGEDYFHEDKWRRSSRVKREQIQLPVQSMPPNAVSET

SEQ ID NO: 9588 - DNA, 2108 bp, Homo sapiens
cccgcttccgctgccgcagccggtcgtaaccaagttgtgtcctgtcagccgctgtccccttcgccgcgatgccgctggagaacctggaggaggagggtctgcccaagaaccccgacttgcgtatcgcgcagctgcgcttcctgctcagcctgcccgagcaccgcggagacgctgccgtgcgcgacgagctgatggcggccgtccgcgataacagtgaggcccgcacgagcgccgagtcagcggcctaggcctgggccgtccccgcgttccggagcctgcggggactttttttgatggagctccagacccctctgacggggtctcagagaccaggcctggcttctccggcccttagggttttgctttggtttggggataccctgggggacctcgacttgcctcagcggggtctgcatctctctgtgccgccttcccctgtaagggcagcttgggggagaatcgtgaggcattaatatttacccctgtgctaggcacagagtaaaggccccgtgactttctgtcagtggggactgctcccgggcgcggggtattcctgtgggagagttcagcttgcctgtggaagggaaatttgggttcggttctttctggcccttctgtagtgaatgtgtatgtttgaacatatgtatgtgagtatgtgtgtataaaaagtctttccctgtttgaagacttttggaacagaatccggcaagagcaaaccgaggattgccctccctccagccctagtagaggttggcattgccaggattggccgtcacgcaaacctcccaccagcatacgtttatgttttgccaagccgattattaagcgccatcgcatgccttcctgttagtggggaagagactggtggatgacttgtggcggggcggggggtgaaatacgtgggcagactttgacttgagggcacaagtgtccccactcacacatccctctttttgcatgttagacatggctccttactatgaagccttgtgcaaatccctcgactggcagatagacgtggacctactcaataaaatgaagaaggcaaatgaagatgagttgaagcgtttggatgaggagctggaagatgcagagaagaatctaggagagagcgaaattcgcgatgcaatgatggcaaaggccgagtacctctgccggataggtgacaaagagggagctctgacagcctttcgcaagacatatgacaaaactgtggccctgggtcaccgattggatattgtattctatctccttaggattggcttattttatatggataatgatctcatcacacgaaacacagaaaaggccaaaagcttaatagaagaaggaggagactgggacaggagaaaccgcctaaaagtgtatcagggtctttattgtgtggctattcgtgatttcaaacaggcagctgaactcttccttgacactgtttcaacatttacatcctatgaactcatggattataaaacatttgtgacttatactgtctatgtcagtatgattgccttagaaagaccagatctcagggaaaaggtcattaaaggagcagagattcttgaagtgttgcacagtcttccagcagttcggcagtatctgttttcactctatgaatgccgttactctgttttcttccaatcattagcggttgtggaacaggaaatgaaaaaggactggctttttgcccctcattatcgatactatgtaagagaaatgagaattcatgcatacagtcagctgctggaatcatataggtcattaacccttggctatatggcagaagcgtttggtgttggtgtggaattcattgatcaggaactgtccaggtttattgctgccgggagactacactgcaaaatagataaagtgaatgaaatagtagaaaccaacagacctgatagcaagaactggcagtaccaagaaactatcaagaaaggagatctgctactaaacagagttcaaaaactttccagagtaattaatatgtaaagccatgtaactaacaaaggatttgctttagagataattatttggaatttttatagcttacttcacaatgtgcccaggtcagctgtataaaataaatactgcattgttgtttctttcca

SEQ ID NO: 9589 - protein, 343 aa, Homo sapiens
MLDMAPYYEALCKSLDWQIDVDLLNKMKKANEDELKRLDEELEDAEKNLGESEIRDAMMAKAEYLCRIGDKEGALTAFRKTYDKTVALGHRLDIVFYLLRIGLFYMDNDLITRNTEKAKSLIEEGGDWDRRNRLKVYQGLYCVAIRDFKQAAELFLDTVSTFTSYELMDYKTFVTYTVYVSMIALERPDLREKVIKGAEILEVLHSLPAVRQYLFSLYECRYSVFFQSLAVVEQEMKKDWLFAPHYRYYVREMRIHAYSQLLESYRSLTLGYMAEAFGVGVEFIDQELSRFIAAGRLHCKIDKVNEIVETNRPDSKNWQYQETIKKGDLLLNRVQKLSRVINM

SEQ ID NO: 9590 - DNA, 1516 bp, Homo sapiens
cccgcttccgctgccgcagccggtcgtaaccaagttgtgtcctgtcagccgctgtccccttcgccgcgatgccgctggagaacctggaggaggagggtctgcccaagaaccccgacttgcgtatcgcgcagctgcgcttcctgctcagcctgcccgagcaccgcggagacgctgccgtgcgcgacgagctgatggcggccgtccgcgataacaacttttggaacagaatccggcaagagcaaaccgaggattgccctccctccagccctagtagaggttggcattgccaggattggccgtcacgcaaacctcccaccagcatacgtttatgttttgccaagccgattattaagcgccatcgcatgccttcctacatggctccttactatgaagccttgtgcaaatccctcgactggcagatagacgtggacctactcaataaaatgaagaaggcaaatgaagatgagttgaagcgtttggatgaggagctggaagatgcagagaagaatctaggagagagcgaaattcgcgatgcaatgatggcaaaggccgagtacctctgccggataggtgacaaagagggagctctgacagcctttcgcaagacatatgacaaaactgtggccctgggtcaccgattggatattgtattctatctccttaggattggcttattttatatggataatgatctcatcacacgaaacacagaaaaggccaaaagcttaatagaagaaggaggagactgggacaggagaaaccgcctaaaagtgtatcagggtctttattgtgtggctattcgtgatttcaaacaggcagctgaactcttccttgacactgtttcaacatttacatcctatgaactcatggattataaaacatttgtgacttatactgtctatgtcagtatgattgccttagaaagaccagatctcagggaaaaggtcattaaaggagcagagattcttgaagtgttgcacagtcttccagcagttcggcagtatctgttttcactctatgaatgccgttactctgttttcttccaatcattagcggttgtggaacaggaaatgaaaaaggactggctttttgcccctcattatcgatactatgtaagagaaatgagaattcatgcatacagtcagctgctggaatcatataggtcattaacccttggctatatggcagaagcgtttggtgttggtgtggaattcattgatcaggaactgtccaggtttattgctgccgggagactacactgcaaaatagataaagtgaatgaaatagtagaaaccaacagacctgatagcaagaactggcagtaccaagaaactatcaagaaaggagatctgctactaaacagagttcaaaaactttccagagtaattaatatgtaaagccatgtaactaacaaaggatttgctttagagataattatttggaatttttatagcttacttcacaatgtgcccaggtcagctgtataaaataaatactgcattgttgtttctttcca

SEQ ID NO: 9591 - protein, 442 aa, Homo sapiens
MPLENLEEEGLPKNPDLRIAQLRFLLSLPEHRGDAAVRDELMAAVRDNNFWNRIRQEQTEDCPPSSPSRGWHCQDWPSRKPPTSIRLCFAKPIIKRHRMPSYMAPYYEALCKSLDWQIDVDLLNKMKKANEDELKRLDEELEDAEKNLGESEIRDAMMAKAEYLCRIGDKEGALTAFRKTYDKTVALGHRLDIVFYLLRIGLFYMDNDLITRNTEKAKSLIEEGGDWDRRNRLKVYQGLYCVAIRDFKQAAELFLDTVSTFTSYELMDYKTFVTYTVYVSMIALERPDLREKVIKGAEILEVLHSLPAVRQYLFSLYECRYSVFFQSLAVVEQEMKKDWLFAPHYRYYVREMRIHAYSQLLESYRSLTLGYMAEAFGVGVEFIDQELSRFIAAGRLHCKIDKVNEIVETNRPDSKNWQYQETIKKGDLLLNRVQKLSRVINM

SEQ ID NO: 9592 - DNA, 1833 bp, Homo sapiens
aggccttgcgacatggctgttacatgaccttggttggtctgtttccctaacctctttgtgcctcatttgtcttacctactaaataggctaatagtactacctcgcagcatgaagatgattttaataagatgaatgagagtaacgactcgacaaactatggtgattgtttttattaatgctgttattacattttcagttttcaaaaaattttaagctcccatcagttacaaacggaaagtaaaatagctaaaaagggagtgagaaagagattcaagaaattgggcttttgagttgggctgcacccactctgggactccgcagggggccttgagggtggaaaagcccccgtgaccacacaggggcgcaggcgcccaggccgggtgaggcgttcccggaggtgtccagcagaggacgctgccggcggagacgggaccggaagccgggccgcaggcggccgggcgtattcgccgactcctcccgcttccgctgccgcagccggtcgtaaccaagttgtgtcctgtcagccgctgtccccttcgccgcgatgccgctggagaacctggaggaggagggtctgcccaagaaccccgacttgcgtatcgcgcagctgcgcttcctgctcagcctgcccgagcaccgcggagacgctgccgtgcgcgacgagctgatggcggccgtccgcgataacaacatggctccttactatgaagccttgtgcaaatccctcgactggcagatagacgtggacctactcaataaaatgaagaaggcaaatgaagatgagttgaagcgtttggatgaggagctggaagatgcagagaagaatctaggagagagcgaaattcgcgatgcaatgatggcaaaggccgagtacctctgccggataggtgacaaagagggagctctgacagcctttcgcaagacatatgacaaaactgtggccctgggtcaccgattggatattgtattctatctccttaggattggcttattttatatggataatgatctcatcacacgaaacacagaaaaggccaaaagcttaatagaagaaggaggagactgggacaggagaaaccgcctaaaagtgtatcagggtctttattgtgtggctattcgtgatttcaaacaggcagctgaactcttccttgacactgtttcaacatttacatcctatgaactcatggattataaaacatttgtgacttatactgtctatgtcagtatgattgccttagaaagaccagatctcagggaaaaggtcattaaaggagcagagattcttgaagtgttgcacagtcttccagcagttcggcagtatctgttttcactctatgaatgccgttactctgttttcttccaatcattagcggttgtggaacaggaaatgaaaaaggactggctttttgcccctcattatcgatactatgtaagagaaatgagaattcatgcatacagtcagctgctggaatcatataggtcattaacccttggctatatggcagaagcgtttggtgttggtgtggaattcattgatcaggaactgtccaggtttattgctgccgggagactacactgcaaaatagataaagtgaatgaaatagtagaaaccaacagacctgatagcaagaactggcagtaccaagaaactatcaagaaaggagatctgctactaaacagagttcaaaaactttccagagtaattaatatgtaaagccatgtaactaacaaaggatttgctttagagataattatttggaatttttatagcttacttcacaatgtgcccaggtcagctgtataaaataaatactgcattgttgtttctttcca

SEQ ID NO: 9593 - protein, 389 aa, Homo sapiens; identical to SEQ ID NO: 814

SEQ ID NO: 9594 - DNA, 1344 bp, Homo sapiens
aagaatgtggattttagagttctagataggggttttcatttaggccttgcgacatggctgttacatgaccttggttggtctgtttccctaacctctttgtgcctcatttgtcttacctactaaataggctaatagtactacctcgcagcatgaagatgattttaataagatgaatgagagtaacgactcgacaaactatgacatggctccttactatgaagccttgtgcaaatccctcgactggcagatagacgtggacctactcaataaaatgaagaaggcaaatgaagatgagttgaagcgtttggatgaggagctggaagatgcagagaagaatctaggagagagcgaaattcgcgatgcaatgatggcaaaggccgagtacctctgccggataggtgacaaagagggagctctgacagcctttcgcaagacatatgacaaaactgtggccctgggtcaccgattggatattgtattctatctccttaggattggcttattttatatggataatgatctcatcacacgaaacacagaaaaggccaaaagcttaatagaagaaggaggagactgggacaggagaaaccgcctaaaagtgtatcagggtctttattgtgtggctattcgtgatttcaaacaggcagctgaactcttccttgacactgtttcaacatttacatcctatgaactcatggattataaaacatttgtgacttatactgtctatgtcagtatgattgccttagaaagaccagatctcagggaaaaggtcattaaaggagcagagattcttgaagtgttgcacagtcttccagcagttcggcagtatctgttttcactctatgaatgccgttactctgttttcttccaatcattagcggttgtggaacaggaaatgaaaaaggactggctttttgcccctcattatcgatactatgtaagagaaatgagaattcatgcatacagtcagctgctggaatcatataggtcattaacccttggctatatggcagaagcgtttggtgttggtgtggaattcattgatcaggaactgtccaggtttattgctgccgggagactacactgcaaaatagataaagtgaatgaaatagtagaaaccaacagacctgatagcaagaactggcagtaccaagaaactatcaagaaaggagatctgctactaaacagagttcaaaaactttccagagtaattaatatgtaaagccatgtaactaacaaaggatttgctttagagataattatttggaatttttatagcttacttcacaatgtgcccaggtcagctgtataaaataaatactgcattgttgtttctttcca

SEQ ID NO: 9595 - protein, 351 aa, Homo sapiens
MNESNDSTNYDMAPYYEALCKSLDWQIDVDLLNKMKKANEDELKRLDEELEDAEKNLGESEIRDAMMAKAEYLCRIGDKEGALTAFRKTYDKTVALGHRLDIVFYLLRIGLFYMDNDLITRNTEKAKSLIEEGGDWDRRNRLKVYQGLYCVAIRDFKQAAELFLDTVSTFTSYELMDYKTFVTYTVYVSMIALERPDLREKVIKGAEILEVLHSLPAVRQYLFSLYECRYSVFFQSLAVVEQEMKKDWLFAPHYRYYVREMRIHAYSQLLESYRSLTLGYMAEAFGVGVEFIDQELSRFIAAGRLHCKIDKVNEIVETNRPDSKNWQYQETIKKGDLLLNRVQKLSRVINM

SEQ ID NO: 9596 - DNA, 2947 bp, Homo sapiens
agcggttgtggaacaggaaatgaaaaaggactggctttttgcccctcattatcgatactatgtaagagaaatgagaattcatgcatacagtcagctgctggaatcatataggtcattaacccttggctatatggcagaagcgtttggtgttggtgtggaattcattgatcagtaagtttgaataatgccatgttaattgaagttttaaagttgccttttaaaatatgtgaacttgtacaattttttacttgtttacattggttccctcaatcttaacggggaggggagaggtttttttcctcagtattatcaaaacattcgtatcctgttgcctctgccttcctcatgtcatgtctgccccttgcattaacagatgggaagatgagttgtagtgaggctaagtgatttgttaaaggtcattagaccagttgttatcaaaagttgtcttctgttacttctttgtagaccacactgcagctacggtaatgactcttagatctgatatttacagttggtcatattccctctgataattccttccagtttttaggttgctgctgcaattctggtcagattggttgttaaatgtgggacttttagtacttgcatcagtgattaaacaaataaatacttaatgagccattcattactatatgtttggtattgttttacagctcccttttcacactttcattgtagtagtagggaagagatggcaaggaagcaaataaatataaaacgtaatttcacatatagaaatgaacctatggagatgagaaaatgctatccttacgtacggcatgcttaaggaggtgaggtttgctctgagatttgaattgagaggagtcagccatatggagtccttctgcgtgcagaaaagggaatagaaaaggctaaggctttgagccaggaataagcttggatgttgtaggaacagaaaatgtcagggtggctccagcatagttggagtggtaggagattttgaggataatatatggagagttaggtaggtaatgatttgtgtagggccttgtaggtcatgggatggagcttgagttttaagtaagtttgatagggagccattggaagatttagagcccaagttacatggtcctatgcagtgtctttatataagaaatagagtaaggtggcagagaggaccagttgtgctgtttagtagctcttagaggagatgttaccgtggcgtggacgagggtggtgagagtagagttgggtaggagacatactcaatatgggatgtccagatggcatctagatcagtggctcccacatgtaggtgtttttaaatgttgatgatggtgttttcaatggtctgcagtggaaactttaaatgaagatgcatttcttttaaataagaccattctctttctagtattttttaaatttcgaacatccataaaattgtaaagaaagaattgtacagtacattttaacatatttgcttgttacaatctatacattttatgttttttaaccacttcaaagtaagtttcagacaccaacacattttttaaatgatccctaccattttttaaatgatccctaccaaaatggaaggctggtatcccaaggttttgttccatttctcaattctagtctgtgaaattgaagtctgatgaccactcttaagagggctgttcattagggtgcgggctgggcattatgagtgtgtttttcatgagtcagtggaaggaggggcttgttgtgagcagtgcatgagaaaaacggcttggctttgcttctttttccagctctgtggccttggtcaggttacgtctcttcagtatcgtaactgtaatgtggagataaagccttcattagttaggggcacacaccgcagtattccttaagtcatcttgatgacaagtgaatgcaaggcagctggtacctttcaggtagtagttgaattcaggtagtatttgttcagttttttttttttcccttcatgttctaagaccagcttgagaggcaaaggttgtaccactgagctctagttgttgttacctaaaaaggccttgttttaaatttctgtgatacctaagaatttcaaatctgggttgtcatggattctttattctttttttctcccttaaaaagttacattttagatgaaatccccttttttaaaatgggcaaagcaataattctacatcatttctccccttcccttccacttgtttagactaagatatgttagagagggaaagggtcgttgttttagtaaatactattgctgttgacatgttaatactattgctgttgacatgtttactgatgggctgtgttccataattttgttttaggtcttttgtttgaaacagtttactgtttttatcagttttggtccctaatttttcctaacctacagtttttctctgagtacatatggtttcattgtttgatctactttctatctatctgaatatgaacttctaggatcatgtttattctagtagatgatgacttaaagcctgcagtataggagggacaacgtcaactactgcatgtgcaataacaagcttgaagggaagctaaatgtttgttacaaatttaagacagtattttaatgccgtttgcatttttctaagaattttctataaagctaattctgttattttttgtctctaaattagggaactgtccaggtttattgctgccgggagactacactgcaaaatagataaagtgaatgaaatagtagaaaccaacagacctgatagcaagaactggcagtaccaagaaactatcaagaaaggagatctgctactaaacagagttcaaaaactttccagagtaattaatatgtaaagccatgtaactaacaaaggatttgctttagagataattatttggaatttttatagcttacttcacaatgtgcccaggtcagctgtataaaataaatactgcattgttgtttctttcc

SEQ ID NO: 9597 - protein, 57 aa, Homo sapiens
MSHSLLYVWYCFTAPFSHFHCSSREEMARKQINIKRNFTYRNEPMEMRKCYPYVRHA

SEQ ID NO: 9598 - DNA, 4587 bp, Homo sapiens
ggcccagtgtttttggatgctttctccatgcatataaattgggctgctttatgagaattcatagtatttacctcaggtaatgtaggaacaggtttcccgagcatgatgagtaactcacttggccttatcttctcatacatacacacacagttatgttgcttttgcatataaggttatattgtagaattgctcttttcccttttttatgcttgaggtctcctggtcatcactcaactcaaatatggagcccttccctgcttccctcagtcagaacaaatcttacttctctgcattcctgggattcttattgtatgctccctccttcaaaaaaattgagggagcccttccttgcttccctcagtcagaacaaatctcttacttctctgcattcctggggttattgtatgccccctcctttaaaaaaactgaggtataaatcacacaccataaaattacctcaagtgtacaattcagtgctttttcatatattggcaaggttttgcaaatattaataattccagaacatcttgatcaccccaaaaggaaaccgacacccattagcagtcactccctattactcctttcccccagcccctggcaaccactgatctactttatgtctgtacgaatttgcctattctggacatatcatctaaatgcagtcataaaatacgtggctttttgtgcctggcttctttcactttataatgttcccacattcatccatgttgtagcatgtatcagtatttcattttgttttatagccaaatgatagtctgttgtatgtatatactacattttatttatccattcattagttcatagatttttgtgttgattgcactttttggctactatcaataatgctataatgaagatttgtgtacagctttttctgtggacatatggagtggaatggctgcatcttaatggcaaccctctgataaactttttgaggaactgccagttttctaaagcaggcgcccgcaccatttgacattcccatcagctgtgtgagggttccagtgttcccacatccagtacttactattttctgtctttttgattataggtatctttgtgggtgtgaaatgatatctcattgtaattttgatttgtttctaatgactagtttcattgagcatcttttcatatacttaactggccatgtgccccaattgctaaaacttagcactctgttttgtgataatttcctagtttgcctcctttgctaactagaatttctgggagcagaacttatgcttttttttttttaatcttcatgaccctgacagcaggacagcacttggtactaatgtgctctaaaataattcaattggaaaaggaagtagtatccttttctaggtagtacctgactatatttagaaatcaaaaataaattgagaaagtgaaaggttttgtatctcacctcacccccaaatccatacacacattcactcacatataaaatttttcctgagacggtgattttaatattgttttatatccttgtagaccttttatttatttatttatttatttatttgagacagagtctcactctgtcgcccaggctggagtgcagtgacatgaccttggctcattgcaagctccgcctcccgggttcatgccgttctcctgcctcagcctcctgagcagctgggattacaggcgcccgccaccatgcccggctaattttttgtatttttagtagagacagggtttcactgtgttagccaggatcgtcttgatctcctgacctcacgatccgcccgcctcagcctctcaaagtgcaggattatagacgtgagccaccgcgcccggccttttactcgtttattatatgcactttaaaaaagaaaaaacatttaaaaaccgaagttatatgtacacatggaacagttgtaaacagtatcatataaagaagaaaaaggctttctttaatatctgatcaccagtgtcctttctctagaggcaactgctgttaatcaggttttccagtgtgtccttcaggggcactgttatccagagataagagcatgtaacacttttgtgtattgtggatgtattttatatgctgttttgtaagtacctttttttctcttcacaagtaacgtgtatatcttttcatgtcactatacatatagttggtcatttagtcagtaagtgtttttgagtggctatcgtgtactaacattgagaatagcagcaaattgaacaggtagtgttcctaggagcttcaggttatcctttcttaaggacttcctagtatttcaatgtattggctatgccataatttatcctctactgatagaaaacgaggtcgtttccagttttgccctattataagcaaccctgttttgaacactccaacaatttatctttcccacttgttatttccttggggaaaaagtctaaaaaattgaactttccaaaggttaaatatattgtgtcttgaccactgttgccctccagagatatgtcagtttacatttacacaatttatacttctctcaatctatagcatttgagagaacctgtcccaccctctccatactctttgccagtctgagaggacagaaataattttattgatgttttatgcatttctcttattagtgagaatacgcaccatctcatggttagtggccattgatctccatgttgctaaatcatgtgttcccttgcttatctttatctgccttgatgttgaccatcctttgcttctcaccacagctttctcttggttctgcagtaacgtgctcttgttttctctggacctacctcctcatccactgttagacctctcagtgtctgactgccttagactgggttattgcccttgtttcttatcttcactttgtgccatcagatacatttggatggcagtgatggacaaattcatgtcgccagccccaaactggagcaccagactcatgcctcaatgcctccttagtgtcctcacttggctgtttaataggcatatccacttgaacactgccaaagtatgcttgaatcccaccctcacccccaacactaaaaacaaatattctccttctccagggatttccatcttgttgaaaccacaaacataagtatactctagagtctcttttcttgctcaccttctatatacctgttgctgtcttcctgcttgcattctgagtctggcatcctttctgttcctgggcttaaccatgcttttcctgccttcagacttttgtatcatttacattgctctgtgcttagccagcccctgagagaggtattccctgtccaccccaatccagtggagggcttcctagtcactctatcatgttacttttattttcttcacaggatttatcttgtatatttgttcatctgtctctgccctttgaaaatttagtttttgtggcagcaagggtcttgtcttctggttcactgccatataactatctagagtagtgatatacaggagttattcagtaaaataatttatatttgtgtggattgctcattaatactctacgtacattttactgtcttctaaggatctcttctggattaaggccattaactcatcgttataaattttctagtttatcatttgtcttcaaaccttgttcatagtgttttcttacgtagactatttacgtgaacaaataaacaggcaataggagtcatcagtctttgctttcttctgagttttgttgctttttgaaaatgtctgatttataccttttttctggtctgtataaatcgtttttcactgtacctgctgtttctctgttagaattgtttaaaaaatgatttttactttattttacttaaggcataagaagttctccgtggttaaaatattagtacgtgaactttgtcatctatgaacaagttcctttagaagctgagctctgatagtgatgtcaaatagccacctgttacttgaagacgatgtttgcatacctggcccctcctttatcactgctgttgctgccattgttgatgacatgatgtggaagggcagtgagaaatttgatacttgttcatctatctgttggactcaactagtagtgttgctttagtttttaatctttttatctgaaacggagagtctattataatttgtcattttattcattgcagcggttgtggaacaggaaatgaaaaaggactggctttttgcccctcattatcgatactatgtaagagaaatgagaattcatgcatacagtcagctgctggaatcatataggtcattaacccttggctatatggcagaagcgtttggtgttggtgtggaattcattgatcaggaactgtccaggtttattgctgccgggagactacactgcaaaatagataaagtgaatgaaatagtagaaaccaacagacctgatagcaagaactggcagtaccaagaaactatcaagaaaggagatctgctactaaacagagttcaaaaactttccagagtaattaatatgtaaagccatgtaactaacaaaggatttgctttagagataattatttggaatttttatagcttacttcacaatgtgcccaggtcagctgtataaaataaatactgcattgttgtttctttcc

SEQ ID NO: 9599 - protein, 108 aa, Homo sapiens
MKKDWLFAPHYRYYVREMRIHAYSQLLESYRSLTLGYMAEAFGVGVEFIDQELSRFIAAGRLHCKIDKVNEIVETNRPDSKNWQYQETIKKGDLLLNRVQKLSRVINM

SEQ ID NO: 9600 - DNA, 305 bp, Homo sapiens
ccaccctcacccccaacactaaaaacaaatattctccttctccagggatttccatcttgttgaaaccacaaacataagtatactctagagtctcttttcttgctcaccttctatataccaagaaactatcaagaaaggagatctgctactaaacagagttcaaaaactttccagagtaattaatatgtaaagccatgtaactaacaaaggatttgctttagagataattatttggaatttttatagcttacttcacaatgtgcccaggtcagctgtataaaataaatactgcattgttgtttctt

SEQ ID NO: 9601 - protein, 39 aa, Homo sapiens
NHKHKYTLESLFLLTFYIPRNYQERRSATKQSSKTFQSN

SEQ ID NO: 9602 - DNA, 6503 bp, Homo sapiens
ggcagcagtcactccagatggcccgctgaagctgggagtcctgagttaatttcaagccaaatttctcactccctggaggagcagagtggagggtgtgtgtgcatggagaagtccaagatttcatatctggaaaagaagactgggagaggccagcatgaatggccactgtcctcgccaaatctggatggtatgtcttaggtgggattacatgaagaataagatgaagtcttacctcacctctgcaaaatgaagactgcctatagtaattggcagagaacatgaaaatggccaaggagtttcatcaatcaaggaacttaaaactccaaattggactcgcacaatttctaccagaaacctgccactttagtagcacggtattgcaaattatttcttaatcagtttgccaagcagtttacaaacttactatacaaacgtaatagagttaattctccggaggctcggataattaatgaagcatttagatatgaagatagcatgcggaaaacagccacaaccaacatgtgcattgcttttttaaaaaaatcagtgacaatgacaaatgtcatattaatacctgaaaagcaaattattttaatacatcccgaatggagtgccattaccatgtcctttacagccttcctttcctcagacccatctgggacggggtctgaaatgccacttttgacattctctccataaaaaatactagaaaatgttaactactatactgaaaagagatcacgctcacctcaccatggcagatggccactgagatacaccgggcactacatcgacagtacatctcactacaggtgggtcatccgatggattatttcaactgccacaatccattaaggggaggaggaggatggaagaaaccaagtgcttcatttttaactgaagcaaggtagggagttttattttactataaacagcacaaccgttaaatgtcttcattaagcaaactcacttttgagcccattttctgaccaacagtcctcaaagttcaaaatggaaataccctcccaacaaagcctgtttttttaaagacattgcaccactgaaatctcagcagctcaaccttcctgggtaatccagatactctggttactaagctggttacactggactctttctacaatctctgggagctcttcgaggtggttgtcacctgtcctctgtttcatttccagttcttcttttccctgacctgccttcagattctcctttaacttctacccttgacctgccttctgttttcaaatagccttgttccttctccaggcatgacatgtcacacaccgtccctcgcagagccccctcagaatccttctgtccctcaatcccaaatgcttaagttcatttgctttgaggacaaccggttgtcaggctaaggcagcagttctgtctgccttggtaaaggaaagcagataatacaatccaggaaacatgagcaccagaacataatgccacattcaaaacaacgtcatgctgacatcacacaatggcaccactcacagtcacttttactttccccaagggatagatcaacattaagtaacttcaacattcccagcagggatggcatttctcacagaattttactgacaccggttggtttctctaattggcaaaaattacatttgcaatttaaaaaaaaattactaccactttgtagaaaataaattctactgagggtgggagcagacttaaggatggctccttaagatggaacggagcataaaatgctttgggtctaacagttatgttttttcagccacaaaaagccaaattgaatatgttcctttgaaaaaggtctcactgacatgtaacaaatttgtatagaaaaaaaaaaaaaaaaaaaaaaggtggtaccgggccacatttcaatactactcagagacaatggtggatgtgcatgcaagtccccactgagtcctacgatatagaaattcctttgatattacaaaatacaaaaatattttatcagaactctcatttacattgcatttacaatggacatgtaaataacttagtcttgggtcctggctaataaacaaattacttactgaaaaaagggtcctaaaagtaagagaaccagagaggataaaagcgagcaggaaacaatttaccatcttgagagatggcaactcaacacagaactgatgggaaggaagtgaccaagcctggcctcgatagagtctactgtgtttccaaagtgaaatgtgcaaataatattcaacatgccaagaactgtgactacctattgagtcaacctgtaaccttgcctccatctactgacagcattttcccttttctcccccataagccacccccaaaagcgctttaacatttaaaacagtgcaagtttctgactttacattcttagctcccatcttctcccattccctgatcccaatcatattaagaaatgatacagtttttgctcttctgtcttttcctgctgtgcaactgtcctctgccacctaatgtggaagatttggggaggccgtaggagctgtatttgtgcagcagctcatcgcttgtgacgtatcgcaggcgcgctggctgggggatgggttctcctaggaaatagccctcgttgtcagactctgaagaggaggagcaggtggaacaccaatcatactcggcgaagtagggtccccagcggtccccaaaggcattctgcaaagccaggtccgacacagtcctagggcactggccgtacaggtccctccgggacccatgccccatgctctcctggaagctccgctggcgcataaattggtcatagtcctccctggctctcagagggggcctatcttttaaccgggagatggcctcgcgttcgctggccaggtggagggcgttgtcggagcgagagcgtcgggaacgcctggacctgtgaggtcggaaacggcggttgtcgtcgcgtgaagtagctcttctccgggtgcgttcactcatgggctggatcctcacgccctcctgccctggcagcttgctgcccgccatccctccatcaaaatcaaagctctgatgcatccttccgtgggactgcaggtctctgtagccaatggggttgctgagctggtggaggtttccctccatctcctggtactgctgggcagagagcaggctgcgaactgactctgcgctccggaactgcatggacgagttaagagtgcccatgttgctcagcttctcagacacattcattccagagtctttgctgaggtcaggcatggaaaatcgggataggtgctcctggcgcttggcaccaccatcagcagagaggcctggggaagagaggaggggaccacagagattaatacagatgtgcagcaatgggtatcactgtcactgctggtcatctatctagggtcattatataccgttgtgaagttgtgtactgcacaaaggccctctcagggggcacatgtgcctgtgagggggttctctccactccacagtaggtcactatctacctagagggggcacttacttaaaatgcttccagagatgtattttaccagttactagttcctccaaaggctcatcaaagttactaagagcccactgtgtatcctatgtatgatgcttcctctatttggagtttcactttgcaaagtactttaattacatttttgattctaatcatgcactataagctctgtaggacagatattttggatgagcaaactttaagctctagaggctggatcatgcccaagctgtttctggcaataccaaacactggttccacaatattgggccagttcacttctctgttagcccgcagcagtttcctgctttgcctgctgtccctaagtggcaggtggctccctatcaaaagtgtcttggacactaagtgactccctagatatagatagagaaatatttactctctcagaccattcagtgaatgctccaaggttgtaaatgggtctctagcagccagaagatgtgtgtgggaccccaagggacctctcggtcgcacggggagggactttcaaaagtaaagcagtgggtttgatgctctcaaacagtgggtgccccagcaatggacctccatttcttaactgctgtcaaatgagctcttggcatccctgagatgaaaaccattttgaaggtagtgggagatactgactgcagtaacttccattttgctcattttcaggcagagctctctaaggagatgtttaagaatgggccaggtggcaaagtctcagcattttccactcattacatattgcaaggatcagcaatttgccattcctggtcatagacaacatgcctttggattgcaatggcccattatcacccctgctactgattattcctgtctcctactggggcctccaacttcctcttccgtgacaaaacctaaagcagtgttacgagcactttgcaaaattacttggcaatatttactaaagctaaatacacatatacgtatatgaattataaataaagccgctctgaatatccttggccattttttgtggacttatgaatttctgttgggtgtacgaccaagagtagaaattccacaattctccatcttcactcttgattatatattcatcagaagttagtaagaaggtccaagaaatggacaagggtactcagagaagctttcttgtaatagcccagaaacggaaacaactcaaatgtcaattatcaggaaaatggataaatatattgtggttttttctaccattccccactaaaaggaatccaggctctttagaaagatggccaattccaggataaaggcaaggaaattaaaagaaccaggatcttgttatgccataaagtgagaaagtattaaaaataagatatggcaggggtttgtcagaaggacacagggcctaacttgaaggggcccccactggccaaatctgaacaatttgagcactcaaatatttaagtgaagtaatgatttataaaccactgaaacaaataggaattcacaagtccatgctgatagcagataaataaaaacataaataaatacacaaacagggaaaagagagggctctatgtatagtggaatgccaaccgctgtcagtagagtaagttcacaagaaggaagggggtgccagatttggaaagtcattttataaccattggaggtagagtgcttcacacaagaatcaaaaagtgtgctaaatttagggggtaaaatttgatgggggagagcattgttttaaagtgtttccctacacattgcttattagttgcaagggaagaattagtaactaaacaaaggtaaaatcagacaacaccttgaccttaagttcaaacttaacatccctggtgagatgcaactgcaccctgcatgcctccagttgagatgtactcagaagggcacactatcccttatgtagtattccagtcaagaatgtattacccgaatgcattcaggaggaaacattagacagatgccaaaaggagggacatttgttatgaaaaaagggactgtagtcttaagaccagacaagactgagagaatgttctagatgaaagggtacgagggaaacatggcaattacatataatacctgatcctggactggaacctgctctttagggaaactaaatgctataaagtaggggttcccagacctcaggctacagactggttaggagcagggccacacagaaggaggtgagtggtcagtaagggaagcttcatctgcatgtacagccactccccattgctccaactactgcctgacctctgcctcctgacagatcagcagcagcattagactctcataggagtgtaaaccctgttgtgaactgctcatgcaggatctaggttgtgtgctccttacgagaatctcatgcctgatgatccataactgtctcccattacccctagatgggactgtctagttgcaggaaaacaagctcaggtctcccactgactctaccttaaagtgagttgtgtaattatttcagtatatattacaatgtagtaataatagaaataaagtacataataaatgtaatgcacttgaaccatcccaaagccatccccaccccctggccccagtctgtggaaaaattatcttccataaaaccggtccctggtgccaaaaaggttggggactgcctctataaaggataacttttggtcaactgaaaaaaaaatggaacatgggcaatagataaaagtattatgctaaatttactgtggtcaattaataatggtgataatgtgggagaagatctttactcttgggaaatatatatggaaggatatggtggtaaatggcccagatggatgcaatttgctctcaaatggtttataaataaaatgtgtgtgtgtgtgcgtgtgtgtgcatgcatgtgaacatgaaagaacaaatgtggcaaaaggttaacaatggatcaatctacgtaaagagtacattacaggtgttgtttgttctatttttataactttttttaagtctgaaattatttccaaataaaaagtttctttaacattag

SEQ ID NO: 9603 - protein, 38 aa, Homo sapiens
MKMAKEFHQSRNLKLQIGLAQFLPETCHFSSTVLQIIS

SEQ ID NO: 9604 - DNA, 2215 bp, Homo sapiens
atgaggcagctggcagtgggagtggaagctaagagaatgtatggggaggaaccaggaggtggagtccagcacaggagcaacaagccaagtactgcattcaaagaaatacaaacacaaccagaaagtattataagtctatattcagcatttcaaatctgtcctgtctatcaaggaaacaccgaaggaggaggtaaattcttaatgcatagcagacatttaaaaattctctctcaccattgctgcccagtcactaccctgcatgtgaatgccagcttgtctcttgagttgtctctttcctattctcaacttccacccccaaacacatttagagcacaggtcttttctgtcacacttgccagtcttccttgcctgctcttattatgtaaatcaaattcaccactctgtcctgttttgttttcatctctgcttcactcaataccccgactccctcaggaccgtgttgcttctgccctgaatgagttcttttctcccgggctgcagggaccacagaggtcttcttcctattacttcatggactgtatgaattccacccagctggtgacatcatggcaggtggtttggagatgaactggtatcctgccctgtgttaaatgtcctcagactggagctcagaacttttgagtattttcaaaagggtcaccgtgtctccagagaaatgctcccaacagtcctaactgaagtcagcactgaactgggcaaaggactcaagaaaaaaagtttccttcctcctcgatgtgttgctcaaagcactgcgtgagaccacacggagcagtatctaagcattgagcaacactcagaagggcagcaggacaaatgcgtagctgctaatgacccctctcctgccaatgctttcctccctcagccccctctagggtcaccgaacagctgtaaatacaagctgaccaccctcaaggagctgggatggagggaggttttctccagtctccagttctgcctttgcacctctgtggcctctcaaatgctcagccagtattttgagtacacccaacctcacccaggagatatatgtcacccagaaacatgtgctctccagaaagtcttcctgacatcatcggggcagtcctcctccacctcctcctcttcccagcaattcgttctgcaaattaatgccatccaaacaatcctcgagaactatctaggaaaggacgaggaccaaattaccaagcctttggatctaatccatgtggcatcccatctgtgagctccagggagattcaaagttggccagtgctggaggccaatcatatttataccatttccatatggcaccttttgattgagacttggcaagcacatgatcggattggaggaagacagagagcaagacgttggaacaagcagcaggggtggagcctgggacacaaggtcagcacatagcaagcccttgctttggagcagaggtggccggtttccagggcagtgagtatttgaggcagtaattgtgatcttcagcttcactggtgcaagtatcacctgtgagaaagcaggcattgggtgtgattaattagtatgcttctttagcatatggggtgagggagggacaggggctaatttgagcagtcagggacaaggagtcaacatcagtgtggagtgataacgtttgtacaccaagctggtaaatagacatcctagttacatatgattctattggcattgcctacagaggagaaaaaagtgatcaagtggttgtggattttatgtttgcttacctgttttttaaaaaaaaggtgaataaggaactttataaagatgttggattccagcatgttagacattgtagtggattgaattttgatccccaaaaagatatgtcccaagtcttaacctcacagtagctgtcaatgtgagcttatatagagcctttgcaaatgtattaagttaagcatctccagacgagatcatcctggattcagtgtgggctctaaattcaatgactggtggtggtataagagaaaggagagagagacaaacagacccagagacacacagaggggaaggccatcagaagacgaggcagctattggagttacgcagccagagccaagggatgccagaagccaacagaagctggaggagtcaaggaaggattctcccctagaaccctggaagggactgtggccctgctgacgctttctgggctccaaaactgagtgagaataaatttctgttgttt

SEQ ID NO: 9605 - protein, 195 aa, Homo sapiens [sequence omitted]

SEQ ID NO: 9606 - DNA, 8192 bp, Homo sapiens
gacttctcaggcaccaccagcagcgccaccgagagttattattattttttgaccaagcagcacatttcctggttcagtggcttgagctctgtgagcagctgactagtcaccccgggtctggctcaggatcagctggtgacgctgggctggagtctatgacttcttccttcagattgtcatgaagaaggggagttaagaggaaactgggggtcctccggaaggcgatctgagcactcaggctgatctagaggaagagtagaagtcatactttttttctcttgcttggtgaattccccagcagagtctggatccagcagtgctgttttccctgagggaatgtggagcagctcggcttgagtctgttgccagcttcaggaagggttcagactgaaaagggggtttgaggagaagatgctttggctgcctgaggtcctgcttgcgttcttagaagtcagatccagggagaaagtgaactgggacaattgacaagctccaagggtctggcagaagcttcctccgagactgggcatttcatcctccctggaggaagatctgcctgcactgcaagtgtccccaggaggagcacatggtgacagtgatgccgctggagatggagaagaccatcagcaaactcatgtttgactttcagaggaactcgacctcagatgatgactcaggctgtgctttggaagagtatgcctgggtcccgccgggtctgaagcctgaacaggtacaccagtactatagctgtctcccagaagagaaagtcccttatgtcaacagtcctggagagaaactgcgaatcaagcagctactacaccagctgccgccacatgacaatgaggttcgatattgcaactccctggatgaggaagagaagagggagctgaagcttttcagcagccagaggaaacgcgaaaacttgggccgcgggaatgtcaggcctttcccagtcaccatgacaggagctatttgtgaacagtgcggaggccagatcaatggtggagacatcgctgtgtttgcgtcacgcgctggccacggcgtttgctggcacccgccgtgcttcgtatgcactgtctgcaatgagctcctggtggatctgatctacttttaccaagatgggaagatatactgtggcaggcaccatgctgagtgcctgaagccgcgctgtgctgcctgcgatgagatcatctttgcagatgaatgcacagaagctgaggggcgacactggcacatgaaacacttttgctgcttcgagtgtgagacagtgctgggcggccagcgctacatcatgaaggagggaagaccctactgttgccactgcttcgagtccttgtatgcagaatattgtgacacctgtgcccaacatataggtatcgaccaaggtcaaatgacctatgatggccaacactggcatgccactgagacctgtttctgctgtgctcactgcaagaaatccctcctggggcggccattcctcccgaagcagggccagatattctgctcacgggcctgcagtgctggggaagaccccaatggttctgactcctctgattccgccttccagaacgccagggccaaggagtcccggcgcagtgccaaaattggcaagaacaagggcaagacggaggagcccatgctgaaccagcacagccagctgcaagtgagttctaaccggctgtcagccgacgtagaccccctgtcactgcagatggacatgctcagcctgtccagccagacacccagcctcaaccgggaccccatctggaggagccgggaagagccctaccattatgggaacaagatggagcagaaccagacccagagccctctgcagctcctcagccagtgcaacatcagaacttcctacagtccaggagggcaaggggctggggcccagcccgaaatgtggggcaagcacttcagcaaccccaaaaggagctcgtcactggccatgacaggacatgctggcagcttcatcaaggaatgccgagaagactattacccggggaggctgagatctcaggagagctacagtgatatgtctagtcagagtttcagtgagacccgaggcagcatccaagtccccaaatatgaggaggaagaggaagaggaagggggcttgtccactcagcagtgtcggacccgtcatcccatcagttccctgaaatacacagaggacatgacgcccacagagcagacccctcggggctccatggaatccctggccctgtctaatgcaacaggcctctctgctgatggtggtgccaagcgccaggagcacctatcccgattttccatgcctgacctcagcaaagactctggaatgaatgtgtctgagaagctgagcaacatgggcactcttaactcgtccatgcagttccggagcgcagagtcagttcgcagcctgctctctgcccagcagtaccaggagatggagggaaacctccaccagctcagcaaccccattggctacagagacctgcagtcccacggaaggatgcatcagagctttgattttgatggagggatggcgggcagcaagctgccagggcaggagggcgtgaggatccagcccatgagtgaacgcacccggagaagagctacttcacgcgacgacaaccgccgtttccgacctcacaggtccaggcgttcccgacgctctcgctccgacaacgccctccacctggccagcgaacgcgaggccatctcccggttaaaagataggccccctctgagagccagggaggactatgaccaatttatgcgccagcggagcttccaggagagcatggggcatgggtcccggagggacctgtacggccagtgccctaggactgtgtcggacctggctttgcagaatgcctttggggaccgctggggaccctacttcgccgagtatgattggtgttccacctgctcctcctcttcagagtctgacaacgagggctatttcctaggagaacccatcccccagccagcgcgcctgcgatacgtcacaagcgatgagctgctgcacaaatacagctcctacggcctccccaaatcttccacattaggtggcagaggacagttgcacagcaggaaaagacagaagagcaaaaactgtatcatttcttaatatgattgggatcagggaatgggagaagatgggagctaagaatgtaaagtcagaaacttgcactgttttaaatgttaaagcgcttttgggggtggcttatgggggagaaaagggaaaatgctgtcagtagatggaggcaaggttacaggttgactcaataggtagtcacagttcttggcatgttgaatattatttgcacatttcactttggaaacacagtagactctatcgaggccaggcttggtcacttccttcccatcagttctgtgttgagttgccatctctcaagatggtaaattgtttcctgctcgcttttatcctctctggttctcttacttttaggacccttttttcagtaagtaatttgtttattagccaggacccaagactaagttatttacatgtccattgtaaatgcaatgtaaatgagagttctgataaaatatttttgtattttgtaatatcaaaggaatttctatatcgtaggactcagtggggacttgcatgcacatccaccattgtctctgagtagtattgaaatgtggcccggtaccaccttttttttttttttttttttttctatacaaatttgttacatgtcagtgagacctttttcaaaggaacatattcaatttggctttttgtggctgaaaaaacataactgttagacccaaagcattttatgctccgttccatcttaaggagccatccttaagtctgctcccaccctcagtagaatttattttctacaaagtggtagtaatttttttttaaattgcaaatgtaatttttgccaattagagaaaccaaccggtgtcagtaaaattctgtgagaaatgccatccctgctgggaatgttgaagttacttaatgttgatctatcccttggggaaagtaaaagtgactgtgagtggtgccattgtgtgatgtcagcatgacgttgttttgaatgtggcattatgttctggtgctcatgtttcctggattgtattatctgctttcctttaccaaggcagacagaactgctgccttagcctgacaaccggttgtcctcaaagcaaatgaacttaagcatttgggattgagggacagaaggattctgagggggctctgcgagggacggtgtgtgacatgtcatgcctggagaaggaacaaggctatttgaaaacagaaggcaggtcaagggtagaagttaaaggagaatctgaaggcaggtcagggaaaagaagaactggaaatgaaacagaggacaggtgacaaccacctcgaagagctcccagagattgtagaaagagtccagtgtaaccagcttagtaaccagagtatctggattacccaggaaggttgagctgctgagatttcagtggtgcaatgtctttaaaaaaacaggctttgttgggagggtatttccattttgaactttgaggactgttggtcagaaaatgggctcaaaagtgagtttgcttaatgaagacatttaacggttgtgctgtttatagtaaaataaaactccctaccttgcttcagttaaaaatgaagcacttggtttcttccatcctcctcctccccttaatggattgtggcagttgaaataatccatcggatgacccacctgtagtgagatgtactgtcgatgtagtgcccggtgtatctcagtggccatctgccatggtgaggtgagcgtgatctcttttcagtatagtagttaacattttctagtattttttatggagagaatgtcaaaagtggcatttcagaccccgtcccagatgggtctgaggaaaggaaggctgtaaaggacatggtaatggcactccattcgggatgtattaaaataatttgcttttcaggtattaatatgacatttgtcattgtcactgatttttttaaaaaagcaatgcacatgttggttgtggctgttttccgcatgctatcttcatatctaaatgcttcattaattatccgagcctccggagaattaactctattacgtttgtatagtaagtttgtaaactgcttggcaaactgattaagaaataatttgcaataccgtgctactaaagtggcaggtttctggtagaaattgtgcgagtccaatttggagttttaagttccttgattgatgaaactaaaaaggcaattttggaaaaagagagggggaaaagtagatcacttatcttagcaaacggttgaaaatatgtctgtcctctgtggccccaaatccagtgaaagaaattctcccagtaaaagttgcttcctaactctgtttttctcagaatacctcttacctttctcaaagaaagcttcaaccaccatcatcagaaagaaggtggcctaaaaactgacacatggccagtgcccggaggggtctggaggcataagtctagatgcccagagagcatccaggcactgaactgctcagagcttgagatgaaatgacatacaagcttcagggtaaaactgtctactagcaagattacctccctcaattctaccattgcagatttcttctgaccccaaatgcaaccttacagagaatgctgaatgaggaaggccaattccttacaatgatggcagaacccccaagcgaatgccctattgaggagaaggacatcactgtatttggaattctgcctgctagtgatagctcacacatcacatcccagaatcccactcccaatgcattatttcctgaggcaagaacttaaggtcctcacctaattcctccatcacaaccattaactcttattggacaagctcctcctgtgagtagggcctgtactcacttcctcttagatcataattccatcttcaagagactgatttccagaatagtaatctttttccagcgttctctcttctccaatgccctggttgttatttttcccacctctcctaatattgatcttcttgtcttttggttagaactgcaacttcggagttgagttcatttcctattgctgctcaattcagtagcaacatagctggcttgttcccagacccaggaagtataagtcattgacagtttcctgagtggctctgccaatccataccacccttggtactgtgaaaaggcttcttggcagccaggtggcattgaggatggtattcagggcgctttccttctgtcatatagttgtgggatctctaccaagtgtgaaggtgaatgaggtaagggagatcagaaccatgcttcctggtttttcatacatccaaggaagaagtcctggtgtgggttgtttgacaccttctttccactttcaccttttattttttattccttcctttctacccccaaccagtcgagcaaatgagcaattttgtgtttctaatacaggatctggaagtagtgctttctaatcctcatttcctgtaggatgttcctgcactataacaagattatgttttcttccttctgcagcagctttctgcttcttgggtactactagctattgttcaattcaggtgaggcctgtgatgacatatatgtagcatgtgctctgcgctccctgcaagctgagcagatacaaccaatgcatcactgtatactcttgctgagaatgtggatgcagcctcacagatctttgcaacactccaaccagccaggaccagttgatcagaactgatcttattggtctgataaccaatcttatttgtgaactgattcatatctgtctttccactcttggttctcttgccgtagaacaaaaacagtttaggaagcataattacgaacatttaggaaccaatatgtataagtaattcggagactccaattcacctgcccctcccccatcccaggttgtggaggctcgaggaagctgacttcttaggctaaaggacaaaaaaatctctttacctccttggccattttcatgttctctgccaattactataggcagtcttcattttgcagaggtgaggtaagacttcatcttattcttcatgtaatcccaccttctaacaaaaaataaataaatatttaaattccaaggagaagtgttctttgtgtatttctagcagaaaacagatgcttaagcctaagaaggaagatccgtccatgacaaaggaaagtggaaaactgaaccagttatctgaatacttcatgccaggacagttgctattagcaactgttttgcaccttcagggctttaaaatgggctctgcagacagcatttgcatatgcaagactcagtagccaagcctccactgccaattgttgaaggcagtttcagatcgccaccttttgaggtacatttctttaagcacaagagaagtagaaatggcctttgccttgtctccagtggtttgtccctctggtgcctcagcagataccagagcttattcttatgaccatttggaagtagtcctcaaagtaaagatcaagaaaaaattggattctttttccattttctcataatagtagcctagtcaacacaagactcccataaaatatgactcactattgggagccatactattttataagcttacttcctgctgacaaaactagctttcctcaaggaaatataaaggaggggaaagtcacatagtgttaggaaaacattcctgtgttttgaatacgatgaatccataggatagagaaaaatctgcttgttctattctgagagttctctgagatatcccttcactctgcttggcatttggccattgatattcaacaggtcactgaccaagcttttctaaatttttcagagagagttacttaccagtaaggtctgttcttaaacctacctagttgattttcatatctttccataaagtgtcatgattctgtcatagaccctgacttaacattgtaaggactatgagtcctccattttttaattaatttttttttagcaaattaggacttcggcaggttttcctctcctaaactcattctttcctccacaggattgctttgtccatctcctgctttcatttcaagtgcataaacaaaacctcaaagggcctgggaaggtgaggcaggccagagtctgtgttctgtgttgagtgtcaagctatttgttaagaaggtctgcaacaggcctttggtgtgggctctgcc

SEQ ID NO: 9607 - protein, 844 aa, Homo sapiens; identical to SEQ ID NO: 816

SEQ ID NO: 9608 - DNA, 2506 bp, Homo sapiens
cccgtcatcccatcagttccctgaaatacacagaggacatgacgcccacagagcagacccctcggggctccatggaatccctggccctgtctaatgcaacaggcctctctgctgatggtggtgccaagcgccaggagcacctatcccgattttccatgcctgacctcagcaaagactctggaatgaatgtgtctgagaagctgagcaacatgggcactcttaactcgtccatgcagttccggagcgcagagtcagttcgcagcctgctctctgcccagcagtaccaggagatggagggaaacctccaccagctcagcaaccccattggctacagagacctgcagtcccacggaaggatgcatcagagctttgattttgatggagggatggcgggcagcaagctgccagggcaggagggcgtgaggatccagcccatgagtgaacgcacccggagaagagctacttcacgcgacgacaaccgccgtttccgacctcacaggtccaggcgttcccgacgctctcgctccgacaacgccctccacctggccagcgaacgcgaggccatctcccggttaaaagataggccccctctgagagccagggaggactatgaccaatttatgcgccagcggagcttccaggagagcatggggcatgggtcccggagggacctgtacggccagtgccctaggactgtgtcggacctggctttgcagaatgcctttggggaccgctggggaccctacttcgccgagtatgattggtgttccacctgctcctcctcttcagagtctgacaacgagggctatttcctaggagaacccatcccccagccagcgcgcctgcgatacgtcacaagcgatgagctgctgcacaaatacagctcctacggcctccccaaatcttccacattaggtggcagaggacagttgcacagcaggaaaagacagaagagcaaaaactgtatcatttcttaatatgattgggatcagggaatgggagaagatgggagctaagaatgtaaagtcagaaacttgcactgttttaaatgttaaagcgcttttgggggtggcttatgggggagaaaagggaaaatgctgtcagtagatggaggcaaggttacaggttgactcaataggtagtcacagttcttggcatgttgaatattatttgcacatttcactttggaaacacagtagactctatcgaggccaggcttggtcacttccttcccatcagttctgtgttgagttgccatctctcaagatggtaaattgtttcctgctcgcttttatcctctctggttctcttacttttaggacccttttttcagtaagtaatttgtttattagccaggacccaagactaagttatttacatgtccattgtaaatgcaatgtaaatgagagttctgataaaatatttttgtattttgtaatatcaaaggaatttctatatcgtaggactcagtggggacttgcatgcacatccaccattgtctctgagtagtattgaaatgtggcccggtaccaccttttttttttttttttttttttctatacaaatttgttacatgtcagtgagacctttttcaaaggaacatattcaatttggctttttgtggctgaaaaaacataactgttagacccaaagcattttatgctccgttccatcttaaggagccatccttaagtctgctcccaccctcagtagaatttattttctacaaagtggtagtaatttttttttaaattgcaaatgtaatttttgccaattagagaaaccaaccggtgtcagtaaaattctgtgagaaatgccatccctgctgggaatgttgaagttacttaatgttgatctatcccttggggaaagtaaaagtgactgtgagtggtgccattgtgtgatgtcagcatgacgttgttttgaatgtggcattatgttctggtgctcatgtttcctggattgtattatctgctttcctttaccaaggcagacagaactgctgccttagcctgacaaccggttgtcctcaaagcaaatgaacttaagcatttgggattgagggacagaaggattctgagggggctctgcgagggacggtgtgtgacatgtcatgcctggagaaggaacaaggctatttgaaaacagaaggcaggtcaagggtagaagttaaaggagaatctgaaggcaggtcagggaaaagaagaactggaaatgaaacagaggacaggtgacaaccacctcgaagagctcccagagattgtagaaagagtccagtgtaaccagcttagtaaccagagtatctggattacccaggaaggttgagctgctgagatttcagtggtgcaatgtctttaaaaaaacaggctttgttgggagggtatttccattttgaactttgaggactgttggtcagaaaatgggctcaaaagtgagtttgcttaatgaagacatttaacggttgtgctgtttatagtaaaataaaactccctaccttgcttcagtt

SEQ ID NO: 9609 - protein, 312 aa, Homo sapiens
MTPTEQTPRGSMESLALSNATGLSADGGAKRQEHLSRFSMPDLSKDSGMNVSEKLSNMGTLNSSMQFRSAESVRSLLSAQQYQEMEGNLHQLSNPIGYRDLQSHGRMHQSFDFDGGMAGSKLPGQEGVRIQPMSERTRRRATSRDDNRRFRPHRSRRSRRSRSDNALHLASEREAISRLKDRPPLRAREDYDQFMRQRSFQESMGHGSRRDLYGQCPRTVSDLALQNAFGDRWGPYFAEYDWCSTCSSSSESDNEGYFLGEPIPQPARLRYVTSDELLHKYSSYGLPKSSTLGGRGQLHSRKRQKSKNCIIS

SEQ ID NO: 9610 - DNA, 623 bp, Homo sapiens
ctcggcgaagtagggtccccagcggtccccaaaggcattctgcaaagccaggtccgacacagtcctagggcactggccgtacaggtccctccgggacccatgccccatgctctcctggaagctccgctggcgcataaattggtcatagtcctccctggctctcagagggggcctatcttttaaccgggagatggcctcgcgttcgctggccaggtggagggcgttgtcggagcgagagcgtcgggaacgcctggacctgtgaggtcggaaacggcggttgtcgtcgcgtgaagtagctcttctccgggcagagctctctaaggagatgtttaagaatgggccaggtggcaaagtctcagcattttccactcattacatattgcaaggatcagcaatttgccattcctggtcatagacaacatgcctttggattgcaatggcccattatcacccctgctactgattattcctgtctcctactggggcctccaacttcctcttccgtgacaaaacctaaagcagtgttacgagcactttgcaaaattacttggcaatatttactaaagctaaatacacatatacgtatatgaattataaataaagccgctctgaatatccttggc

SEQ ID NO: 9611 - protein, 84 aa, Homo sapiens [sequence omitted]

SEQ ID NO: 9612 - DNA, 402 bp, Homo sapiens
tctgcgctccggaactgcatggacgagttaagagtgcccatgttgctcagcttctcagacacattcattccagagtctttgctgaggcagagctctctaaggagatgtttaagaatgggccaggtggcaaagtctcagcattttccactcattacatattgcaaggatcagcaatttgccattcctggtcatagacaacatgcctttggattgcaatggcccattatcacccctgctactgattattcctgtctcctactggggcctccaacttcctcttccgtgacaaaacctaaagcagtgttacgagcactttgcaaaattacttggcaatatttactaaagctaaatacacatatacgtatatgaattataaataaagccgctctgaatatccttggc

SEQ ID NO: 9613 - protein, 116 aa, Homo sapiens
MDELRVPMLLSFSDTFIPESLLRQSSLRRCLRMGQVAKSQHFPLITYCKDQQFAIPGHRQHAFGLQWPIITPATDYSCLLLGPPTSSSVTKPKAVLRALCKITWQYLLKLNTHIRI

SEQ ID NO: 9614 - DNA, 798 bp, Homo sapiens
tcaagaacaggctgaggctatctatagtgatacagaagtgaaatgtttttgagagcatcctgcttgtgaacagattcctatttccgtgaggaggtgacctcgaagaagagcagcttctattctgctgggaggtgtactgccttctggtatcaggcttctgcatcccgggaaagctcgggataacctgaggcacccccttgaaaaacaaaagagcttgatcagagcaggagggtcctgttgcacaagcccagcatctactatcagtttcacctaaatcagctgatactgtccccaagatggaactgtactgtcacaggtcacactccaacttgagaagcactcctttcccctctaactacgaacagaactggagagctactttctggctgggtgacttggggaaatttgtaaacctcttgagatgcatcagtaagatgggcataatgacaggaaatcagcagctccaagagggcagaaactgtgctcctgtttgctagccctgacctcatacctggtattcagtatgcaggaagaaggtttagtaaggcctaaaattccccaaggaaagaaagcatgcctcaagactgtgaatgccctccagacatttacaactcatactgatgatttagctccctttcagtagggtctttcctatattatttattatttatgtgctggggcagagacatgaagaaaatggagctgtttagaacaggagtttgcaaactgcaatggccagtgaaccaaatccagctcaccgctcactgcctgtttttctaaataaagttgtattggaac

SEQ ID NO: 9615 - protein, 66 aa, Homo sapiens
MELYCHRSHSNLRSTPFPSNYEQNWRATFWLGDLGKFVNLLRCISKMGIMTGNQQLQEGRNCAPVC

SEQ ID NO: 9616 - DNA, 434 bp, Homo sapiens
ggctgtgctttggaagagtatgcctgggtcccgccgggtctgaagcctgaacaggtaccattctggatgggagcatgctggtggtttgggtgtttcactttgccttactggtccttcctcattccagttctgtaggaagagtagactttgctgattcagagaagtggtagggctaaatatgttgaagatgccaggggccccagtggaaaatgaggaagggaaatgaaattgagccaggagtgatccattgctaattcattctgtattgtcattattaactgttaccaggaaatcacttgaacccaggaggtggaggttgtggtgagccgagatcgtgccattgcattccagcctggatgacaagagcgaaactcagtctgaaagaaagagacagagagagagagaaaagaaaaagaagaaagaaagaaggaaag

SEQ ID NO: 9617 - protein, 31 aa, Homo sapiens
MLVVWVFHFALLVLPHSSSVGRVDFADSEKW

SEQ ID NO: 9618 - DNA, 3089 bp, Homo sapiens
attttgatctcagcatgtgctgatggagtaatgaaataaagacaacactctgcaaatggctggatacattaagtgagaagcaacttgtaaagcacccaggaaaatatctgacacattgaagatggcaggatctgcctcagggatctgctcaagcaacgtgggatccccactttttcactctgctgaatactcgaccatattacaaggcaacaactgttctaagctggaactagagcatgaactggaatgaggaaggaccagtaaggcaaagtgaaacacccaaaccaccagcatgctcccatccagaatggtacctgttcaggcttcagacccggcgggacccaggcatactcttccaaagcacagcctgagtcatcatctgaggtcgagttcctctgaaagtcaaacatgagtttgctgatggtcttctccatctccagcggcatcactgtcaccatgtgctcctcctggggacacttgcagtgcaggcagatcttcctgcaggcagtaaaggtagaaggtgagaaagaggaaaaaacctttttttttttccaagagcctgccagtcactagcccctggatcccaaaccataaacacattccttggcaatgggcatcgggcaaaggcatcgcgagcagtgttccagaacatgactgtctttgcagagggcgtggtacacgcatgtgaaaacagcatgaaaggtcagaggccaccaggtaagcatgctaagggtgtttacatgtggaccccagccttctcttctaaatcaataccccaagaggaatggtaatatagtttttattttactaggtagaccactggatatggcccatgaccacaatttccttgactgcaatagcaattaaatatacataatacatatgttgacctgaagtgttacttgtagatttaacaaatactgacaacatactgcttttataaaaggttcctaagccctggaaaatggagaaaatggttttaaaaatgcaggtaaaatgttctttaagaagaagagcaaacatacatattttttctcatgaaacgtatctggccctaagatctcataggaaagacaatttcacctccattaaagatccctgtaggtttggaattctaattagaaacccaaattttccctatgttggtggggttttttatatacaagaagatcatgcatgtgaattatttcaaaaggtagcagccaaagataaaaatctcccaaactgaacatttctcttttaaggttaccatctgttctcttatccatagctacagaaatgatgaagcaataaatatgttgatgtcagcaacacaaaagcatttctagcttccaccaataaaataaaaagagagaaaaaaagaatagaggaggaaaattttaaggaaataagttattccatgttcactctttttaaaattattagtttccgtagcaccttataaaggtgataaaagagcccagaattttaatccccagatgtgcctgaacgttctgataacagctttgtgaagatacaatgtacaaaccataaaactcaccatttcaaagtgtacaattcatggactcttaatacattcggaattgtgaatcatcactatctaattttcatcccctccccaaaagaaaccccaggagcattggcagttatttcccatatccctctgcccccaggctctaacaaccactaatctattttctgtctctatggttttgcctattttggacatttcatataaatgcaatcatataatatgtggttcttttgaagttggcttctttcacacagaatgacttttcaaggttaatccaagttatagcatgtatcaatccttcatccccttttattgttgaataatatgccattgtatagatataccacattttcattgatcagttgtgcacatttggactattttcacctatggcttttatgaataatgatgctctgattacttatgtataattttttgtgtggatatttgttttgttttgttttgttttttgagacaggttctcattgtttcccaggatggagtgcagtgatgcaatcacggctcacagcagccttgacctcctgggctcaagcgatcctcctgtcttagcctcccaagtagctgggaccacacaggggcatgccaccacgcctggctttttttttttctgagacagagtctcactctgtcgcccaggctggagtgcagtggtgccatctcagctcactgcaacctctggccgcccaggttcaagcaattctcctgccttggcctcctgagtagctgggactacaggcatgcaccaccacgcccagctaatttttgtatttttagtagagacggggtttcaccatgttggccaggctggtcttgaactcctgacctcatgatccacccgcgtcagcctcccaaagtgctgggattacaggcatgagccactgccctcagtcggatatatgtttttaatttttttttttttttttgagatggagtcttgctctgtcgcccagactggagtgcagtggcacgatctcggctcactgcaagctccacctcctgggttcgtgccattctcatgcctcagcctcccgagtagctgggactacaggtgcctgccaccatgcctagctaattttttgtatttttagtagagaccgggtttcaccatattagccaggatggtcttgatctcctgacctcgtgatccgcctgcctcggcctcccaaagtgctaggattacaggcatgagccaccacgcctggccaaagtttttaattcttttgggtatattcctagaaatgaaattgctaggtcatgtggcaactttagatttaacattttgaggaactcccaaattgttttcacaaaatatctgtacctttgtacattcccaccactgatgaatgagtgttccattttctccatattcttgtcacatttgttattgtctgtcttcttttattgtagctactatagtgggtataaaacagtatttaattgtggttttgatttgcatttccctaacgtctaatgatgttgaatatctttttatgtgcttattatgtatcttcttagaatagagacatgtctatac

SEQ ID NO: 9619 - protein, 44 aa, Homo sapiens
MNWNEEGPVRQSETPKPPACSHPEWYLFRLQTRRDPGILFQSTA

SEQ ID NO: 9620 - DNA, 2084 bp, Homo sapiens
aggattcctcatgggatgacaaggccttgctccagggatgatgtttcccactgtaggagaacagctactgtctttgatgaactgagtctacagggctattgaagggtcttgctgtgctgcccagcctggagtgtggtggtgcgatcatggctcactgaagcctccacttacaactcctggactcaagtgatcctcccacctgagcctcctgagtagctaggactataggcacttggcaccacacctggcaaattttttttatcataggatctcgctacattggccaggctggtctcaaacttctggccccaagtgattttcccacctctgcctcccaaagtgctgagactacagtctggcccttcatgatctctagatattaccaaaagtcccagagaaatgagtgcatggatggcttaatgacaacccactttcttctctggaagaaagaacttagtacagccctaccagaaggtgggatggcaatgccatcttcagacttgagtgttggggaggccttttctgctaaccaacagcaaatgttttacaagagaaacaggacacacagtagatgaaggcagccatggaaaatctgtatgaattatccactctgttgatctgtgcttaaaatatagaagggaaagtgaagaataaaaatgtgtccatgagcatcccacctggcttgcatccagattgaacaatttgaatgctaagagcaggattttgatagtatggcagacattgctcattgctcagccaacccattctcccctttgtccttactaacaacatcctgattttgtgtaggcaacaatgctcccagctaaaattacctactttaccagactcctatgcagttagaggtggcccagtaaccctggcaaataagatgcatgcaggcattactggactgagcttccaaaaacagcttttaaaaggggcaagctcaactgcatgaccctttgggcttttgaacctctttacctggaaatgagacctaaagctaaaaatgaaacaactgtcttgttatcatgaggtgactatcatgaagatgaaaacctccacaccaaataagtggaaagaaaagttggaaagaggtggagagaatgactcaatctttgatgtatcagtgctgcattgcctccctcaaaatgtctcaactgttttatgcagctgagcaaattcgtgatctcaaacagcaactcaagcaactccaggaaagaaaaaaaattgaccactggaggagatacctaagataatcctggtgatactttcggtgctacaagaaaaaaataatcctcgcacccaagaagaaacaatgaaaccttatttttcatgtaaatttctactcctgtttggttcaagcatttgaactgttgcataagatttttttgagtgccgctgagaaaagtattatcaatctagaatgcaccagaaagaaagcagcagaaagattacaaacagcttttctaaacccttgtccagcatttaccagaaagagcagcatgaattaacaaaagcagaaattttagttaaaaaaaaaaagcaactcaactctgattcctgagacatataatacaggacgtctatcgcccatttaccctcatccaactcaaatggctaccaaactctaaaattagcagggcatgtcgggaagacttcttattccttgtattacagatctgttgacgtgtcagtagcattttcctttgcaagttataaaatttcctttccccagtcttcaaataggcacttccccctccccaaagtctcttttgtcaccaactgccataacccaccaatcagggaaacaaatttcagttcataaaagaaaaccatgggtgacctactgaggaccacagtttcatttccataacaaagactgacatacaacccatgcccaaagtctggaacagctatgaataactgtggctgaatagtctattttctgttgggattcatatcaaactctatatttgaacttgagatatcagaacttttgtattataatacataaaacctaggtagtgagtttgaattgtctgcatttattctccatgggtaataaaaactcattgtttctc

SEQ ID NO: 9621 - protein, 69 aa, Homo sapiens
MISRYYQKSQRNECMDGLMTTHFLLWKKELSTALPEGGMAMPSSDLSVGEAFSANQQQMFYKRNRTHSR

SEQ ID NO: 9622 - DNA, 2401 bp, Homo sapiens
tcccgctgctcctcctccgcctccttcccctgcccgcgcccgccctactgccccgtgccgagtttcctgtttaagatggcgtcccccgtagcagcgcaggccgggaagcttctgcgagccctagcgctgcggccccgcttcctggcggccgggtcccaggcagttcaattaacctccagaagatggctgaacctgcaggaataccagagcaagaaactgatgtctgacaacggagtgagagttcaaagattctttgtagcagacactgcaaatgaagctctcgaggctgctaagagactaaatgcaaaagaaattgttttaaaagcccagatcttagctggaggaagaggaaaaggtgtcttcaatagtggtttgaaaggaggtgttcatttaacaaaagaccctaatgttgtgggacagctggctaaacagatgattgggtacaatctagcgacaaaacaaactccaaaagaaggtgtgaaagttaacaaggtgatggttgctgaagccttggatatttccagagaaacctacctggcaattctgatggaccggtcctgcaatggccccgtgctggtgggcagcccccaggggggcgtcgacattgaagaggtggctgcttcaaacccggagctcatttttaaggagcaaattgacatttttgaaggaataaaggacagccaagctcagcggatggccgaaaatctaggcttcgttgggcctttgaaaagccaggctgcagatcaaattacgaagctgtataatctcttcctgaaaattgatgctactcaggtggaagtgaatccctttggtgaaactccagaaggacaagttgtctgttttgatgccaagataaactttgatgacaacgcagaattccgacaaaaagacatatttgctatggacgacaaatcagagaatgagcccattgaaaatgaagctgccaaatatgatctaaaatacataggactagatgggaacattgcctgctttgtgaatggtgctgggctcgccatggctacttgtgatatcattttccttaatggtgggaagccagccaacttcttggatcttggaggtggtgtaaaggaagctcaagtatatcaagcattcaaattgctcacagctgatcctaaggttgaagccatccttgtcaatatatttggtggtatcgtcaactgtgccatcattgccaatgggatcaccaaagcctgccgggagctagaactcaaggtgcccctggtggtccggcttgaaggaaccaacgtccaagaggcccagaagatactcaacaacagcggactccccattacttcagccattgacctggaggatgcagccaagaaggctgtggccagtgtggccaagaagtgatgtctttgtcctgatccaatggagaaagaaagccatttttccgtaaaaagggatggttcatcattgtgaaagaaatggttatctcattggggaagaaaaggggagggggaaggcaagaatcactgaaaaatcttaaatctgtgttttctggaataagatatctagacagcctaaatctgattttggtctttataaaaataatatcttgtgttctcatacttttctgtcactgtaagcctgcccagtaggcagtgttttgcagactttggggagtggtctatgtggccaaatattgtgtgtatagacagaatttgaaatcaagtcctgcttcatttacaagaattttggtgggcatctaatcctacataatgaaaaagaaaaacagaccatttaaaaactcagacaagattatatttaatatattaattactaaaaaggcataagattacactgaacatattagctactaaaaaggcactgctaagacattcaagcaaatagctattacacactactgcagattttacaggtttctaattctaacatatgtttgaaaaatccgtgagtattccaaaatatatttaataatggaatatctgcattaatataccatccatgtgtttttaccatttgccttaatattgaatatactgtttacctcacactaaaaagaaaaccagaagccttatttgtgattttgggagtggaagcttccatttttgtgtcaaaaatgaatcctgattcttatggaaatctctgttattaagatatttcaagatgagacaacactgaagatcaaattgtgtttagtatcactatcttctctcctcgtttctctcttactcctcatcctcccagaatctaccagtttatggtagaaagatgggaaccttatttgaatgtgttttttttttccatgatgtccaattttgttgtgggaaaggatttggataaaatttttgtttaaattttggtagatttttatctatacaaatttaaataaaattatgttttgtaagctgtaaga

SEQ ID NO: 9623 - protein, 432 aa, Homo sapiens
MASPVAAQAGKLLRALALRPRFLAAGSQAVQLTSRRWLNLQEYQSKKLMSDNGVRVQRFFVADTANEALEAAKRLNAKEIVLKAQILAGGRGKGVFNSGLKGGVHLTKDPNVVGQLAKQMIGYNLATKQTPKEGVKVNKVMVAEALDISRETYLAILMDRSCNGPVLVGSPQGGVDIEEVAASNPELIFKEQIDIFEGIKDSQAQRMAENLGFVGPLKSQAADQITKLYNLFLKIDATQVEVNPFGETPEGQVVCFDAKINFDDNAEFRQKDIFAMDDKSENEPIENEAAKYDLKYIGLDGNIACFVNGAGLAMATCDIIFLNGGKPANFLDLGGGVKEAQVYQAFKLLTADPKVEAILVNIFGGIVNCAIIANGITKACRELELKVPLVVRLEGTNVQEAQKILNNSGLPITSAIDLEDAAKKAVASVAKK

SEQ ID NO: 9624 - DNA, 7017 bp, Homo sapiens
atcacagcttggtgctggggctcagcatggccaggtggctaaccagggcttggtgtcaactacatttgggatgatgacacttggaggacacagagccactgtgcagcaggagtcgccactgctaacagccagagtgtcccagaagcttttgttgacaattccagtttccgaacaaaacatttcggcaatggtgagggcttcgatcccttctctgatttgctgtcagccatgaacggatggatgtgatgcctgctagccaaaaggcttccctctgtgtgttgcagtcctgtggcattatgcatgccccctcccagtgaccccaggctttttatggctgtgagacacgttaaaatttcaggggtaagacgtgaccttttgaggtgactataactgaagattgctttacagaagccaaaaaaggtttttgagtcatgatgcaagaatctgggactgagacaaaaagtaacggttcagccatccagaatgggtcgggcggcagcaaccacttactagagtgcggcggtcttcgggaggggcggtccaacggagagacgccggccgtggacatcggggcagctgacctcgcccacgcccagcagcagcagcaacaggcacttcaggtggcaagacagctccttcttcagcagcaacagcagcagcaagttagtggattaaaatctcccaagaggaatgacaaacaaccagctcttcaggttcccgtgtcagtggctatgatgacacctcaagttatcactccccagcaaatgcagcagatcctccagcaacaagtgctgagccctcagcagctccaggttctcctccagcagcagcaggccctcatgcttcaacagcagcagcttcaagagttttataaaaaacaacaggaacagttgcagcttcaacttttacaacaacaacatgctggaaaacagcctaaagagcaacagcaggtggctacccagcagttggcttttcagcagcagcttttacagatgcagcagttacagcagcagcacctcctgtctttgcagcgccaaggccttctgacaattcagcccgggcagcctgcccttccccttcaacctcttgctcaaggcatgattccaacagaactgcagcagctctggaaagaagtgacaagtgctcatactgcagaagaaaccacaggcaacaatcacagcagtttggatctgaccacgacatgtgtctcctcctctgcaccttccaagacctccttaataatgaacccacatgcctctaccaatggacagctctcagtccacactcccaaaagggaaagtttgtcccatgaggagcacccccatagccatcctctctatggacatggtgtatgcaagtggccaggctgtgaagcagtgtgcgaagatttccaatcatttctaaaacatctcaacagtgagcatgcgctggacgatagaagtacagcccaatgtagagtacaaatgcaggttgtacagcagttagagctacagcttgcaaaagacaaagaacgcctgcaagccatgatgacccacctgcatgtgaagtctacagaacccaaagccgcccctcagcccttgaatctggtatcaagtgtcactctctccaagtccgcatcggaggcttctccacagagcttacctcatactccaacgaccccaaccgcccccctgactcccgtcacccaaggcccctctgtcatcacaaccaccagcatgcacacggtgggacccatccgcaggcggtactcagacaaatacaacgtgcccatttcgtcagcagatattgcgcagaaccaagaattttataagaacgcagaagttagaccaccatttacatatgcatctttaattaggcaggccattctcgaatctccagaaaagcagctaacactaaatgagatctataactggttcacacgaatgtttgcttacttccgacgcaacgcggccacgtggaagaatgcagtgcgtcataatcttagtcttcacaagtgttttgtgcgagtagaaaacgttaaaggggcagtatggacagtggatgaagtagaattccaaaaacgaaggccacaaaagatcagtggtaacccttcccttattaaaaacatgcagagcagccacgcctactgcacacctctcaatgcagctttacaggcttcaatggctgagaatagtatacctctatacactaccgcttccatgggaaatcccactctgggcaacttagccagcgcaatacgggaagagctgaacggggcaatggagcataccaacagcaacgagagtgacagcagtccaggcagatctcctatgcaagccgtgcatcctgtacacgtcaaagaagagcccctcgatccagaggaagctgaagggcccctgtccttagtgacaacagccaaccacagtccagattttgaccatgacagagattacgaagatgaaccagtaaacgaggacatggagtgactatcggggcgggccaaccccgagaatgaagattggaaaaaggaaaaaaaaaaaaacacgtcaaaagttagcagtgaaattgttctccatttgttgtacagtctggaggattttcactacgttttgacaactctgaaatgtgttaactcttagtgccatcaagaaccccatttgggagtatttttgatttttctactttttgttgaaaaaaggaatttgtactctgtgcattggatggacttgtttggtacttgggattttcctctcttaaccgtcaacatcagtgttgtaaatttgctaaactgattcacttttagcagcagactttgaactgcagtcctgccaacgttggacactgaggacgcccgacagagcttgtgcacctaagctgcagaccaagcctttgcccagaatttaaggattccaatggacgacctatttgcacagtactgcatgttgattatcactgcctttactccttttttttttttttttttttttttttttttgcttccagttgggatggggaaggcctttgtgtgtgtattggggggaggggttaaaaaataattatcccaaactttttaatgtattgctttttttttttttttttttccttctactataccattttaagttctgacctcaggcctccatttgggccgatggcctcttggaggcttaaagttttctgtaccttgtgatgaatgttaataggtgtttttattatacaaagctgaatgtcatttctcgtttgtagctttctgtcactcattccatcttccttcagacatcaccacgtttctctaaagtcagaaaacattccgttttggtctttttcaaaaaggtcccaaatgctgcactctacacatgaaggccctctcacacagacgtgacgtcctgccagaaagagaatgaatgacagaaaaaaaaaagagagacaaactctaggaacaatgccgattcattccacgcagcagtattgggggtggttcgggggaggggtgtttcggattttctttttttcttttcttttctttttttttttttgcagcaaccattaataaatgccaccacattctaccagcacaaggaaacataggcagcactgaaaaaaaaaaaaaagctcatattaattagactgacaatatggccttggaaggctctcccttgtggaaccaagttgccatgggccttgggtgctctgcgataacgggtgtgggttggttttgtttgcaaaatggccaaaaaaaaaaaccggcttccccgagcagctgccctgaaagtaggggtggcggcggcggcgctgagtttatacattagttcagacctacttggtggcattaaactgtttgaatgcaaattcgatttcagattgaacttgttaagggagttaacgagggctgagttcagcaaatgctaaagtgttaatttcaaatatgcaaatttggtactgcagtttgttatgcaatattatatcaccaacccagtatcacaaaaactcatagaagatatcatgtaggccctgggctttgggggggtcccaaacatggtatgcagaaatgtgatggttacaggtcagtacaacctcagtccttagaacccctccacacttcagctctgcacccactttcctgtcatttatttatataggactgtagttttttttagttcgagagcctttcgaagcttaatttatattctttctttgtaccttttttctaaaattaccaaagatattacacaaaggtaaattatgttctctgttttatgctttatctgatgaagccaaatatcctcttattgttgatcaaaggaggcaaaagaatttagaggcaaatgacaagcgataggctattgcaacctgagaaagagaactgctccttcatcgtaaatttagaagaccaagtagataatggaaccaaagttgttacttttttctagtagttatttttcctttttctttttgtgtacctctacagagaccaaaactcattctcttaaagagattttatggggctactgcagataaaaataggacacaatattaaaggagctacagaaggaagggagtcccatctcaaaaaaaaaatgaatgtatgccactgcaattagagtatccaataaaggagacagtttagagtcaggacagaaaagcttccataattgaactagattacataatagtatttctagaaaaagagatatttttagattgtatgccacttttgtttaagaactgtgctgtgatcactgtattaattttggtttatcttggcatatatccttcagtttgtttttatttttaatttttcctttttttccgattaggctttggtcagcatttttcatttaaagaaaagtaacactcccatccactcataagcttggtacaaaaacttctctggcagttacttttgaagcttcactctgctttctgtataaagggcagtctgtggtcacgcaagactttaaaaaaaaaaaaaaaaaaaaaaaaaaaaaaaaaaaaaaaaacttttccaggcagcttcatgatgtgcaggcagtagccagacagggtcatgggaagggggccctgtgcttctaaactgagtggttgctggttagtttggtattcaaaagaggataaaaatctggtagattagttcattctcagcatgtgtagctagacatgagtaaagataacagcatgagaaactgttagtacgcatacctcagttcaaacctttagggaatgattaaaatttaaaaaaaaaacatttcactcagttgcacttagtcgtatgtcttgcatgcttagtctaaagactgtagcaaaaaaaaaaaaaaaagaaaaattagattttacatatctttgcaggtatcacagccttgcagaagaaccaactgaaaaaaaaattctcaggctttacagcaagcaaacttcactatgatttttacaattctgattctgtatcccctgggggttatcccagttgcttctttaggatggggtttattacgttgtacatatatcccgatgtgtctgtgtgaatctttgtcttttttgggggagggcagagggcggttctttttttagatattgttcctaaaaaggaataaatgcatacacctgtttgtcaaaacacctttgctttttgtgcaactgctttatattaacgatactaaaaaaaaatagctttggaaaaaaaactactgtatgtaacggaattgcagaatatgctgcacatgtattttatttagttatccttgctttaagaatattggatgacatttcctgacatgtgggagggagaaactccctaactttttttttctgcttttaaactgtaacatagttgaagatttcttttttctgttctcattgattggagcattttgtacaggttttgtgtgtgtgtgtgtgtgtgtgtgcgcgcgtgcgtgtgtgttaatctgttttttgatacattcctatcccttgtgtttatcctaccactgccttcctggctatcttaaacaagttcatacatttgaaaagaaaaaaaaatgttgtttaaaaaatgttttctcctgctgcagtaaatattttgcatgatgaaattccagggtcacacttttccaagtttatcagtgaagtagtgattaacaatggggagtgtcaaaactattgaacttttgtataaaaaaaaaaaaactttacaaggtgccaagatgtaaagaaaatctgttactttttttttctcaaagaaaagcatacattagggaggtagtcccgtgtgtcagacaaatgcactgtcaggaatgaggatccaacctacctgtccctagagtccgtcttgtaagatgagttaggctgccccttggaccagccacaaaatggaatatcaaggcttatgtacatacgtgaagagttaccaccagtcctgccacctttggacagctctaacaccatccccagcatccagtcagacctagtaaagaaaaccttggattcttaacccaagataggctgtaaatcactagcttttttttcctcatgaaaaaaaatagagttaaaaaatatttcctctcttttccatattccagctgaactccgtttccaaaggcacaaagaagagtgtgcttattcagattttgaatctttttggtaccttttggttaatgacatagcctcctgaaattctggatgtcttcaaagtcagttttgcttctttatcctgaaaatcagatttacaatgctgaaggcatttcttgggcccagtgtagctcacgcaatctctgctacccataagccttgatgaagatgatacagtccggactgtgagcatggtgcttcatgtatatgtgctgccagtaacaagaatttttttgttttgttttgttttgttttgataaggcataaaagaaactcattccttgacatcaactgtaattccatcattccatgtctgcggatacagacaataaaaaaaatgttgtgtagtcagtactaattactgacattataagcattctcaaatgcaataaaaatgctggttgttcacgctggtagtaaaagttgccacagcct

SEQ ID NO: 9625 - protein, 677 aa, Homo sapiens; identical to SEQ ID NO: 822

SEQ ID NO: 9626 - DNA, 5586 bp, Homo sapiens
atcacagcttggtgctggggctcagcatggccaggtggctaaccagggcttggtgtcaactacatttgggatgatgacacttggaggacacagagccactgtgcagcaggagtcgccactgctaacagccagagtgtcccagaagcttttgttgacaattccagtttccgaacaaaacatttcggcaatggtgagggcttcgatcccttctctgatttgctgtcagccatgaacggatggatgtgatgcctgctagccaaaaggcttccctctgtgtgttgcagtcctgtggcattatgcatgccccctcccagtgaccccaggctttttatggctgtgagacacgttaaaatttcaggggtaagacgtgaccttttgaggtgactataactgaagattgctttacagaagccaaaaaaggtttttgagtcatgatgcaagaatctgggactgagacaaaaagtaacggttcagccatccagaatgggtcgggcggcagcaaccacttactagagtgcggcggtcttcgggaggggcggtccaacggagagacgccggccgtggacatcggggcagctgacctcgcccacgcccagcagcagcagcaacaggcacttcaggtggcaagacagctccttcttcagcagcaacagcagcagcaagttagtggattaaaatctcccaagaggaatgacaaacaaccagctcttcaggttcccgtgtcagtggctatgatgacacctcaagttatcactccccagcaaatgcagcagatcctccagcaacaagtgctgagccctcagcagctccaggttctcctccagcagcagcaggccctcatgcttcaacagcagcagcttcaagagttttataaaaaacaacaggaacagttgcagcttcaacttttacaacaacaacatgctggaaaacagcctaaagagcaacagcaggtggctacccagcagttggcttttcagcagcagcttttacagatgcagcagttacagcagcagcacctcctgtctttgcagcgccaaggccttctgacaattcagcccgggcagcctgcccttccccttcaacctcttgctcaaggcatgattccaacagaactgcagcagctctggaaagaagtgacaagtgctcatactgcagaagaaaccacaggcaacaatcacagcagtttggatctgaccacgacatgtgtctcctcctctgcaccttccaagacctccttaataatgaacccacatgcctctaccaatggacagctctcagtccacactcccaaaagggaaagtttgtcccatgaggagcacccccatagccatcctctctatggacatggtgtatgcaagtggccaggctgtgaagcagtgtgcgaagatttccaatcatttctaaaacatctcaacagtgagcatgcgctggacgatagaagtacagcccaatgtagagtacaaatgcaggttgtacagcagttagagctacagcttgcaaaagacaaagaacgcctgcaagccatgatgacccacctgcatgtgaagtctacagaacccaaagccgcccctcagcccttgaatctggtatcaagtgtcactctctccaagtccgcatcggaggcttctccacagagcttacctcatactccaacgaccccaaccgcccccctgactcccgtcacccaaggcccctctgtcatcacaaccaccagcatgcacacggtgggacccatccgcaggcggtactcagacaaatacaacgtgcccatttcgtcagcagatattgcgcagaaccaagaattttataagaacgcagaagttagaccaccatttacatatgcatctttaattaggcaggccattctcgaatctccagaaaagcagctaacactaaatgagatctataactggttcacacgaatgtttgcttacttccgacgcaacgcggccacgtggaagaatgcagtgcgtcataatcttagtcttcacaagtgttttgtgcgagtagaaaacgttaaaggggcagtatggacagtggatgaagtagaattccaaaaacgaaggccacaaaagatcagtggtaacccttcccttattaaaaacatgcagagcagccacgcctactgcacacctctcaatgcagctttacaggcttcaatggctgagaatagtatacctctatacactaccgcttccatgggaaatcccactctgggcaacttagccagcgcaatacgggaagagctgaacggggcaatggagcataccaacagcaacgagagtgacagcagtccaggcagatctcctatgcaagccgtgcatcctgtacacgtcaaagaagagcccctcgatccagaggaagctgaagggcccctgtccttagtgacaacagccaaccacagtccagattttgaccatgacagagattacgaagatgaaccagtaaacgaggacatggagtgactatcggggcgggccaaccccgagaatgaagattggaaaaaggaaaaaaaaaaaaacacgtcaaaagttagcagtgaaattgttctccatttgttgtacagtctggaggattttcactacgttttgacaactctgaaatgtgttaactcttagtgccatcaagaaccccatttgggagtatttttgatttttctactttttgttgaaaaaaggaatttgtactctgtgcattggatggacttgtttggtacttgggattttcctctcttaaccgtcaacatcagtgttgtaaatttgctaaactgattcacttttagcagcagactttgaactgcagtcctgccaacgttggacactgaggacgcccgacagagcttgtgcacctaagctgcagaccaagcctttgcccagaatttaaggattccaatggacgacctatttgcacagtactgcatgttgattatcactgcctttactccttttttttttttttttttttttttttttttgcttccagttgggatggggaaggcctttgtgtgtgtattggggggaggggttaaaaaataattatcccaaactttttaatgtattgctttttttttttttttttttccttctactataccattttaagttctgacctcaggcctccatttgggccgatggcctcttggaggcttaaagttttctgtaccttgtgatgaatgttaataggtgtttttattatacaaagctgaatgtcatttctcgtttgtagctttctgtcactcattccatcttccttcagacatcaccacgtttctctaaagtcagaaaacattccgttttggtctttttcaaaaaggtcccaaatgctgcactctacacatgaaggccctctcacacagacgtgacgtcctgccagaaagagaatgaatgacagaaaaaaaaaagagagacaaactctaggaacaatgccgattcattccacgcagcagtattgggggtggttcgggggaggggtgtttcggattttctttttttcttttcttttctttttttttttttgcagcaaccattaataaatgccaccacattctaccagcacaaggaaacataggcagcactgaaaaaaaaaaaaaagctcatattaattagactgacaatatggccttggaaggctctcccttgtggaaccaagttgccatgggccttgggtgctctgcgataacgggtgtgggttggttttgtttgcaaaatggccaaaaaaaaaaaccggcttccccgagcagctgccctgaaagtaggggtggcggcggcggcgctgagtttatacattagttcagacctacttggtggcattaaactgtttgaatgcaaattcgatttcagattgaacttgttaagggagttaacgagggctgagttcagcaaatgctaaagtgttaatttcaaatatgcaaatttggtactgcagtttgttatgcaatattatatcaccaacccagtatcacaaaaactcatagaagatatcatgtaggccctgggctttgggggggtcccaaacatggtatgcagaaatgtgatggttacaggtcagtacaacctcagtccttagaacccctccacacttcagctctgcacccactttcctgtcatttatttatataggactgtagttttttttagttcgagagcctttcgaagcttaatttatattctttctttgtaccttttttctaaaattaccaaagatattacacaaaggtaaattatgttctctgttttatgctttatctgatgaagccaaatatcctcttattgttgatcaaaggaggcaaaagaatttagaggcaaatgacaagcgataggctattgcaacctgagaaagagaactgctccttcatcgtaaatttagaagaccaagtagataatggaaccaaagttgttacttttttctagtagttatttttcctttttctttttgtgtacctctacagagaccaaaactcattctcttaaagagattttatggggctactgcagataaaaataggacacaatattaaaggagctacagaaggaagggagtcccatctcaaaaaaaaaatgaatgtatgccactgcaattagagtatccaataaaggagacagtttagagtcaggacagaaaagcttccataattgaactagattacataatagtatttctagaaaaagagatatttttagattgtatgccacttttgtttaagaactgtgctgtgatcactgtattaattttggtttatcttggcatatatccttcagtttgtttttatttttaatttttcctttttttccgattaggctttggtcagcatttttcatttaaagaaaagtaacactcccatccactcataagcttggtacaaaaacttctctggcagttacttttgaagcttcactctgctttctgtataaagggcagtctgtggtcacgcaagactttaaaaaaaaaaaaaaaaaaaaaaaaaaaaaaaaaaaaaaaaacttttccaggcagcttcatgatgtgcaggcagtagccagacagggtcatgggaagggggccctgtgcttctaaactgagtggttgctggttagtttggtattcaaaagaggataaaaatctggtagattagttcattctcagcatgtgtagctagacatgagtaaagataacagcatgagaaactgttagtacgcatacctcagttcaaacctttagggaatgattaaaatttaaaaaaaaaacatttcactcagttgcacttagtcgtatgtcttgcatgcttagtctaaagactgtagcaaaaaaaaaaaaaaaagaaaaattagattttacatatctttgcaggtatcacagccttgcagaagaaccaactgaaaaaaaaattctcaggctttacagcaagcaaacttcactatgatttttacaattctgattctgtatcccctgggggttatcccagttgcttctttaggatggggtttattacgttgtacatatatcccgatgtgtctgtgtgaatctttgtcttttttgggggagggcagagggcggttctttttttagatattgttcctaaaaaggaataaatgcatacacctgtttgtc

SEQ ID NO: 9627 - protein, 677 aa, Homo sapiens; identical to SEQ ID NO: 822

SEQ ID NO: 9628 - DNA, 3078 bp, Homo sapiens
atttattgtgtggcggttgcacgctgtactcgcggcggcccggccctcgcccgggagtgcgtgtgtgcgcgcgtgtgtgcgcgagtgagtgtgtgcgcggggtgcgcgcgcgggcgggagtgggcgcgcgcggggaaaggcccgaaaacaccttagtttgcaccgagagaccatttgcagcggaacccgaaagtttgtaagaggaagagagcgcgcggcgagcgagcgagcgggccgggggcagcggcagcggcgccggggaccatggtgctgccggcgcctcctccgcgggcgtgaaggcggcgctcctactccctccccggactccgcggtgtcccagaagcttttgttgacaattccagtttccgaacaaaacatttcggcaatggtgagggcttcgatcccttctctgatttgctgtcagccatgaacggatggatgtgatgcctgctagccaaaaggcttccctctgtgtgttgcagtcctgtggcattatgcatgccccctcccagtgaccccaggctttttatggctgtgagacacgttaaaatttcaggggtaagacgtgaccttttgaggtgactataactgaagattgctttacagaagccaaaaaaggtttttgagtcatgatgcaagaatctgggactgagacaaaaagtaacggttcagccatccagaatgggtcgggcggcagcaaccacttactagagtgcggcggtcttcgggaggggcggtccaacggagagacgccggccgtggacatcggggcagctgacctcgcccacgcccagcagcagcagcaacaggcacttcaggtggcaagacagctccttcttcagcagcaacagcagcagcaagttagtggattaaaatctcccaagaggaatgacaaacaaccagctcttcaggttcccgtgtcagtggctatgatgacacctcaagttatcactccccagcaaatgcagcagatcctccagcaacaagtgctgagccctcagcagctccaggttctcctccagcagcagcaggccctcatgcttcaacagcagcagcttcaagagttttataaaaaacaacaggaacagttgcagcttcaacttttacaacaacaacatgctggaaaacagcctaaagagcaacagcaggtggctacccagcagttggcttttcagcagcagcttttacagatgcagcagttacagcagcagcacctcctgtctttgcagcgccaaggccttctgacaattcagcccgggcagcctgcccttccccttcaacctcttgctcaaggcatgattccaacagaactgcagcagctctggaaagaagtgacaagtgctcatactgcagaagaaaccacaggcaacaatcacagcagtttggatctgaccacgacatgtgtctcctcctctgcaccttccaagacctccttaataatgaacccacatgcctctaccaatggacagctctcagtccacactcccaaaagggaaagtttgtcccatgaggagcacccccatagccatcctctctatggacatggtgtatgcaagtggccaggctgtgaagcagtgtgcgaagatttccaatcatttctaaaacatctcaacagtgagcatgcgctggacgatagaagtacagcccaatgtagagtacaaatgcaggttgtacagcagttagagctacagcttgcaaaagacaaagaacgcctgcaagccatgatgacccacctgcatgtgaagtctacagaacccaaagccgcccctcagcccttgaatctggtatcaagtgtcactctctccaagtccgcatcggaggcttctccacagagcttacctcatactccaacgaccccaaccgcccccctgactcccgtcacccaaggcccctctgtcatcacaaccaccagcatgcacacggtgggacccatccgcaggcggtactcagacaaatacaacgtgcccatttcgtcagcagatattgcgcagaaccaagaattttataagaacgcagaagttagaccaccatttacatatgcatctttaattaggcaggccattctcgaatctccagaaaagcagctaacactaaatgagatctataactggttcacacgaatgtttgcttacttccgacgcaacgcggccacgtggaagaatgcagtgcgtcataatcttagtcttcacaagtgttttgtgcgagtagaaaacgttaaaggggcagtatggacagtggatgaagtagaattccaaaaacgaaggccacaaaagatcagtggtaacccttcccttattaaaaacatgcagagcagccacgcctactgcacacctctcaatgcagctttacaggcttcaatggctgagaatagtatacctctatacactaccgcttccatgggaaatcccactctgggcaacttagccagcgcaatacgggaagagctgaacggggcaatggagcataccaacagcaacgagagtgacagcagtccaggcagatctcctatgcaagccgtgcatcctgtacacgtcaaagaagagcccctcgatccagaggaagctgaagggcccctgtccttagtgacaacagccaaccacagtccagattttgaccatgacagagattacgaagatgaaccagtaaacgaggacatggagtgactatcggggcgggccaaccccgagaatgaagattggaaaaaggaaaaaaaaaaaaacacgtcaaaagttagcagtgaaattgttctccatttgttgtacagtctggaggattttcactacgttttgacaactctgaaatgtgttaactcttagtgccatcaagaaccccatttgggagtatttttgatttttctactttttgttgaaaaaaggaatttgtactctgtgcattggatggacttgtttggtacttgggattttcctctcttaaccgtcaacatcagtgttgtaaatttgctaaactgattcacttttagcagcagactttgaactgcagtcctgccaacgttggacactgaggacgcccgacagagcttgtgcacctaagctgcagaccaagcctttgcccagaatt

SEQ ID NO: 9629 - protein, 677 aa, Homo sapiens; identical to SEQ ID NO: 822

SEQ ID NO: 9630 - DNA, 2975 bp, Homo sapiens
ggggggtgggcgccagcgccccggcgaacggcaaagagggagccgctcccgctcggggggccgctggagtgcccagcgggaacccgaaagtttgtaagaggaagagagcgcgcggcgagcgagcgagcgggccgggggcagcggcagcggcgccggggaccatggtgctgccggcgcctcctccgcgggcgtgaaggcggcgctcctactccctccccggactccgcggtgtcccagaagcttttgttgacaattccagtttccgaacaaaacatttcggcaatggtgagggcttcgatcccttctctgatttgctgtcagccatgaacggatggatgtgatgcctgctagccaaaaggcttccctctgtgtgttgcagtcctgtggcattatgcatgccccctcccagtgaccccaggctttttatggctgtgagacacgttaaaatttcaggggtaagacgtgaccttttgaggtgactataactgaagattgctttacagaagccaaaaaaggtttttgagtcatgatgcaagaatctgggactgagacaaaaagtaacggttcagccatccagaatgggtcgggcggcagcaaccacttactagagtgcggcggtcttcgggaggggcggtccaacggagagacgccggccgtggacatcggggcagctgacctcgcccacgcccagcagcagcagcaacaggcacttcaggtggcaagacagctccttcttcagcagcaacagcagcagcaagttagtggattaaaatctcccaagaggaatgacaaacaaccagctcttcaggttcccgtgtcagtggctatgatgacacctcaagttatcactccccagcaaatgcagcagatcctccagcaacaagtgctgagccctcagcagctccaggttctcctccagcagcagcaggccctcatgcttcaacagcagcagcttcaagagttttataaaaaacaacaggaacagttgcagcttcaacttttacaacaacaacatgctggaaaacagcctaaagagcaacagcaggtggctacccagcagttggcttttcagcagcagcttttacagatgcagcagttacagcagcagcacctcctgtctttgcagcgccaaggccttctgacaattcagcccgggcagcctgcccttccccttcaacctcttgctcaaggcatgattccaacagaactgcagcagctctggaaagaagtgacaagtgctcatactgcagaagaaaccacaggcaacaatcacagcagtttggatctgaccacgacatgtgtctcctcctctgcaccttccaagacctccttaataatgaacccacatgcctctaccaatggacagctctcagtccacactcccaaaagggaaagtttgtcccatgaggagcacccccatagccatcctctctatggacatggtgtatgcaagtggccaggctgtgaagcagtgtgcgaagatttccaatcatttctaaaacatctcaacagtgagcatgcgctggacgatagaagtacagcccaatgtagagtacaaatgcaggttgtacagcagttagagctacagcttgcaaaagacaaagaacgcctgcaagccatgatgacccacctgcatgtgaagtctacagaacccaaagccgcccctcagcccttgaatctggtatcaagtgtcactctctccaagtccgcatcggaggcttctccacagagcttacctcatactccaacgaccccaaccgcccccctgactcccgtcacccaaggcccctctgtcatcacaaccaccagcatgcacacggtgggacccatccgcaggcggtactcagacaaatacaacgtgcccatttcgtcagcagatattgcgcagaaccaagaattttataagaacgcagaagttagaccaccatttacatatgcatctttaattaggcaggccattctcgaatctccagaaaagcagctaacactaaatgagatctataactggttcacacgaatgtttgcttacttccgacgcaacgcggccacgtggaagaatgcagtgcgtcataatcttagtcttcacaagtgttttgtgcgagtagaaaacgttaaaggggcagtatggacagtggatgaagtagaattccaaaaacgaaggccacaaaagatcagtggtaacccttcccttattaaaaacatgcagagcagccacgcctactgcacacctctcaatgcagctttacaggcttcaatggctgagaatagtatacctctatacactaccgcttccatgggaaatcccactctgggcaacttagccagcgcaatacgggaagagctgaacggggcaatggagcataccaacagcaacgagagtgacagcagtccaggcagatctcctatgcaagccgtgcatcctgtacacgtcaaagaagagcccctcgatccagaggaagctgaagggcccctgtccttagtgacaacagccaaccacagtccagattttgaccatgacagagattacgaagatgaaccagtaaacgaggacatggagtgactatcggggcgggccaaccccgagaatgaagattggaaaaaggaaaaaaaaaaaaacacgtcaaaagttagcagtgaaattgttctccatttgttgtacagtctggaggattttcactacgttttgacaactctgaaatgtgttaactcttagtgccatcaagaaccccatttgggagtatttttgatttttctactttttgttgaaaaaaggaatttgtactctgtgcattggatggacttgtttggtacttgggattttcctctcttaaccgtcaacatcagtgttgtaaatttgctaaactgattcacttttagcagcagactttgaactgcagtcctgccaacgttggacactgaggacgcccgacagagcttgtgcacctaagctgcagaccaagcctttgcccagaatt

SEQ ID NO: 9631 - protein, 677 aa, Homo sapiens; identical to SEQ ID NO: 822

SEQ ID NO: 9632 - DNA, 889 bp, Homo sapiens
gggggtgggcgccagcgccccggcgaacggcaaagagggagccgctcccgctcggggggccgctggagtgcccagcgggaacccgaaagtttgtaagaggaagagagcgcgcggcgagcgagcgagcgggccgggggcagcggcagcggcgccggggaccatggtgctgccggcgcctcctccgcgggcgtgaaggcggcgctcctactccctccccggactccgcggtgtcccagaagcttttgttgacaattccagtttccgaacaaaacatttcggcaatggtgagggcttcgatcccttctctgatttgctgtcagccatgaacggatggatgtgatgcctgctagccaaaaggcttccctctgtgtgttgcagtcctgtggcattatgcatgccccctcccagtgaccccaggctttttatggctgtgagacacgttaaaatttcaggggtaagacgtgaccttttgaggtgactataactgaagattgctttacagaagccaaaaaaggtttttgagtcatgatgcaagaatctgggactgagacaaaaagtaacggttcagccatccagaatgggtcgggcggcagcaaccacttactagagtgcggcggtcttcgggaggggcggtccaacggagagacgccggccgtggacatcggggcagctgacctcgcccacgcccagcagcagcagcaacagtggcatctcataaaccatcagccctctaggagtcccagcagttggcttaagagactaatttcaagcccttgggagttggaagtcctgcaggtccccttgtggggagcagttgctgagacgaagatgagtggacctgtgtgtcagcctaacccttccccattttgaataaaattattctttggag

SEQ ID NO: 9633 - protein, 114 aa, Homo sapiens; identical to SEQ ID NO: 820

SEQ ID NO: 9634 - DNA, 607 bp, Homo sapiens
aatgtagagataagagtctcactatgttgcccaggttgatctcaaactcctggtctcaagagatcctcccacctcagcctcccagagtcagaacccagatcctggaactcttcttttcttcttctataccactgcttccttgtcctcacgagcctttctctgcgagtccaaaattcagccacatttcctaagaggcacctgtacttgtctatttcaatgcagccagaagctgacaacggcccaggaaccaggactgctttcaggaggcgctcagaagggcagcaaagtaccctctcaacattagtaaaatgaaacaaaagtgtcagccttggcttcgcacacacttacccgttcatgacattgggaacagagaaggctatggcagagtggagcagcagcatccatgccagacagacactccaaacaagggactcaagatatgtacctccgttatacacaaggaggacgaggaagcgctcgtttcacagggctggacatccttaggtcacagtcatcatacctctgtactgctgctgagctcatagtcaaaggccatccatgcctttagagatggacacatgacccatcctaggccaagcaggacctc

SEQ ID NO: 9635 - protein, 78 aa, Homo sapiens
MKQKCQPWLRTHLPVHDIGNREGYGRVEQQHPCQTDTPNKGLKICTSVIHKEDEEALVSQGWTSLGHSHHTSVLLLSS

SEQ ID NO: 9636 - DNA, 609 bp, Homo sapiens
aacccaaaagagagagagctctaaggaattagaagatctctcttaatacagccaccctgctaaaagttcagaaaaatcactttcacgtaaaaatgagcaatataaaaattttgaggtaaaattctatacaaagtgataaaaaaaaaggaacagaataacatcttacacaaaatgaaagcatttatcagacatgtcattacttgtctgtaacctattacttcaaaatgagctaaaagacattaagaataagatatacggcctgaaagaattacataaatcaagccacgtacagtggctcacacctgtaatcccagcactttgggaggccgaggtgggaggatcacttgcactcacgagtttgaagccagccagggcaagatggcgagacgctgtccccacaaaaaaatacaaagaaatagctgggtgtggtggtgcgtgcctgtgatcccagctatttaggaggctgagaaatgggggaagaaagaataaacttgaaaaaaagaaaaatcattctagaaataagaaaatacactagagggacagatagcaaatagatacaacaaataacgctttaaaaaaaactagaaggttaaaatgaaaaacaaaatc

SEQ ID NO: 9637 - protein, 84 aa, Homo sapiens [sequence omitted]

SEQ ID NO: 9638 - DNA, 6039 bp, Homo sapiens
tgatgaagttattaacccagttttagactttggtgttctgagagatgcactatgccccattgtgtgcacgagaccagcatttgattccagtacctcctgccctattctgatgtttatgtaggcaactttgaaaaagcaaaagttcatattcaaattctgtccttaggaataaagtgtcgaaagaaataagatattttgttaccgtcatgaagcatttcagctagagcttgctgaaaatataaacattagatatttgggttaggggatttctggctcatggcagctgggtgaataagcaacaaagtctaaaaatcttggtgctcagagcaatgaacaattcctttggttggtacacagagctcatagaggagaaaagagaaaatattagtaggttggaaaggtagctgatgtaagatggagaacctcaaattcagagttaaggagtaaagaattcagtaacattaattaatattaatattaaatactaatggcagataacatttgctatgggcaaggcatcaagcttagtggttgacaattcattgtattattttactggtaataagcttccaaggaaggtgattcttttttttttttttttttttgagacggaatcttgctttgtcaacaggctagagtgcagtggcaccatcttggctcactgtaacctctgcctcccgggttcaggtgattctcttgcctcagcctcccgagtagctgggactacaggcatgcgctaccacgcccagctaatttttttgtatttttagtagagacggggtttcaccataatggccaggatggtcttgatcttttgaggtcgtgatctgcccaccttggcctcccaaagtaatgggattacaggcatgagccaccgcacagggcgtgattctattattatgcgtagttaacagagatgagaagactgagtcttggaaaagtcatgtgatcttaccctgggcacgcaatggtcagatggagccaagatttcaaattagactctgtggcttaagaatcagccttttgaggactgactctattgccagtgggcacaaccagggatttttgagcagaggagtctctggtcagaactgtgctctgggataattcatctgtcatatttcaaagcaatgtagtgaggagcccagataggaggaaattgtgatgttctgaagagcggcaactacagtctgcagttgagtgtttgatgagattggaaaggcagtgatggagaggtcccaaaatccttaacgttttgggcggtacttggtgtgaaagacagatgattgggagaatggagttggtattcttatcccttgctaatggaagaggagagagggcaggctgggaagggatgagctgaggtttggatgtggcttgaggtgcagacgttaatttcaggcagagtcttttggaaggtgatgaaatacacattgaactagaggttacgaagatagtcagggctggagatgtggatctgaagccacagaagccagtagaaagagtgagactggtacatttagagaggtgcggggaaaagaaagtggctggagaaggagaccacgatataaatcagtcttaggagataaagaaaaatctttctgcacattggagatgacagatttgtaggccatgcttcagacacatacctatacatattcatgtttgtatacatattcatgtacatatttatatatgtattcctatatacattcatatgtattactgtgtgtgtttgtatatgtatcttattcatgagcatgcgctgttctcttatgctcacatatgtattcttgggagcctttcccacctcagcaagtggggagaggaagagtggggtaggcgtcagtctctccccagagcagctgattggggcaggttctgctccctgctgctgcagtttgagagcagtagagggaaaatggggtttactttgtgtacgtgtggttcaggccaacacgcagaattttatacccctcaaaatgcattcctccacagaagcctggcaactttaaatgctctagtaaatgttaggtgatttataatacagttttaaagaattcagcaagattaccattctattgtgaaataagggctgacagtgtggtcagtaaatgtgttaacttttcatttgggttggtatgtctctcctttgcaaatccattcatctgccgaaatgcatatgagaagcattgcttttgccaatgaaggattgcagttaggatttttttttttttttacttccttttcccgtgccccttcttaattactaagaaggttaacagcacacacttcagggtcactgatgttgtgttgtgttctgtttttgtttttcctgtagccaaagaaatgctgtattattgctcaagtctgttttgtgttgttgattgaagggctgagagagtgcccgtttctttttctttcaagataccactaagtgatttcctttcagggttctagaaaatgtgtcaccctgacaaaaattgccttcccatgctagtagccttaagcttctacttcttaattccttacatggccatttcctaaatggttagagttatttggaacaccttaaaattaaaaagctttcattgccacccactccaccactcagactgccagtgatatgaaattcacctgaaccctttacagttggtgacaattgttttaggaaaatatatgtgataagatgctgcaggtcctcataccagtgtcaactcagaatgtcgttcacatttcttctgagagtctccaattggccacattactgagagctttgtcataatgctttaagtcatttatcagctgaggtcactttgacttttgagattctaataaaattggcttgaacttttatcttataccctgtgggaattccaatgagcatttctggaggctttgttttcgtggtggatttttgttagagaactcttgatattccttgtttccgttgcttttctctcttctctcagagttagaaattagcttctttccacaatttccttccacacagctcacacagaccgtggaagtttagggagttggaggaagtttgcatcagagaaatttggaaggatgtttaacagcctgtttgtttgttggtttgtttgtttgtttgtttgtttgttttgctgagacggagtcccactctgttgcccagattgcaacgggcgatctcagctcactgcaacctccacctctgggggttcaagcgattctcctgcctcagcctcccacataactgggactacaggcttacaccaccatgcctggctaatttttttgtatttttagtagaggcagggttacaccacgttggccaggctggtctgggactcctgcctcaggtgatccgcccacctcagcctcccaaagtgctgggattacaggcgtgagccaccgcgcccgccagccttgtatgtttgcacatacatagttgtctctgaagagctttctctatacatcatgacctccaaattgcctgacttaccctcttttatctatcttctcacctctcattcttctggtttctgttaccaactcatgtttcttaaaaacggcaatttagttttctctttctgtctcaccatttccttccaaaccaggttcaagggggcctggtcttccatgtttcaagcgatgtgtcaaggatgagctgactagtaaaatgatctttttagttaagtacatgtgcacagacacccctgctttttctccctccactctctctcccataaatgtagcaaaaactgaagctactttgcatagaaaaagacatattaaggttttacctattttgactggacctgccaccctctattcttttcatgtatttccctttaatcaaataggttgattcaaagtgcatgccctaaataccaacattttctcattgatacttattttctgatactagaccaacaatgtctgccctaaatcctagggcccaaaaccaaaatctcagcctcacagcattttattgttgccattggttatgcagtcttccttgtaaagtttgacactttatatgtcattctttaatcgagtcttctctgataatgaattcttccccttcccctagaaattaaggatgccaaagaaagggtaaagtggtgctgtttgatgcagagctagcggaaagcatttgctgttagagagccacctggagctggcccatcttctcatgtcagtttaccataataatgtcagccagcatgggtatctcataattagatgaggaacatcaggcagtttcctgatggtgttatctttcatagttttcacagtgatgttcctgacttggtgttacaaaaactctgaaaaacatctaccaagcttgaagtgcacccttattggttatttttcaagttctcatacccacacctaaatatgtaagatgtatttctcatcagaacagtggctcccaaggcctgggatccccaaaccccaggagatgccgtcaaaggattagaagatgccatccaaggattagaagatgccgtcaaaggattagaagatgttatcctggtgtttttcagtatttaaattaggatgagtttgattgtactcaacagaaagtccagtaaaggcaggcttaaagagtgtcactggcaagtccttagtaggtaggctgcaggagagacttgatccagctctctgctctgcttttcatggtgttggcttatcttcagagtggccctatttgcagtcttaagatgattcctagcaactgtcaagctgtagatttccttgcacatgtgaagcaggagagtggaaaagggaatattttcttaggattttcagaaaaattcttgaaactctagttggacttgtttctgccacataccaccctccctgtggccagggagatggaatatattagttggcatgttttaggccatgtgttttccgccactggagctggggtgcaatcaacttctgcaaaatcccatgacttcccatatgtcagttggtcccgtttggaagtagtttagaggacaagatgctggggacacagccttaaatggttatttcattgacctgtttttttttcctccccaccttttttcttgttttggagacaggtccctgtcgcccatgttggagtgcaggggtgccatcatggctcagtgctgcctctacctcctgggctcaagcaattctcccacctccgcttcccaaatatttgggaggctgaggtaggcggctcacttgaacccgaggaggttgaggccgcagtgagctgtgatcgtgccactgcactccagcctgggtgacatagcaagaccctgtctcaaaaaaaaaaaaaaaaaaaaaaaggccaggcgcagtggctcacgcctgtaatcctagcactttgggaggccgaggagggcggatcacgaggtcaggagatcgagaccacgataaaaccccgtctctactaaaaatgcaaaaaattagccgggcgcggtggcaggcgcctgtagttccagctactggggaggctgaggcaggagaatggcgtgaacccgggaggcggagcttgcagtgagccgagatcacatcactgaactccagcctgggcgacagagcaagactccatctcaaaaaaaaaaaaaaagagagaacctcatgtctcaggtttctgagtcaatagcagataaaactaattgtaatttacctaagaaggtaagaagggacgaccaggtcaaatgttgtgcagatgtggataaaagaaaaaaggacattcatttgtgctactcttatttccaaaattttaaattcaatgtttcaagtccctttttttccagatatggtaagttttacgttttactagcatgttttaaaaacattaatcatatggaaagaaaaagatgatacattttaacactactacgatagcgtctatgactcaacaacagaaattgttgttagcagaaccagcaaaaaaccattctgtcttgggggaaaattgtttggttgaaaggccacagaagagatgcatattcagtaagagtaatgagaggcaaacacaataccataagattgttttgcaaa

SEQ ID NO: 9639 - protein, 57 aa, Homo sapiens [sequence omitted]

SEQ ID NO: 9640 - DNA, 446 bp, Homo sapiens
acccaaaacagccaaccagtatggaactggctaaataaatgacacttcatccatatgacacaatgctgcgctgccattacaaagaatgatacatacctacattaatgatagagcagaatggcacacacacacagacatgcccacacacacatatacacacatactgtacttttactacttgtttaatttctgtctttttgtccgtcactaaacctccccccaccctgcaaaattttattataaaaatgttcaaacatccagacaagttgaaaagacaacatatttaacacccatatacctgcctcttagataagccaaatagcaagatgccctccccccgacctggcactttcaaaaaacagcccttctccataggcactgccaagaagcaagctggcctctgctctacccttttcacccccaaggtgaggggatgactgaagaca

SEQ ID NO: 9641 - protein, 60 aa, Homo sapiens
MIEQNGTHTQTCPHTHIHTYCTFTTCLISVFLSVTKPPPTLQNFIIKMFKHPDKLKRQHI

SEQ ID NO: 9642 - DNA, 299 bp, Homo sapiens
gtctcaaatattcccaccaaaatatacctccatggcaatcggggaaagggagagggtggtaaatgtcaacccatgagaaaggaagggtctggaggcacaaatcaaaggggacctaagtaggcaggaagtatcactgaaaaccttcaaaatcttgcattatacaacagcattaatttggccatttaaaatgtaaaaatgggccaggcgcagtgactcacgcctgtaatcccagctactcaggaggctgaagtaggagaatcgattgaacccgggaggcggaggttgcagtgagctgagat

SEQ ID NO: 9643 - DNA, 564 bp, Homo sapiens
ctccgcgggtaagtcgaggcggccgcgggcgcggggtccagggacaccggagagccccaggcggcactaggggttctccgtccccaaagagccagccggggtggcgcgagcctagcgataaggcaccgggagcgaggaatgtgcccatcctcaggccgtgtcccagaagcttttgttgacaattccagtttccgaacaaaacatttcggcaatggtgagggcttcgatcccttctctgatttgctgtcagccatgaacggatggatgtgatgcctgctagccaaaagggtgagtgaatgaatgtttgtgattattcatctgaaaattcacaagacaaaaagtccttcaagacagttgcccacccaggatgagagattcttatcttgaaagaagggacaaactctgtcattgttttctggtgtaatcttttcagataattcctgcggtgatctgaggatttataaaaggcataataggacataggataacttcctctgttggcttgtttgttttaatcatactctgaaggatggactatctcagttttggtccatgtgcaacgtt

SEQ ID NO: 9644 - protein, 43 aa, Homo sapiens
MCPSSGRVPEAFVDNSSFRTKHFGNGEGFDPFSDLLSAMNGWM

SEQ ID NO: 9645 - DNA, 230 bp, Homo sapiens
cacacaatccaccttcacgtttctgaactcggtgtcttttacatcatctaagactcatattgtggtacccagtgccctgaaaaccctggtatccctcaagatggccttgtcttttctactgacttcctgttcaagctctttggtttctttcgcagagtgagatcagcaaggcagggtctgggatttgcaggttatatcctggatggtggcacgacagcgccttccgttcc

SEQ ID NO: 9646 - protein, 58 aa, Homo sapiens
DSYCGTQCPENPGIPQDGLVFSTDFLFKLFGFFRRVRSARQGLGFAGYILDGGTTAPS

SEQ ID NO: 9647 - DNA, 599 bp, Homo sapiens
agaccaatattagcaacaagaagcctctgccaccatggaagaaggatctggaaagaaggatgggatctcagcctgatggcaggtcttacccaagagggaatttttttctcaggagagtgaagaaagcctggctttcctcatcagctctctttgtgttgaattcatcagtcatgacaatcatttgagaaaccttagaagatcatcccaaacctggaaaaagtcagttacattaggaaaggagtgagcataaagagcacctactagagagagggtcctttcacacacatgacctcatgtaaccttcacaatcatgccatgagagtatttacagcctctgctgttgctctgcttctatctggtggattaaggaaagtcacaactcacagccctagtggaaagttacaactgggatttgagctaacgaagagttgaagactcagcaacaggcgcttggcttcactattaacctggacaaggccattaactcgcctgtacttaattggcttgttctgtgacacactgttgccccagaaacacccatatgggtgtaccccacattaaagaagcccgctctatgaaaaccgagacttgttgaaaag

SEQ ID NO: 9648 - protein, 48 aa, Homo sapiens
MTSCNLHNHAMRVFTASAVALLLSGGLRKVTTHSPSGKLQLGFELTKS

SEQ ID NO: 9649 - DNA, 371 bp, Homo sapiens
aggaaatccgactggagggaacacacgctgcgatgcaccctctcctcttccattgagccaggggtgaccttgagagactcaggccacctcaccaggctctaccaggaacagcgtctacagctggtagagagcacgggctgcagagagatggtaacaagaaagtaggtagctgcaggggctgctggcagccatcttgagacatgaaaggtgtccaaattgggatgaattcagcactgaagatggtggtacagagaaacaggagatagggcctttgatcacattgttggatggctggttaagcctctcctgaaatccattctactgctggactttacagttcataaactaataaatcctctttactgtttgaa

SEQ ID NO: 9650 - protein, 46 aa, Homo sapiens
ARGDLERLRPPHQALPGTASTAGREHGLQRDGNKKVGSCRGCWQPS

SEQ ID NO: 9651 - DNA, 1605 bp, Homo sapiens
gtctcacgcccataatcccagcactttgggagaccaagatccaaaaagttggcagctcttgcagaagccttaaaggaagtctcccttacaaaggcccagctggggttagaactggaagaactagaagcagcagcactgcttgtccaggaggaagaaactgcattaaaagcagcccattcagtttctgggcagcagacactttgctccagctctgaggcaagtgattcggaggactcagacagcagcgtgtcatctggaaacgaagactcaggctcagattcagaacaagatgaactcaaagatagtccatctgagacagtcagttctttgcaaggtccctttcttgaagaaagcagtgcctttcttattgttgatggtggagtacgcagaaacacagccatccaggagtctgatgccagtcagggaaagccacttgcctcttcctggcctcttggagtgtctgggcctctgatagaggagcttggggaacaactgaagactacagttcaggtttctgaacccaagggcaccactgctgtaaaccgcagcaatattcaggagagagacggctgtcagacaccaaataattgactcttaggtggttttattcattgttgagaaatatggtagattgggtttcatttaccgaatgagaattcttcattttcactttgtaatttttcttagtatatagtcagcccactgtatttgtgtgttccacatctgtggattcaaccaactgcagatcaaaaatattgaagaaaaaatcgcatctgtaccaaacatgtacagacttttttcttgttattattctctaaataatacagtatgacaactatttccacagcatttacattgtattgggtaatataagtaatctagtgatgatttaaactgtgcaggaggatgtgggtaggttatatgcaaatactgcaccattttttatcaggggcttgagcatctgaggattttagtatcctcaggagtcctggaaccaaccccccacagatacggggacaactttatgacattgtttttcaaccaatgaatgtttataccttttgttttccttgccgcgactgtgaagataaagttcaaaagtatttttaccaaagtgtagctaatatttcaagctgaaaataatagttctactgcccgtgtctccagaatgtagagcccatcaatatttttattttaggaggtgtacttgacacccaataaactgcacgtatcaaaagtgtacaatgtgttggcgtatgtataccctgcgtaaaactatcaccacaactgaagtgaggaacggacccatcattcccaagtgcccttgtgccctgttattagtttgcatgtcctagaattctatgtaaattgaatcatacaatatgtatcccttttttggtcaggcatattttactcagtatagttattttgagattcatccatgtggtagcatgtgtcacgagtttttgtttttatgtttttcattgctgagtactgcttcattgaatagatttgttcattgacctatcgatggacacctgggttgtttccagtttggggctgttataaataaagctgttatgaacatttgtgtacaagtcttca

SEQ ID NO: 9652 - protein, 60 aa, Homo sapiens
MNSKIVHLRQSVLCKVPFLKKAVPFLLLMVEYAETQPSRSLMPVRESHLPLPGLLECLGL

SEQ ID NO: 9653 - DNA, 4031 bp, Homo sapiens
gaaattagttggcctatgcttactgtgacatttgtcttctctgtggcaattaaaacttcaaaacattcttacaggtcagttgttccttgattctttgggtaacatggctagtgtggcaaacatggtttcatcatgcctgcaaattttgattatatttcctcctcctttcatcaaaccctgctctcaacattacctagtttgtaattaaaataggcttgtgctggggtgatccacactaatcatttgacatagttaacctgtgccactttgataagccatagcactgaccttgccttaaccaaatgaacttgacatcttgtagctttaggccttctaagtgttagtttctcttcacagtcagtctagcagtggagctttcattgacattcttcattcattctttattgtatctgcatatgaggaagccacaaagttaatattttttaaaaaggtatggactctgttttcagacttactacctacttaggggttaaagtcagtaataagtccttgagtaataaaaacgttgtgatatagactggatgaggcaagaacatacaggtagcatggcacagtgggtagcctctggagccattaagattggaatttagatcttggtccctcaactcagtggccctgtatcttacccatcctgaagcctccagttttccttctgggaattgaacaggagaggttatggggaggactttccccattttgagtttcctttccacttcttggcagcattatagtaaaggaccgtgaagactaggaaagtcagcccagaacttcccgaaggaatgaagactggagctagaccttgatagtgggctaggtcacatggagaagggaaaaaggcatggaaacaagtctgtagaaagagcattgagaacatatgcagggaagagactccatgaaagcagtgcattaaaaaatgtgtgtttgaaggggtagagtctggaatctgaaagatgggaaagaggattcttaaaatcgaggcatgagatgagaatatgagtgaacataggagctcaggcaatggcatagaaagggcagatacaaggagcatctccaaggaaaaatcatcaggatttgacgggtgagaccgtagaatgaaagaaattttcaaggtttaagctgggtgattactgtgtctatcatgtattcattcattcttagaacacttaaatggaaaacctgctgttgcggtgttctgttctaggtattggggattaaccactaaataaaacagaagcccctgctcttttgaaacttactttctagtgttaattatgttaaaaaatttagtgtcagcaattttaggatcttgagatgtcatcatctagctcatgattcttttatgatctaaaagttaaatgggaaatgtcaatgaaagtgcatccagtatcttcatgaactcagtatacagtatttccgcgtttcagaactgtaaagataagaatgaaactgttaaactgaaaatactgaatttcacagatcaaagaaaatggtactactctagatgtagaattaatagttcaccttataattaataaatttcaggaaatatcatgaagtttggaacacctagggaattgctgagttgtaaaaggctccttttgtagactttggttgggttaaaactaggttcatttaaaaaccaggaggaagtagttaggttgaacaaggctttaatacttgatggcttttgttcatgtgagttttgtcagcttatttctgaagtagtgctatgatgttttagtgttcagttttcttcaattctttaaggtaaaataatttgttattagtagataactccttgacagaaaatgttgacataagaaataaagaagtttgaaatttagaatacagttttccatgttatgttgaaagcttgaattggaagaacattatctaataaaaattatgatgcatttagatattcatttggtttagaaaactttcctgcctttcatttaattgacctagttgtatttcatagcattttaatgataaccacaactagtcagctgtaacaacagaatataaagattatatgtaattcttttttttttttttttttcgagatggagtctttctctgtcgcccaggctggagtgcagtggcgcgatcttggctcacggcaagctccacctccccagttcacgccgttctcctgcctcagcctcccgagtagctgggactataggtgcctgtcaccacgcctggctaattttttgtatttttagtagagacagggtttcaccgtgttagccaggatggtctcgatctcctgacctcgtgatctgcccgcctcggcctcccaaagtgctggaattacaggtaaaagtgcagttttaaagtgtctcctggatattcacaaaatttttcaggaaaatgacccagcgtacatactgaatgatctctacatctcagactactgtgtgtggattcagaaagtcaaatccaaaaagttggcagctcttgcagaagccttaaaggaagtctcccttacaaaggcccagctggggttagaactggaagaactagaagcagcagcactgcttgtccaggaggaagaaactgcattaaaagcagcccattcagtttctgggcagcagacactttgctccagctctgaggcaagtgattcggaggactcagacagcagcgtgtcatctggaaacgaagactcaggctcagattcagaacaagatgaactcaaagatagtccatctgagacagtcagttctttgcaaggtccctttcttgaagaaagcagtgcctttcttattgttgatggtggagtacgcagaaacacagccatccaggagtctgatgccagtcagggaaagccacttgcctcttcctggcctcttggagtgtctgggcctctgatagaggagcttggggaacaactgaagactacagttcaggtttctgaacccaagggcaccactgctgtaaaccgcagcaatattcaggagagagacggctgtcagacaccaaataattgactcttaggtggttttattcattgttgagaaatatggtagattgggtttcatttaccgaatgagaattcttcattttcactttgtaatttttcttagtatatagtcagcccactgtatttgtgtgttccacatctgtggattcaaccaactgcagatcaaaaatattgaagaaaaaatcgcatctgtaccaaacatgtacagacttttttcttgttattattctctaaataatacagtatgacaactatttccacagcatttacattgtattgggtaatataagtaatctagtgatgatttaaactgtgcaggaggatgtgggtaggttatatgcaaatactgcaccattttttatcaggggcttgagcatctgaggattttagtatcctcaggagtcctggaaccaaccccccacagatacggggacaactttatgacattgtttttcaaccaatgaatgtttataccttttgttttccttgccgcgactgtgaagataaagttcaaaagtatttttaccaaagtgtagctaatatttcaagctgaaaataatagttctactgcccgtgtctccagaatgtagagcccatcaatatttttattttaggaggtgtacttgacacccaataaactgcacgtatcaaaagtgtacaatgtgttggcgtatgtataccctgcgtaaaactatcaccacaactgaagtgaggaacggacccatcattcccaagtgcccttgtgccctgttattagtttgcatgtcctagaattctatgtaaattgaatcatacaatatgtatcccttttttggtcaggcatattttactcagtatagttattttgagattcatccatgtggtagcatgtgtcacgagtttttgtttttatgtttttcattgctgagtactgcttcattgaatagatttgttcattgacctatcgatggacacctgggttgtttccagtttggggctgttataaataaagctgttatgaacatttgtgtacaagtcttca

SEQ ID NO: 9654 - protein, 60 aa, Homo sapiens; identical to SEQ ID NO: 9652

SEQ ID NO: 9655 - DNA, 2863 bp, Homo sapiens
gaagctccgtccctcacaccgagagttcctgcgcgtggggagttggagagtttgcgtggcgggaacgcggcggcagtgagagcgagcggcgccggcccttgcgtccggtgcggcgatgctgaccccggcgttcgacctcagccaggatccggacttcctgactatcgccatccgcgtgccctacgcccgggtctccgagttcgacgtctacttcgaggggtctgacttcaagttctacgccaagccatactttctcagattaacccttcctggaagaattgtagaaaatggaagtgagcaagggtcctatgatgcagataaaggaatttttaccattcgcctgcccaaagaaacccctggccagcattttgaggggctgaacatgttaactgctcttctggcaccaagaaaatccaggacagcaaaaccacttgtggaagaaataggtgcttctgagattcctgaggaagtagttgacgatgaagagtttgattgggaaattgagcagacaccctgtgaagaggtatcagaaagtgctttgaatccgcagtgccactatggatttggaaacttacgatcaggagtgttgcaacggttacaggatgaactgagtgatgttattgatattaaggatccagatttcacccctgcagctgaacgaagacagaagcgcctggccgctgagctggccaagtttgatcctgatcattatctagctgacttttttgaagatgaggcgattgaacagattttgaagtataatccttggtggactgacaaatattcaaaaatgatggcctttttggaaaagagtcaggaacaagaaaatcatgctacattagtgtctttttctgaagaagagaagtatcagctacgaaaatttgtcaataaatcttatctgctggacaagagagcctgtcgtcaagtgtgctacagtttgattgatatccttctggcatattgctatgaaacccgtgtcactgaaggagagaagaatgttgaatctgcatggaatatcaggaaactgagtccaacactatgctggtttgagacttggactaacgttcatgatatcatggtgtcttttggaagaagggtgttgtgttacccactctatcgccatttcaagctggtgatgaaggcctacagggacactataaagatattgcaactgggtaaaagtgcagttttaaagtgtctcctggatattcacaaaatttttcaggaaaatgacccagcgtacatactgaatgatctctacatctcagactactgtgtgtggattcagaaagtcaaatccaaaaagttggcagctcttgcagaagccttaaaggaagtctcccttacaaaggcccagctggggttagaactggaagaactagaagcagcagcactgcttgtccaggaggaagaaactgcattaaaagcagcccattcagtttctgggcagcagacactttgctccagctctgaggcaagtgattcggaggactcagacagcagcgtgtcatctggaaacgaagactcaggctcagattcagaacaagatgaactcaaagatagtccatctgagacagtcagttctttgcaaggtccctttcttgaagaaagcagtgcctttcttattgttgatggtggagtacgcagaaacacagccatccaggagtctgatgccagtcagggaaagccacttgcctcttcctggcctcttggagtgtctgggcctctgatagaggagcttggggaacaactgaagactacagttcaggtttctgaacccaagggcaccactgctgtaaaccgcagcaatattcaggagagagacggctgtcagacaccaaataattgactcttaggtggttttattcattgttgagaaatatggtagattgggtttcatttaccgaatgagaattcttcattttcactttgtaatttttcttagtatatagtcagcccactgtatttgtgtgttccacatctgtggattcaaccaactgcagatcaaaaatattgaagaaaaaatcgcatctgtaccaaacatgtacagacttttttcttgttattattctctaaataatacagtatgacaactatttccacagcatttacattgtattgggtaatataagtaatctagtgatgatttaaactgtgcaggaggatgtgggtaggttatatgcaaatactgcaccattttttatcaggggcttgagcatctgaggattttagtatcctcaggagtcctggaaccaaccccccacagatacggggacaactttatgacattgtttttcaaccaatgaatgtttataccttttgttttccttgccgcgactgtgaagataaagttcaaaagtatttttaccaaagtgtagctaatatttcaagctgaaaataatagttctactgcccgtgtctccagaatgtagagcccatcaatatttttattttaggaggtgtacttgacacccaataaactgcacgtatcaaaagtgtacaatgtgttggcgtatgtataccctgcgtaaaactatcaccacaactgaagtgaggaacggacccatcattcccaagtgcccttgtgccctgttattagtttgcatgtcctagaattctatgtaaattgaatcatacaatatgtatcccttttttggtcaggcatattttactcagtatagttattttgagattcatccatgtggtagcatgtgtcacgagtttttgtttttatgtttttcattgctgagtactgcttcattgaatagatttgttcattgacctatcgatggacacctgggttgtttccagtttggggctgttataaataaagctgttatgaacatttgtgtacaagtcttca

SEQ ID NO: 9656 - protein, 577 aa, Homo sapiens; identical to SEQ ID NO: 824

SEQ ID NO: 9657 - DNA, 2499 bp, Homo sapiens
gaagctccgtccctcacaccgagagttcctgcgcgtggggagttggagagtttgcgtggcgggaacgcggcggcagtgagagcgagcggcgccggcccttgcgtccggtgcggcgatgctgaccccggcgttcgacctcagccaggatccggacttcctgactatcgccatccgcgtgccctacgcccgggtctccgagttcgacgtctacttcgaggggtctgacttcaagttctacgccaagccatactttctcagattaacccttcctggaagaattgtagaaaatggaagtgagcaagggtcctatgatgcagataaaggaatttttaccattcgcctgcccaaagaaacccctggccagcattttgaggggctgaacatgttaactgctcttctggcaccaagaaaatccaggacagcaaaaccacttgtggaagaaataggtgcttctgagattcctgaggaagtagttgacgatgaagagtttgattgggaaattgagcagacaccctgtgaagaggtatcagaaagtgctttgaatccgcagtgccactatggatttggaaacttacgatcaggagtgttgcaacggttacaggatgaactgagtgatgttattgatattaaggatccagatttcacccctgcagctgaacgaagacagaagcgcctggccgctgagctggccaagtttgatcctgatcattatctagctgacttttttgaagatgaggcgattgaacagattttgaagtataatccttggtggactgacaaatattcaaaaatgatggcctttttggaaaagagtcaggaacaagaaaatcatgctacattagtgtctttttctgaagaagagaagtatcagctacgaaaatttgtcaataaatcttatctgctggacaagagagcctgtcgtcaagtgtgctacagtttgattgatatccttctggcatattgctatgaaacccgtgtcactgaaggagagaagaatgttgaatctgcatggaatatcaggaaactgagtccaacactatgctggtttgagacttggactaacgttcatgatatcatggtgtcttttggaagaagggtgttgtgttacccactctatcgccatttcaagctggtgatgaaggcctacagggacactataaagatattgcaactgggtaaaagtgcagttttaaagtgtctcctggatattcacaaaatttttcaggaaaatgacccagcgtacatactgaatgatctctacatctcagactactgtgtgtggattcagaaagtcaaatccaaaaagttggcagctcttgcagaagccttaaaggaagtctcccttacaaaggcccagctggggttagaactggaagaactagaagcagcagcactgcttgtccaggaggaagaaactgcattaaaagcagcccattcagtttctgggcagcagacactttgctccagctctgaggcaagtgattcggaggactcagacagcagcgtgtcatctggaaacgaagactcaggctcagattcagaacaagatgaactcaaagatagtccatctgagacagtcagttctttgcaaggtccctttcttgaagaaagcagtgcctttcttattgttgatggtggagtacgcagaaacacagccatccaggagtctgatgccagtcagggaaagccacttgcctcttcctggcctcttggagtgtctgggcctctgatagaggagcttggggaacaactgaagactacagttcaggtttctgaacccaagggcaccactgctgtaaaccgcagcaatattcaggagagagacggctgtcagacaccaaataattgactcttaggtggttttattcattgttgagaaatatggtagattgggtttcatttaccgaatgagaattcttcattttcactttgtaatttttcttagtatatagtcagcccactgtatttgtgtgttccacatctgtggattcaaccaactgcagatcaaaaatattgaagaaaaaatcgcatctgtaccaaacatgtacagacttttttcttgttattattctctaaataatacagtatgacaactatttccacagcatttacattgtattgggtaatataagtaatctagtgatgatttaaactgtgcaggaggatgtgggtaggttatatgcaaatactgcaccattttttatcaggggcttgagcatctgaggattttagtatcctcaggagtcctggaaccaaccccccacagatacggggacaactttatgacattgtttttcaaccaatgaatgtttataccttttgttttccttgccgcgactgtgaagataaagttcaaaagtatttttaccaaagtgtagctaatatttcaagctgaaaataatagttctactgcccgtgtctccagaatgtagagcccatcaatatttttattttaggaggtgtacttgacacccaataaactgcacgtatcaaaagtgt

SEQ ID NO: 9658 - protein, 577 aa, Homo sapiens; identical to SEQ ID NO: 824

SEQ ID NO: 9659 - DNA, 1240 bp, Homo sapiens
gtctcacgcccataatcccagcactttgggagaccaagatccaaaaagttggcagctcttgcagaagccttaaaggaagtctcccttacaaaggcccagctggggttagaactggaagaactagaagcagcagcactgcttgtccaggaggaagaaactgcattaaaagcagcccattcagtttctgggcagcagacactttgctccagctctgaggcaagtgattcggaggactcagacagcagcgtgtcatctggaaacgaagactcaggctcagattcagaacaagatgaactcaaagatagtccatctgagacagtcagttctttgcaaggtccctttcttgaagaaagcagtgcctttcttattgttgatggtggagtacgcagaaacacagccatccaggagtctgatgccagtcagggaaagccacttgcctcttcctggcctcttggagtgtctgggcctctgatagaggagcttggggaacaactgaagactacagttcaggtttctgaacccaagggcaccactgctgtaaaccgcagcaatattcaggagagagacggctgtcagacaccaaataattgactcttaggtggttttattcattgttgagaaatatggtagattgggtttcatttaccgaatgagaattcttcattttcactttgtaatttttcttagtatatagtcagcccactgtatttgtgtgttccacatctgtggattcaaccaactgcagatcaaaaatattgaagaaaaaatcgcatctgtaccaaacatgtacagacttttttcttgttattattctctaaataatacagtatgacaactatttccacagcatttacattgtattgggtaatataagtaatctagtgatgatttaaactgtgcaggaggatgtgggtaggttatatgcaaatactgcaccattttttatcaggggcttgagcatctgaggattttagtatcctcaggagtcctggaaccaaccccccacagatacggggacaactttatgacattgtttttcaaccaatgaatgtttataccttttgttttccttgccgcgactgtgaagataaagttcaaaagtatttttaccaaagtgtagctaatatttcaagctgaaaataatagttctactgcccgtgtctccagaatgtagagcccatcaatatttttattttaggaggtgtacttgacacccaataaactgcacgtatcaaaagtg

SEQ ID NO: 9660 - protein, 60 aa, Homo sapiens; identical to SEQ ID NO: 9652

SEQ ID NO: 9661 - DNA, 585 bp, Homo sapiens
caattgaagaagaaaactctacaataatagtgaaattagtggaaagtccttattttgaatattaaaggattgattaaaagattgatttgagcatcacatgattgagaggcccttgaggaaactgatgatacccttgatttttttctgtaagaattaccttctctgattctgctacaaaaagaccaacatgaagtgatgaatgttagatggtgctgtaatataattttgttagaacaattacaaatacaattaatatttggttcattctttgctgtttttgagaattagtacatggttgcagttttaacctacatattgttaacattgttaaatatttcatcaatttatttttgtagtttgtagttttgtttcaaggtgaagtatttggtttttgttgttgtttttttgacacaagagtctccctctgttgctgaggctggagtgtagtgctgcagtctctgctcactacaacctccgcctcccaggtacaagagaactgcttgaacccaggaggtggaggttgcagtgagccgagatcgtgccattgcattccagcttgggcaatagaatgagactccatctcgg

SEQ ID NO: 9662 - protein, 30 aa, Homo sapiens
MNVRWCCNIILLEQLQIQLIFGSFFAVFEN

SEQ ID NO: 9663 - DNA, 371 bp, Homo sapiens
tggtgcctgggagccggcgttgaaccggcgggatgactagcaaccgagcctttttcgaggttcttagagatgattttaacagcactggcttgacagtgtctttgcctcagagattttcttcattttcccaccagctcagtcatgcatatcaaaagaagtttatgcacaattgaaggacaccaactaaaatttgaacaaataagagatttgtaactggggatcccctggaagaatcgtctggaaattacgaccttcatctggcgattgcagctgttaaagtctccaaagaagccattcttacattgtgttgtgaaattattactctatctcaaatctgtgccagaaagaaaataaaatgtgtgtttatgtgt

SEQ ID NO: 9664 - protein, 46 aa, Homo sapiens
MTSNRAFFEVLRDDFNSTGLTVSLPQRFSSFSHQLSHAYQKKFMHN

SEQ ID NO: 9665 - DNA, 1806 bp, Homo sapiens
gtcgccgccgccgccggccgcccgccggccgccacgaccccagtccccggcgggcgggcggaggaggcgaccgccgcgcgctgctgcactcatcctgccgccgccgcgatgcgcagaggggccgagccgcctgggggccgccgccgccgccgcgccgcaccatgaagctccgcagcaaggcggcggcgctgctcttgctcgcgctggccgcgctgctgctggcgctgctgtccctgcgcgctggccgcgctgagcccccagcgctgcccgcgcgccccgcgtccgccccgcagcgccaccccgcgcctgtccccgcgcgctggccggggccgggcgccctccccggggccagcccgggagttcggaggcgccggcccccgcgtccgcgcccccgagcgggccgccggggcgctgcgagactggagaagttggcgaggaggcctggagaacccaggagtttccaagctgtgctgccacccgagctctggatccacctggctgtggtggcctgtggcaatcggctggaggagacgctggtcatgctcaaatcagctgtgctttttagccacaggaagatccaattccacatcttcactgaagactctctgaagcccgagtttgataagcagttacgccagtggcctgactcatatacaaagaagtttgagcacagaatctaccccatcacattttctgttggaaaccctcaggagtggaagaaattgttcaaaccctgtgctgcccagagactctttcttccggtgattttaaaggatgtggactcacttctctacgtggacaccgatgtcctctttctgagacctgttgatgacatctggaagcttctgaggctgtttaattccacccagcttgcagccatggcccctgagcacgaaatccccaagattggctggtacagccgctttgctaggcatcctttctatggctctgcaggagttaattcaggagtcatgttaatgaatttaactcggataagaagtacccagttcaagaacagcatgattccaacaggcctggcttgggaggacatgttgtaccctctgtaccagaagtacaagaatgccatcacgtggggagaccaggatttattaaatattattttttatttcaacccagagtgtctctatgtattcccctgccagtggaactaccgtcccgatcactgcatgtacggaagcaactgcagagaggctgagcatgaaggtgtgtctgttctgcatggaaaccgaggcgtctaccatgacgataagcaaccaacgttcagagcactctatgaagcaatacgggattttccctttcaagacaatctctttcaatccatgtattacccccttcagctgaagtttttggagactgtgcacactttatgtggacgaatcccgcaagtttttctgaagcaaattgagaaaacaatgaaaagggcttatgagaaacacgtcatcatccatgttggccccaaccagatgcactgaatattttgtcttgttgcaagtcaattaggtgtcttgtgaccaaggaaatactaatctctaagctgcctgggtctttttgtgtgaatatttaatggtgctccatgactgttgagttttaaaaacctcgttaaattttgccaaatcagttgcccccaaaagggaatatgcttttccttatttttttttctaaaatgctatttatctctaaggaaaaaaaaaaaagactattactcatttaacattgtttaagcaggttgagctagctgtgaaaatagcttttgtgagccttctaattcctaaacgtctgagacca

SEQ ID NO: 9666 - protein, 443 aa, Homo sapiens
MKLRSKAAALLLLALAALLLALLSLRAGRAEPPALPARPASAPQRHPAPVPARWPGPGALPGASPGVRRRRPPRPRPRAGRRGAARLEKLARRPGEPRSFQAVLPPELWIHLAVVACGNRLEETLVMLKSAVLFSHRKIQFHIFTEDSLKPEFDKQLRQWPDSYTKKFEHRIYPITFSVGNPQEWKKLFKPCAAQRLFLPVILKDVDSLLYVDTDVLFLRPVDDIWKLLRLFNSTQLAAMAPEHEIPKIGWYSRFARHPFYGSAGVNSGVMLMNLTRIRSTQFKNSMIPTGLAWEDMLYPLYQKYKNAITWGDQDLLNIIFYFNPECLYVFPCQWNYRPDHCMYGSNCREAEHEGVSVLHGNRGVYHDDKQPTFRALYEAIRDFPFQDNLFQSMYYPLQLKFLETVHTLCGRIPQVFLKQIEKTMKRAYEKHVIIHVGPNQMH

SEQ ID NO: 9667 - DNA, 1650 bp, Homo sapiens
caaatcccaattttgccgctttctggtgatttgccattaactgtgcccttaccttgctgggcctcagttttttcatcagtcaagtgtagataataagattatctacctcaaacaagtgttatgaaaattcaacaaaatgatagtctttatgcttttagtacagagcctgacatacagtttgtgcaataattagaagttgttttggccaggtgcggtggctcacacctgtggtcccagctatgggactacaggcatgagccactgtgcccagctgacatattctcacttaatagaattatagagaaatttttcatgtttttctttttctctcccactttttcatattcctctttttcatttttgcctttccgtttctgtctatgatgtaggcttctgaggagaaccaagaagcttggctttagtggtagaatgacagaacttagggatcccttgcaggctagaacaaagttctgacccttagaccaaatctttatgttaagagttttccagaattcaaaaaaaaaaaaaaaatcaatcaacacaacacacacacacatacatacacacacactgcctttaaaaggaggagccaatatttgttgtacctgtgaactgaggaattatagataaaccttaggtcaaatcatttcacaattgcattggtggtattgaaaaatgatgagatttctctgacagagagctttgtcctagtttttgttcttcataggtcaaaactggcaatattctcttgtctgcaagataaagtgtttgtgcttctatcaccatatgcatgaacatgtaagaatcagatacaatttctgcttcatcagtttcacatgttcatgttgtcactgaaaaaatgcatctactgtttatagctcccaaggagaccccaaatcctttttttttcttttgagatggagtcttgctcttgttgcccaggctggagagcagtagcgcgatctcagctcactgcaacccccacctcctgggttcaagtgattctcctgcctcagcctccccagtagctgggatttacaggtgcccgctaccatgcctggctaatttttgtatttttagtagagacaggctttcaccatgttggccaggctgatctcaaactcctgacctcaggtgatccacccacctcggcctccgaaagtgctgggattacaggagtgagccaccgcgcctggccccgtattcattttttatactggaaaacattttttttgtaatttttctttgcaaagaaatgagcataaaaatgaatactccaaagaaaaggaattattatggcaaattaaaagggacacggtactatgatttaattactgtcttgtctttttaaaatgtcatctcttgttttaccctttttttaaataaaagctttaaaaacatgtctttgggtattattctggaggtatgtttcttttatataagatttcaagtttaaacatttacaataagtaataatatttaaattcttataacaagtaatgaaatatttggtttagtaattagcttagtctattttaaaaaatcattaaaatttgctttgtttttaagaatgccatactacaaatgatgttatttggttttaatggtgttttgtgtttaagatagaataaatagagtttgaagaatgtg

SEQ ID NO: 9668 - protein, 45 aa, Homo sapiens
MLRVFQNSKKKKKSINTTHTHIHTHTLPLKGGANICCTCELRNYR

SEQ ID NO: 9669 - DNA, 1364 bp, Homo sapiens
ttaacataaagatttggtctaagggtcagaactttgttctagcctgcaagggatccctaagttctgtcattctaccactaaagccaagcttcttggttctcctcagaagcctacatcatagacagaaacggaaaggcaaaaatgaaaaagaggaatatgaaaaagtgggagagaaaaagaaaaacatgaaaaatttctctataattctattaagtgagaatatgtcagctgggcacagtggctcatgcctgtagtcccagtactttgggaggccaaggcaggtggatcacttgagctcaggagtttgagaccagcctggccaacatggtgaaatcccatctctactaaacattcaaaaattagctgggcatggtggtgcacacctgtagtcccagctactcggaagcctgaggcatgagaatcgtttgaacctgggaggcggaggctgcagtgagctgagattgtgccactgcactccagcctaggtgacagacggagactccatctcaaaaaaaaaaaaaaaagagagaatatgtcctgtgttagcttgcttaggaaataaagagagagagagagagggagggagggaaagagagaaagagagagagagaaagagagtgagagaaagagagagcaagagagcaagagtaagaaagaaagaaaaagaaagaaagaaaagaggccgggcgcatattcaatgtggcatatggggcagcaccacctctggcaaactttaaaccagagagtgcatgttttagcaggccactgaattaaaatttgtggctcctggatttcaaaggcggttaatgtagtaatttgctgggagttatcaaaggcagagaaaatattgctccatggtaatatcctagctatggaaaataattagcactttcaggcagcaaggattagaaaagcaaattttctctgaattctctgccaaattcagctaaaatttcaggatacagcacaggaattccaaggcagacaaccgcacgaggttctaaggtttcacattctcaaaattcatcattctagaatgttctagggtgatatcattgacctttgcgggcaacccttttctgcacagtcagaccagtactggtagttgagagttgtgggtaaacttggctctcataaaaaagaaaggcattgtatttcaagtctttacagtagatgtttttgtgggacttatcaaaggagagaaggaacctctttgagttggtgagccatcaacaaatctgagtgccatttgtgtgtttcactggccattctgaacaagtagaaaggaaactaggatggaagttaggaaattatgttccatcctggctctttcactaaaacccaatttatgggtatataagatg

SEQ ID NO: 9670 - protein, 83 aa, Homo sapiens
VTDGDSISKKKKKERICPVLACLGNKEREREGGREREKERERKRVRERESKRARVRKKEKERKKRGRAHIQCGIWGSTTSGKL

SEQ ID NO: 9671 - DNA, 1045 bp, Homo sapiens
ctacttgttcagaatggccagtgaaacacacaaatggcactcagatttgttgatggctcaccaactcaaagaggttccttctctcctttgataagtcccacaaaaacatctactgtaaagacttgaaatacaatgcctttcttttttatgagagccaagtttacccacaactctcaactaccagtactggtctgactgtgcagaaaagggttgcccgcaaaggtcaatgatatcaccctagaacattctagaatgatgaattttgagaatgtgaaaccttagaacctcgtgcggttgtctgccttggaattcctgtgctgtatcctgaaattttagctgaatttggcagagaattcagagaaaatttgcttttctaatccttgctgcctgaaagtgctaattattttccatagctaggatattaccatggagcaatattttctctgcctttgataactcccagcaaattactacattaaccgcctttgaaatccaggagccacaaattttaattcagtggcctgctaaaacatgcactctctggtttaaagtttgccagaggtggtgctgccccatatccaccgcgcctggccccgtattcattttttatactggaaaacattttttttgtaatttttctttgcaaagaaatgagcataaaaatgaatactccaaagaaaaggaattattatggcaaattaaaagggacacggtactatgatttaattactgtcttgtctttttaaaatgtcatctcttgttttaccctttttttaaataaaagctttaaaaacatgtctttgggtattattctggaggtatgtttcttttatataagatttcaagtttaaacatttacaataagtaataatatttaaattcttataacaagtaatgaaatatttggtttagtaattagcttagtctattttaaaaaatcattaaaatttgctttgtttttaagaatgccatactacaaatgatgttatttggttttaatggtgttttgtgtttaagatagaataaatagagtttgaagaatgtg

SEQ ID NO: 9672 - protein, 31 aa, Homo sapiens
MSIKMNTPKKRNYYGKLKGTRYYDLITVLSF

SEQ ID NO: 9673 - DNA, 1794 bp, Homo sapiens
actaccagtactggtctgactgtgcagaaaagggttgcccgcaaaggtcaatgatatcaccctagaacattctagaatgatgaattttgagaatgtgaaaccttagaacctcgtgcggttgtctgccttggaattcctgtgctgtatcctgaaattttagctgaatttggcagagaattcagagaaaatttgcttttctaatccttgctgcctgaaagtgctaattattttccatagctaggatattaccatggagcaatattttctctgcctttgataactcccagcaaattactacattaaccgcctttgaaatccaggagccacaaattttaattcagtggcctgctaaaacatgcactctctggtttaaagtttgccagaggtggtgctgccccatatccactgtgcccagctgacatattctcacttaatagaattatagagaaatttttcatgtttttctttttctctcccactttttcatattcctctttttcatttttgcctttccgtttctgtctatgatgtaggcttctgaggagaaccaagaagcttggctttagtggtagaatgacagaacttagggatcccttgcaggctagaacaaagttctgacccttagaccaaatctttatgttaagagttttccagaattcaaaaaaaaaaaaaaaatcaatcaacacaacacacacacacatacatacacacacactgcctttaaaaggaggagccaatatttgttgtacctgtgaactgaggaattatagataaaccttaggtcaaatcatttcacaattgcattggtggtattgaaaaatgatgagatttctctgacagagagctttgtcctagtttttgttcttcataggtcaaaactggcaatattctcttgtctgcaagataaagtgtttgtgcttctatcaccatatgcatgaacatgtaagaatcagatacaatttctgcttcatcagtttcacatgttcatgttgtcactgaaaaaatgcatctactgtttatagctcccaaggagaccccaaatcctttttttttcttttgagatggagtcttgctcttgttgcccaggctggagagcagtagcgcgatctcagctcactgcaacccccacctcctgggttcaagtgattctcctgcctcagcctccccagtagctgggatttacaggtgcccgctaccatgcctggctaatttttgtatttttagtagagacaggctttcaccatgttggccaggctgatctcaaactcctgacctcaggtgatccacccacctcggcctccgaaagtgctgggattacaggagtgagccaccgcgcctggccccgtattcattttttatactggaaaacattttttttgtaatttttctttgcaaagaaatgagcataaaaatgaatactccaaagaaaaggaattattatggcaaattaaaagggacacggtactatgatttaattactgtcttgtctttttaaaatgtcatctcttgttttaccctttttttaaataaaagctttaaaaacatgtctttgggtattattctggaggtatgtttcttttatataagatttcaagtttaaacatttacaataagtaataatatttaaattcttataacaagtaatgaaatatttggtttagtaattagcttagtctattttaaaaaatcattaaaatttgctttgtttttaagaatgccatactacaaatgatgttatttggttttaatggtgttttgtgtttaagatagaataaatagagtttgaagaatgtg

SEQ ID NO: 9674 - protein, 45 aa, Homo sapiens; identical to SEQ ID NO: 9668

SEQ ID NO: 9675 - DNA, 416 bp, Homo sapiens
gataacacattgtctgtcactggctggttgtaatgcaaggaagggacaaagatgaaatggaaacatgttccttttttggtcatgatatcactcctcagcttatccccaaatcacctgtttctggcccagcttattccagaccctgaagatgtagagagggggaacgaccacgggacgccaatccccacctctgataacgatgacaattcgctgggctatacaggtagagtgtctctttcccaaatactaacttcctcctgaaatgcctccacctccatcaaccatcaaccacctgtataaaattaatcgaatcatccctgcttccagctaacaaccacaatttctcatttttcaaacttcattctgttcatatcagatcatattgctaaagtaaacacttttaagaacagaaatgt

SEQ ID NO: 9676 - protein, 69 aa, Homo sapiens
MKWKHVPFLVMISLLSLSPNHLFLAQLIPDPEDVERGNDHGTPIPTSDNDDNSLGYTGRVSLSQILTSS

SEQ ID NO: 9677 - DNA, 308 bp, Homo sapiens
gctgccttgaaaatctgaactccttaatgccatttccttcagcaaaacaggcatctcttagagtgtcaagacaagacccagagtcttggttcctgtgtttgctccctgagtgaaaaatcatgcttcaaattgattcatagatctggcaaataccactgatactagcagctgtttgctaatattctgaatagagcttgccacagagagttcacggatttaagacatacttgaaaaaaatttgaaatgatttcattacatgaagaaaaaaataggtattgcagcatcctgttaccaagaaataaagatag

SEQ ID NO: 9678 - protein, 43 aa, Homo sapiens
CHFLQQNRHLLECQDKTQSLGSCVCSLSEKSCFKLIHRSGKYH

SEQ ID NO: 9679 - DNA, 444 bp, Homo sapiens
tggctggttgtaatgcaaggaagggacaaagatgaaatggaaacatgttccttttttggtcatgatatcactcctcagcttatccccaaatcacctgtttctggcccagcttattccagggctcaagcctactaaagaaccaagaaaaattctgtaatacaataaaattcgtctccaccctttttaatggtttaaaggatcaattcttctccaagcccatcactgaccttcctgctgaacttcaactggatgcaaaacaaacccacaaattctattttagagaattatggaagtcaaatgacgtatgtattcaggtcacagaaaatgtatgatgcatggtgccatttaaaaaaatatttgctctgtgaagatctgctttctgcattatggaagaaaagcaattcatatttttcaacggcttgcattaaaatcctacactgtgta

SEQ ID NO: 9680 - protein, 64 aa, Homo sapiens
MQNKPTNSILENYGSQMTYVFRSQKMYDAWCHLKKYLLCEDLLSALWKKSNSYFSTACIKILHC

SEQ ID NO: 9681 - DNA, 7312 bp, Homo sapiens
gaggtcaggagattgagaccatcctggctaacacggtgaaaccccgtctctactaaaaatacaaaaaaattagccgggcgtggcggcgggcgcctgtagtcccagctacttgggaggctgaggcaggagaatggtgcgaacccgggaggcagattttgcagagagccgagatcgtgccactgcactccagcctgggcgacagagcaagactccgtctcaaaacaaaaaacaaacaaacaaatatggagcattctgatatgaataagacacttgctcacttctcaattccttggtgtccagctctacaagtgtatatagacttccaaagaatatttaaatcctttaacaaaaatgccacctaagaaaatatgaaatacttcagtctgtctgtcagtgctcacttcctgtctagaaactttcaggctccggcacaaatgaaccatgttcttcgcctaagtcatttatggaacatctgctttcggtttagcatcagtgtgctattaatccaggtcttccaagaaacaaatgccaagatggtattaaacatgaaatgattttaattgtttacatgcctgaaagtaaataaagagggtgccagctaaggctgaaaaagtcttcagtgatataaattttaccacacttaaagagagagaggaaaagtttaagtggaagctcctactcagccatgctgtctaaggaagatttggcaaaaccttgagctaaagtcagccaacggaaatcccacctttctccaaagaatggatctgctttactatcttgcttggtcttattgctttgtgacctagtaatatctttctcgagtgcatgaaacatctcagaaatgcaaacatcaaggaagatactaatcctttcttccagtttctgtgtgagggttggaggctgactttggtggtgatcttgctccaaattatagaactacatcctgtcatgaagagaagtttgtcttctcgataaagccaagtagctaacagagatggtcaccccaattaccagatggacataattatacttgaatgctgacctacaacattttgtgctgtgcagaggctttgaaaatcaaacaactttgaaaatacaaagcaccgcgtggatggcctcactctgtcgctcaggctggagtggcacgatcttggctcactgcagtctctgcctcctcctcttggatgcaagcaattcggcctccaagtagctgagattacagagaggctgaaaactcaagaaatgtggactaagtgtgtgggcaagtgtgtcactgctgactaaaactatgaacagacagagtctcactctgtcatccaggctggagtccagtggtatgatcttggctcactgcaaacctttgcctccctggtccaagtgattctcctgcttcagcctccaaaagtagctaggactacagctaatcctagtgaatcctccatgaggccattgttctgaatggaagaagagagatatatgcaataggaaaaggtgacgtggaatctatgagagtcccatgtttatgtagcatattgtgcctactgtatctattcaggaggggattcttaatataagagatacatttacaaaattgcttccattacctacaaacaccataaagaaaagtaacagtgatgcatatggacagaactgcatcaccagaagttagaggaggaaagcatttcctatccaactttaaatgctgagaatgaataaccaggaaaaatggtacagaggacaaaataccaacaaaagtctccaaaagtgatgtgaagaaaataaggggctcatcattctaaattctgcaggagagcagtagaagaaatcaagggaatcccacattatgtgggactctgcgactgtattggacacatagaataatctaggataatctctctgtctcaagatcttcaaatgaatcgcagctgtaacgtcccttttgccagggaaggcaatatattcacagattctgaggattaggaatgagacctccttggagccattgtttaacctttcataggctggataatatagttttgcaaactcaatttgggcagctggacagtgatcaggcaactttccgagtccctgactcccacctagactgagattccaatgctaggtgcccagaagtttccaaccaatgcaaaggtggcagctggcaagggccctgtgcagcagtaaggcgagtcatagactgatgaggcaaatcaccattgggaatgagctccatttgcccacaacagtgatcggctgatggctccaccctctacttagtcgcttctgtttcctgtcccatggattcctcaccccacactaatgcttccaggaacaacttctcaaataaatcacttgcacatttctagatgatatgaattatattcagacctgaagagaggacagaaaaattctggacttcaaactcaatgcaatgattggataagactttcggagtaacttcttttgggattgcgtaagagatcaagactacagactttgaggtaaaaacaacctagattcgtgagaagaggaagagtaaaagaactgcagctttcctcccactcttaaggtataaatatgaagtctaggtcatttcgagttggagaagccccagctacttcataagtgtgatgctagttttgaatgtgcattgagggacagctggtgttgagaaaaaaggaaattaccttaataccaataatttcagcacagattgtcatgtggttgggaaaatatttgatatgaagacattgaatccaccttctaaagaataacaagatatattcatgaatggaaggatttggtagggtacatgaggacagatataaaactgcacaaccaatgttacacaaaggaggtttattcttcttcacaagaaagtgatgtgtagagatattcactgaattattgaagattatatgtggcagagtcagcttggggatccaggttgtctaatccaaagattgtttaaccaagaaacaaggtcaaggcatgttcttcgatgcttgttcattaacagctctgcgggtgatgctcctagagaggtctgatgtgttgtgtgatgttctcacacaaactatgttaatttttgatcagtgattgtgagttttaattgtgttgaggtaactagagatttgttaagtggacgttacttcaaaaaggtaagttgaagcagtaaatgttaaaaccaaggaatcccccaaattcttgccctttattttttgcatgttaattccagaaaagaaaaaaaaaaaagcttgtgggttaacgtggtatttatgcaaggctgccaatgtaaatataattctgtgatttaattttttactggcatgacattatatatatgtataaaatgtgcatacataatatatacatatgtatatatgttatatattagatgtgtatgcatatataatatatattagatgtataaaatatattacatatataataaaatattagatatgtattatatagtagtatatataaaatatatacatatctaataatacattatagatcatgtattaatatatacatatatctagtatatacaatatatacatatctattatatttatacacacatacatatacatatgtgtatgtgtatgtctgtgcctgtgtgtctttttgtcttgcaagctcaatctttaaaaagaagagttcgaggagggatggagaaggaagagagtgattatatatacatatactgtccatgtttgcttagctagtatgaagcagaatctggattcaaattcaagaagtctgattcccaaacagccacccaattaggaccgctttgaaaactccgagtcttctatttgatataagtatagctcattgccatggaaataaacatatgtttcttttttaaattaaaaaaaatatttttattttgttttcaacatttagcatttttttgcatcaaagttctaagtagctgcatgtctgtttataatgtgtatatttgttgtttgtttttctgttttgtttctgtatagtttctttgtttgtatcactggtaatttaatccctcatgctatgctgtgggattatgtacaacaacacaacttcttagcctcttcaaaccctttcactgcaagctgcttttttgtgctttttgaaagaaaaggaagaaaaacacattgcattttcttaagataaaatgatacctgcttcttcatttcctcctactccttcctattatcttttgtagaaagaattgctgaatctattgatatgtaattttcatttaattctccaacatcttattgctatttaaaatggtttaagaaaactggcttaatatagccaagaaaaattctatagtaatacttgtctgtaatttctctatatttaaataaaatatcatttctatcttggaggtttgatttggccatttaaaaatgctaatgttttattgttttttcaaaaaaatactacatgcatgctcatagtataaacatcaatgtttcattaggatatatagtgaaaagtcagtaactttacaacctctgtttcaaacccaaccagtaatttaagttgttttcataacaaagtgttattatttatcttctaatacctataaaatatttatttactccccaaattaaatagagtgttggttcttcaatgaaggtatgaagttactttcaattaaatatgcagtttgattagaagaaaaaaaaatccatcagatctcagccaagctcttttggatgattatttttcttcaaaatcaaatacactaaaatttccaaacagtaacagttacaatgtttcagtttcttttaaggtagcctgaactgagacacattaaggtttatatctaatttcatagttctgttcagtaggaaataagtaaattagtttaaaggactgatccatatcaggagatcaggactggacaaagtgttaatttatctacagattttaccaggcagattgccaatatccaagttcattagacaggtcctaggactaataagaactcttgggggctacaatgtgaaatacctgagtatatgagtcaggtaaagactttagaaagtttggcttctactctcatattcccaggagttgaatagattggagtggaaaaaatgtggtcaaaaactagtgattttggattagaagtagggcataaagctcctattattgcacttgggcaatattaactggattgcaagaaactgtaatatgcagaaacagcatatttcccttagggagtacattttgttaaacttagtattcttgctacctgttttgttacctaagcttaatggacctggccctagactttagcttggtgcatggtgaaaattgaccttaagcaactgcagcattgtccaaatatttggtttcacatagaccagttttggttcttgtttctgtgtgactttgaggggctctttaagaaatccaaggacaaggtgccacatttattaaggccccgccattcacaatgcatgatgctagagcctgacagtgcaccatgctagagactgaagagacataaaaaaaagaaaaggcagagttcttgctatcaggttcttaaaattttctttgttttggttaaattcttgattggattttttcactaaatgtttggccctattaaaaataagtaaagaaaaaatgaaggaagaatggaagagagggagaataggaaatgaatgaaacaaagccaagtaagagatacgtctactacagacctgcaagttggcagtgcttgcagaagacagttgacatattctagcctggttcacattttctggttaacttttgagcatagaataaagaatataataaaatgcttttttttttttttgcacaatgaactttaaacaaatcaggagagtatattggtaatttagagaagtagcaattctcattaaatctgtttttcattgaattatcatgcccttaaaattatatgatagattattatcttcggtagtattagtttaaataagaattatatacaaccaaaatatcagtaaggctaattctctgagaccataagagaaccaagtcaatatccccatagctacatcatattgatcattcatttgatttaagaagaaagaagacaaatatgttagtgaaagggagacaaatgagtatgtgcctggcctggccaattcctgactcatttacagaggaagctaatataactctcttactcattttatgggaaatatgatagatctgattatataatttatgcctcctttcagacttcctacaccccactaattgtctcttcctttcttttctccaccttttgctcaggtatttggcagttattgcacttttttggatcttttttttaaggatgttactatcaatcttttgcctacatctaaatgacttacctatgaagaagatcccatttttagccttaatatttgcaaattacttgagagatggagtctcactctatcacccaggctggaggacagtggcacgacctcagctccctgcaacctccacctcccaggttactgatggatccgtcctaaatgccatccatctcaagacagaggcccacagaagtcaatgtatcttcaagatgggagtacctggagatggctgtagagaccatgtagcaggaaatggtgacagagaagagctgggcctctggtaccaacatgcttcccccccgttacagctatgcgggctgatagtgacgcaatgtgtggtttcaatacttcatagtgtcttacttcacctcagtataaagtactttgaaagcatcaaggaaatggtcctcaaaaaaggcttatccagtcaggacatctggtgctggctctggaatgagtggatgaagataaggccttccagtatggaggtgataaaaatcagggaagacaggtaatcacaatggatgacagaccaggattcccagatatcttggcatggctggaacaatgtacagatcaaaccatgtaaaacttaatgggtataaaccaactcttcactttggtctaaaaaagtccatttgcatggcttctagttaaaggtggacaggctcactttagaatcctattatatacaaaggatttagggggtttagttcacaatgtgctaaagccatctcacagtgaccatggtatgagctgtgtgatttggtttaaatataatagagaatgaaggacaaggttgagggtggtggttacagtcctgcctgattctgtagtgctcaggtgacctttgaagaatgaagaaagaagtcaaaaccccacactattaagacattggaagactgggaatgtttattttctgaagaataaaagatgtaggaaac

SEQ ID NO: 9682 - protein, 180 aa, Homo sapiens
MLLSIFCLHLNDLPMKKIPFLALIFANYLRDGVSLYHPGWRTVARPQLPATSTSQVTDGSVLNAIHLKTEAHRSQCIFKMGVPGDGCRDHVAGNGDREELGLWYQHASPPLQLCGLIVTQCVVSILHSVLLHLSIKYFESIKEMVLKKGLSSQDIWCWLWNEWMKIRPSSMEVIKIREDR

SEQ ID NO: 9683 - DNA, 742 bp, Homo sapiens
agtagtgatccacctgcctcggcctcccaaagtgctgggattacaggcgtgagccaccgcgtccagccaattggtgggttcctggtctcactgacttcaagaatgaagccacggaccctcgcaatgctgttacgaacttcccttagaatcaacccatttgtgaaacaccacattaataagagcagtatctttggagattggagagtccaccaaggatgcccactggctccctacaaagttttttatgtgaggactcggtctcaggctcagaagtggaagagatgtgccttgactcagatgagactttggacttggacttttgagttaattctggaatgagttaaaactttaggggactgttgggaaggcattattgtgttttaaatgtgaaaagaacatgaggtatgggaggggtcaggggtggaatgatatggtttggctctgtgtccccacccaaatctcatgtcaaattttaatccccagtgttggtggaggagcctagtgagaggtgactgaatcacaggggcagacttcctccttgtttctcttgtgatagtgagtgagttctcatgaactctggttgttgtaaagtgtgtggcacctttcccttcactctctctcttcctcctgctcttgccgtgagaataagtgcatgcttcccctcctgccatgggaataagtgcatgcttcccctcctgccatgagaacaagtgcatgcttctccttttgccttctaccatgt

SEQ ID NO: 9684 - protein, 78 aa, Homo sapiens [sequence omitted]

SEQ ID NO: 9685 - DNA, 606 bp, Homo sapiens
ggcactggaacatcttatggctgcctctctgggatcattactgagatcaatgactccttccctcatgtcttccacattcaggaagtttaacatctgtgaagctgctcatctgacggccccagagattaaagtctgtttattggcataggggagaggctgaggcagcctaaaatctaggctaatattatcacctttgccatgcatgtttttccacaatctggagaccggtgtacataaagaaaaagcaacatctgtgatactccttatactactttgtgtttcagtgctcaactttcaacattattattattatttctaagaaaatcaatggaaatactgcaaagcagaatattacgatgtaagtttgatcactgcgaggctaggaaataatgagaaaactcctgccatgaatagaattctgccaagcaggaagaatatttgctgaagtggaagtggtgggaatctcacgaagaaggggaacagccagtaccagccattacaaaaggcggatttgaaaatgtttaaaatatttttcctcagacttggctacaaattaaaataatccagggagtttgtttttttcgataaagtattcatagaaccctt

SEQ ID NO: 9686 - protein, 43 aa, Homo sapiens
MAASLGSLLRSMTPSLMSSTFRKFNICEAAHLTAPEIKVCLLA

SEQ ID NO: 9687 - DNA, 749 bp, Homo sapiens
tgctgccatccacctaagatgtaacttgcctttcctcgccttccaccatgattgtgaagcctccacaaccatgtagaactatgaggaaacagaggcccaaaaagttgagcaacatgcaaacctcatacaattaattactggtaaagccagtattcaagtaaaaagtgaagagtaactaaattcagaaaaaaaaatcacagacttattagaaagatttggatgagttatgaggcttgaaatagaatcgtaattgtagaaatgaaaaaaaggatgatgtgggccggtcgtggtggctcactcctgtaatcccagcactttgggagtgagaggcaggtggatcacgaggtcgggagatggcgaccatcctggctaacacaatgaaacctagtctccactaaaaatacaaaaaattagccaggcgtggtggcggacgcctgtggtcccagctactcgggaggctgaggcaggagaatggcatgaacctgggaggcggagcttgcagtgagccaagattgtgccactgcactccagactgggcaacagagcgagactctgtctcaaaaaggaaaaaaaagaaaaagaaaaaaaggatgatgtgaaagagctttatggttaaaatatgcaggacttgtcagtaaaatgggtataaaagacaataaagtatgaagattcaaaatgtgtcggaaaatcgttacaccattagacaaaatggaaaaaccataacgtaggaaagagaaggcagcaaattt

SEQ ID NO: 9688 - protein, 40 aa, Homo sapiens
MNLGGGACSEPRLCHCTPDWATERDSVSKRKKKKKKKRMM

SEQ ID NO: 9689 - DNA, 3975 bp, Homo sapiens
ctgggtcctgtgtgtgccacaggggtggggtgtccagcgagcggtctcctcctcctgctagtgctgctgcggcgtcccgcggcctccccgagtcgggcgggaggggagagcgggtgtggatttgtcttgacggtaattgttgcgtttccacgtctcggaggcctgcgcgctgggttgctccttcttcgggagcgagctgttctcagcgatcccactcccagccggggctccccacacacactgggctgcgtgcgtgtggagtgggacccgcgcacacgcgtgtctctggacagctacggcgccgaaagaactaaaattccagatggcaaactcaatgaatggcagaaaccctggtggtcgaggaggaaatccccgaaaaggtcgaattttgggtattattgatgctattcaggatgcagttggaccccctaagcaagctgccgcagatcgcaggaccgtggagaagacttggaagctcatggacaaagtggtaagactgtgccaaaatcccaaacttcagttgaaaaatagcccaccatatatacttgatattttgcctgatacatatcagcatttacgacttatattgagtaaatatgatgacaaccagaaacttgcccaactcagtgagaatgagtactttaaaatctacattgatagccttatgaaaaagtcaaaacgggcaataagactctttaaagaaggcaaggagagaatgtatgaagaacagtcacaggacagacgaaatctcacaaaactgtcccttatcttcagtcacatgctggcagaaatcaaagcaatctttcccaatggtcaattccagggagataactttcgtatcacaaaagcagatgctgctgaattctggagaaagttttttggagacaaaactatcgtaccatggaaagtattcagacagtgccttcatgaggtccaccagattagctctggcctggaagcaatggctctaaaatcaacaattgatttaacttgcaatgattacatttcagtttttgaatttgatatttttaccaggctgtttcagccttggggctctattttgcggaattggaatttcttagctgtgacacatccaggttacatggcatttctcacatatgatgaagttaaagcacgactacagaaatatagcaccaaacccggaagctatattttccggttaagttgcactcgattgggacagtgggccattggctatgtgactggggatgggaatatcttacagaccatacctcataacaagcccttatttcaagccctgattgatggcagcagggaaggattttatctttatcctgatgggaggagttataatcctgatttaactggattatgtgaacctacacctcatgaccatataaaagttacacaggaacaatatgaattatattgtgaaatgggctccacttttcagctctgtaagatttgtgcagagaatgacaaagatgtcaagattgagccttgtgggcatttgatgtgcacctcttgccttacggcatggcaggagtcggatggtcagggctgccctttctgtcgttgtgaaataaaaggaactgagcccataatcgtggacccctttgatccaagagatgaaggctccaggtgttgcagcatcattgacccctttggcatgccgatgctagacttggacgacgatgatgatcgtgaggagtccttgatgatgaatcggttggcaaacgtccgaaagtgcactgacaggcagaactcaccagtcacatcaccaggatcctctccccttgcccagagaagaaagccacagcctgacccactccagatcccacatctaagcctgccacccgtgcctcctcgcctggatctaattcagaaaggcatagttagatctccctgtggcagcccaacgggttcaccaaagtcttctccttgcatggtgagaaaacaagataaaccactcccagcaccacctcctcccttaagagatcctcctccaccgccacctgaaagacctccaccaatcccaccagacaatagactgagtagacacatccatcatgtggaaagcgtgccttccagagacccgccaatgcctcttgaagcatggtgccctcgggatgtgtttgggactaatcagcttgtgggatgtcgactcctaggggagggctctccaaaacctggaatcacagcgagttcaaatgtcaatggaaggcacagtagagtgggctctgacccagtgcttatgcggaaacacagacgccatgatttgcctttagaaggagctaaggtcttttccaatggtcaccttggaagtgaagaatatgatgttcctccccggctttctcctcctcctccagttaccaccctcctccctagcataaagtgtactggtccgttagcaaattctctttcagagaaaacaagagacccagtagaggaagatgatgatgaatacaagattccttcatcccaccctgtttccctgaattcacaaccatctcattgtcataatgtaaaacctcctgttcggtcttgtgataatggtcactgtatgctgaatggaacacatggtccatcttcagagaagaaatcaaacatccctgacttaagcatatatttaaagggagatgtttttgattcagcctctgatcccgtgccattaccacctgccaggcctccaactcgggacaatccaaagcatggttcttcactcaacaggacgccctctgattatgatcttctcatccctccattaggtgaagatgcttttgatgccctccctccatctctcccacctcccccacctcctgcaaggcatagtctcattgaacattcaaaacctcctggctccagtagccggccatcctcaggacaggatctttttcttcttccttcagatccctttgttgatctagcaagtggccaagttcctttgcctcctgctagaaggttaccaggtgaaaatgtcaaaactaacagaacatcacaggactatgatcagcttccttcatgttcagatggttcacaggcaccagccagaccccctaaaccacgaccgcgcaggactgcaccagaaattcaccacagaaaaccccatgggcctgaggcggcattggaaaatgtcgatgcaaaaattgcaaaactcatgggagagggttatgcctttgaagaggtgaagagagccttagagatagcccagaataatgtcgaagttgcccggagcatcctccgagaatttgccttccctcctccagtatccccacgtctaaatctatagcagccagaactgtagacaccaaaatggaaagcaatcgatgtattccaagagtgtggaaataaagagaactgagatggaattcaagagagaagtgtctcctcctcgtgtagcagcttgagaagaggcttgggagtgcagcttctcaaaggagaccgatgcttgctcaggatgtcgacagctgtggcttccttgtttttgctagccatatttttaaatcagggttgaactgacaaaaataatttaaagacgtttacttcccttgaactttgaacctgtgaaatgctttaccttgtttacagtttggcaaagttgcagtttgttcttgtttttagtttagttttgttttggtgttttgatacctgtactgtgttcttcacagaccctttgtagcgtggtcaggtctgctgtaacatttcccaccaactctcttgctgtccacatcaacagctaaatcatttattcatatggatctctaccatccccatgccttgcccaggtccagttccatttctctcattcacaagatgctttgaaggttctgattttcaactgatcaaactaatgcaaaaaaaaaaaagtatgtattcttcactactgagtttcttctttggaaaccatcactattgagagatgggaaaaacctgaatgtataaagcatttatttgtcaataaactgccttttgtaaggggttttcacataacat

SEQ ID NO: 9690 - protein, 982 aa, Homo sapiens [sequence omitted]

SEQ ID NO: 9691 - DNA, 2093 bp, Homo sapiens
ggtgtccagcgagcggtctcctcctcctgctagtgctgctgcggcgtcccgcggcctccccgagtcgggcgggaggggagagcgggtgtggatttgtcttgacggtaattgttgcgtttccacgtctcggaggcctgcgcgctgggttgctccttcttcgggagcgagctgttctcagcgatcccactcccagccggggctccccacacacactgggctgcgtgcgtgtggagtgggacccgcgcacacgcgtgtctctggacagctacggcgccgaaagaactaaaattccagatggcaaactcaatgaatggcagaaaccctggtggtcgaggaggaaatccccgaaaaggtcgaattttgggtattattgatgctattcaggatgcagttggaccccctaagcaagctgccgcagatcgcaaaacctggaatcacagcgagttcaaatgtcaatggaaggcacagtagagtgggctctgacccagtgcttatgcggaaacacagacgccatgatttgcctttagaaggagctaaggtcttttccaatggtcaccttggaagtgaagaatatgatgttcctccccggctttctcctcctcctccagttaccaccctcctccctagcataaagtgtactggtccgttagcaaattctctttcagagaaaacaagagacccagtagaggaagatgatgatgaatacaagattccttcatcccaccctgtttccctgaattcacaaccatctcattgtcataatgtaaaacctcctgttcggtcttgtgataatggtcactgtatgctgaatggaacacatggtccatcttcagagaagaaatcaaacatccctgacttaagcatatatttaaagggagatgtttttgattcagcctctgatcccgtgccattaccacctgccaggcctccaactcgggacaatccaaagcatggttcttcactcaacaggacgccctctgattatgatcttctcatccctccattaggtgaagatgcttttgatgccctccctccatctctcccacctcccccacctcctgcaaggcatagtctcattgaacattcaaaacctcctggctccagtagccggccatcctcaggacaggatctttttcttcttccttcagatccctttgttgatctagcaagtggccaagttcctttgcctcctgctagaaggttaccaggtgaaaatgtcaaaactaacagaacatcacaggactatgatcagcttccttcatgttcagatggttcacaggcaccagccagaccccctaaaccacgaccgcgcaggactgcaccagaaattcaccacagaaaaccccatgggcctgaggcggcattggaaaatgtcgatgcaaaaattgcaaaactcatgggagagggttatgcctttgaagaggtgaagagagccttagagatagcccagaataatgtcgaagttgcccggagcatcctccgagaatttgccttccctcctccagtatccccacgtctaaatctatagcagccagaactgtagacaccaaaatggaaagcaatcgatgtattccaagagtgtggaaataaagagaactgagatggaattcaagagagaagtgtctcctcctcgtgtagcagcttgagaagaggcttgggagtgcagcttctcaaaggagaccgatgcttgctcaggatgtcgacagctgtggcttccttgtttttgctagccatatttttaaatcagggttgaactgacaaaaataatttaaagacgtttacttcccttgaactttgaacctgtgaaatgctttaccttgtttacagtttggcaaagttgcagtttgttcttgtttttagtttagttttgttttggtgttttgatacctgtactgtgttcttcacagaccctttgtagcgtggtcaggtctgctgtaacatttcccaccaactctcttgctgtccacatcaacagctaaatcatttattcatatggatctctaccatccccatgccttgcccaggtccagttccatttctctcattcacaagatgctttgaaggttctgattttcaactgatcaaactaatgc

SEQ ID NO: 9692 - protein, 405 aa, Homo sapiens
MAETLVVEEEIPEKVEFWVLLMLFRMQLDPLSKLPQIAKPGITASSNVNGRHSRVGSDPVLMRKHRRHDLPLEGAKVFSNGHLGSEEYDVPPRLSPPPPVTTLLPSIKCTGPLANSLSEKTRDPVEEDDDEYKIPSSHPVSLNSQPSHCHNVKPPVRSCDNGHCMLNGTHGPSSEKKSNIPDLSIYLKGDVFDSASDPVPLPPARPPTRDNPKHGSSLNRTPSDYDLLIPPLGEDAFDALPPSLPPPPPPARHSLIEHSKPPGSSSRPSSGQDLFLLPSDPFVDLASGQVPLPPARRLPGENVKTNRTSQDYDQLPSCSDGSQAPARPPKPRPRRTAPEIHHRKPHGPEAALENVDAKIAKLMGEGYAFEEVKRALEIAQNNVEVARSILREFAFPPPVSPRLNL

SEQ ID NO: 9693 - DNA, 3785 bp, Homo sapiens
ctgggtcctgtgtgtgccacaggggtggggtgtccagcgagcggtctcctcctcctgctagtgctgctgcggcgtcccgcggcctccccgagtcgggcgggaggggagagcgggtgtggatttgtcttgacggtaattgttgcgtttccacgtctcggaggcctgcgcgctgggttgctccttcttcgggagcgagctgttctcagcgatcccactcccagccggggctccccacacacactgggctgcgtgcgtgtggagtgggacccgcgcacacgcgtgtctctggacagctacggcgccgaaagaactaaaattccagatggcaaactcaatgaatggcagaaaccctggtggtcgaggaggaaatccccgaaaaggtcgaattttgggtattattgatgctattcaggatgcagttggaccccctaagcaagctgccgcagatcgcaggaccgtggagaagacttggaagctcatggacaaagtggtaagactgtgccaaaatcccaaacttcagttgaaaaatagcccaccatatatacttgatattttgcctgatacatatcagcatttacgacttatattgagtaaatatgatgacaaccagaaacttgcccaactcagtgagaatgagtactttaaaatctacattgatagccttatgaaaaagtcaaaacgggcaataagactctttaaagaaggcaaggagagaatgtatgaagaacagtcacaggacagacgaaatctcacaaaactgtcccttatcttcagtcacatgctggcagaaatcaaagcaatctttcccaatggtcaattccagggagataactttcgtatcacaaaagcagatgctgctgaattctggagaaagttttttggagacaaaactatcgtaccatggaaagtattcagacagtgccttcatgaggtccaccagattagctctggcctggaagcaatggctctaaaatcaacaattgatttaacttgcaatgattacatttcagtttttgaatttgatatttttaccaggctgtttcagccttggggctctattttgcggaattggaatttcttagctgtgacacatccaggttacatggcatttctcacatatgatgaagttaaagcacgactacagaaatatagcaccaaacccggaagctatattttccggttaagttgcactcgattgggacagtgggccattggctatgtgactggggatgggaatatcttacagaccatacctcataacaagcccttatttcaagccctgattgatggcagcagggaaggattttatctttatcctgatgggaggagttataatcctgatttaactggattatgtgaacctacacctcatgaccatataaaagttacacaggaacaatatgaattatattgtgaaatgggctccacttttcagctctgtaagatttgtgcagagaatgacaaagatgtcaagattgagccttgtgggcatttgatgtgcacctcttgccttacggcatggcaggagtcggatggtcagggctgccctttctgtcgttgtgaaataaaaggaactgagcccataatcgtggacccctttgatccaagagatgaaggctccaggtgttgcagcatcattgacccctttggcatgccgatgctagacttggacgacgatgatgatcgtgaggagtccttgatgatgaatcggttggcaaacgtccgaaagtgcactgacaggcagaactcaccagtcacatcaccaggatcctctccccttgcccagagaagaaagccacagcctgacccactccagatcccacatctaagcctgccacccgtgcctcctcgcctggatctaattcagaaaggcatagttagatctccctgtggcagcccaacgggttcaccaaagtcttctccttgcatggtgagaaaacaagataaaccactcccagcaccacctcctcccttaagagatcctcctccaccgccacctgaaagacctccaccaatcccaccagacaatagactgagtagacacatccatcatgtggaaagcgtgccttccagagacccgccaatgcctcttgaagcatggtgccctcgggatgtgtttgggactaatcagcttgtgggatgtcgactcctaggggagggctctccaaaacctggaatcacagcgagttcaaatgtcaatggaaggcacagtagagtgggctctgacccagtgcttatgcggaaacacagacgccatgatttgcctttagaaggagctaaggtcttttccaatggtcaccttggaagtgaagaatatgatgttcctccccggctttctcctcctcctccagttaccaccctcctccctagcataaagtgtactggtccgttagcaaattctctttcagagaaaacaagagacccagtagaggaagatgatgatgaatacaagattccttcatcccaccctgtttccctgaattcacaaccatctcattgtcataatgtaaaacctcctgttcggtcttgtgataatggtcactgtatgctgaatggaacacatggtccatcttcagagaagaaatcaaacatccctgacttaagcatatatttaaagggagatgtttttgattcagcctctgatcccgtgccattaccacctgccaggcctccaactcgggacaatccaaagcatggttcttcactcaacaggacgccctctgattatgatcttctcatccctccattaggttgaaacctttaaaaaagttttgaacaacccacccctccttcttttaatttcagaattttcagaattcagagttcagtataacacagactcactgggttgtgaatttgcctgaaatttgaatgggttctccaggtgccggtgactcccaagttcacgagaccattactccatgtagatgattaaggtagtagtgtagtagttgggcatcagtcaggttttaagcaagttgttttgtccatactaaatgtagtctaaaaacacatgagagctttgtgctctagtagttttgaagtgatgacttgaagtgttgagattttctttaagtataataattcttaataaatatgaacttgcttttcttgcagcatgagcaccagttccacttacgctaattaaattatgcaaaattaaatagttgtatgtagagaactgataataaattctgttttattctaatcattacaactgtaacacattcaaaaaaatctcaatttccttgtttcaaattataataatgaagaaacatcctatgtgtatttttgtttgtatccacaggtgaaggtatatgtaggtgtgtgtatatgttgaagttggctggtgccactgtcactgttaatttcattaattctaattaggaagcatctcaccctgtttttagaagacagaatgtctgcacaccttacataacgcttcacaataacaagtcactgtaacataaaataatatatgatgaaagtcaatttacaagcttttctgaactggctgttaggccaccagaaatacgaaatgaacctttccattttctcacaagtaccactgactagtattttgaatgacacaattgcagtatcttttgctcctgttctctctgtagttcaggactttattctcacctacatcaattacaaaaggctcctaactctgttacctacagtctttctctcccttccacttcttcctgcacacttgtttttgacatattacccagatcttcatcacctggataagcattgttcaataaagctttctgtgg

SEQ ID NO: 9694 - protein, 810 aa, Homo sapiens
MANSMNGRNPGGRGGNPRKGRILGIIDAIQDAVGPPKQAAADRRTVEKTWKLMDKVVRLCQNPKLQLKNSPPYILDILPDTYQHLRLILSKYDDNQKLAQLSENEYFKIYIDSLMKKSKRAIRLFKEGKERMYEEQSQDRRNLTKLSLIFSHMLAEIKAIFPNGQFQGDNFRITKADAAEFWRKFFGDKTIVPWKVFRQCLHEVHQISSGLEAMALKSTIDLTCNDYISVFEFDIFTRLFQPWGSILRNWNFLAVTHPGYMAFLTYDEVKARLQKYSTKPGSYIFRLSCTRLGQWAIGYVTGDGNILQTIPHNKPLFQALIDGSREGFYLYPDGRSYNPDLTGLCEPTPHDHIKVTQEQYELYCEMGSTFQLCKICAENDKDVKIEPCGHLMCTSCLTAWQESDGQGCPFCRCEIKGTEPIIVDPFDPRDEGSRCCSIIDPFGMPMLDLDDDDDREESLMMNRLANVRKCTDRQNSPVTSPGSSPLAQRRKPQPDPLQIPHLSLPPVPPRLDLIQKGIVRSPCGSPTGSPKSSPCMVRKQDKPLPAPPPPLRDPPPPPPERPPPIPPDNRLSRHIHHVESVPSRDPPMPLEAWCPRDVFGTNQLVGCRLLGEGSPKPGITASSNVNGRHSRVGSDPVLMRKHRRHDLPLEGAKVFSNGHLGSEEYDVPPRLSPPPPVTTLLPSIKCTGPLANSLSEKTRDPVEEDDDEYKIPSSHPVSLNSQPSHCHNVKPPVRSCDNGHCMLNGTHGPSSEKKSNIPDLSIYLKGDVFDSASDPVPLPPARPPTRDNPKHGSSLNRTPSDYDLLIPPLG

SEQ ID NO: 9695 - DNA, 3898 bp, Homo sapiens
ctgggtcctgtgtgtgccacaggggtggggtgtccagcgagcggtctcctcctcctgctagtgctgctgcggcgtcccgcggcctccccgagtcgggcgggaggggagagcgggtgtggatttgtcttgacggtaattgttgcgtttccacgtctcggaggcctgcgcgctgggttgctccttcttcgggagcgagctgttctcagcgatcccactcccagccggggctccccacacacactgggctgcgtgcgtgtggagtgggacccgcgcacacgcgtgtctctggacagctacggcgccgaaagaactaaaattccagatggcaaactcaatgaatggcagaaaccctggtggtcgaggaggaaatccccgaaaaggtcgaattttgggtattattgatgctattcaggatgcagttggaccccctaagcaagctgccgcagatcgcaggaccgtggagaagacttggaagctcatggacaaagtggtaagactgtgccaaaatcccaaacttcagttgaaaaatagcccaccatatatacttgatattttgcctgatacatatcagcatttacgacttatattgagtaaatatgatgacaaccagaaacttgcccaactcagtgagaatgagtactttaaaatctacattgatagccttatgaaaaagtcaaaacgggcaataagactctttaaagaaggcaaggagagaatgtatgaagaacagtcacaggacagacgaaatctcacaaaactgtcccttatcttcagtcacatgctggcagaaatcaaagcaatctttcccaatggtcaattccagggagataactttcgtatcacaaaagcagatgctgctgaattctggagaaagttttttggagacaaaactatcgtaccatggaaagtattcagacagtgccttcatgaggtccaccagattagctctggcctggaagcaatggctctaaaatcaacaattgatttaacttgcaatgattacatttcagtttttgaatttgatatttttaccaggctgtttcagccttggggctctattttgcggaattggaatttcttagctgtgacacatccaggttacatggcatttctcacatatgatgaagttaaagcacgactacagaaatatagcaccaaacccggaagctatattttccggttaagttgcactcgattgggacagtgggccattggctatgtgactggggatgggaatatcttacagaccatacctcataacaagcccttatttcaagccctgattgatggcagcagggaaggattttatctttatcctgatgggaggagttataatcctgatttaactggattatgtgaacctacacctcatgaccatataaaagttacacaggaacaatatgaattatattgtgaaatgggctccacttttcagctctgtaagatttgtgcagagaatgacaaagatgtcaagattgagccttgtgggcatttgatgtgcacctcttgccttacggcatggcaggagtcggatggtcagggctgccctttctgtcgttgtgaaataaaaggaactgagcccataatcgtggacccctttgatccaagagatgaaggctccaggtgttgcagcatcattgacccctttggcatgccgatgctagacttggacgacgatgatgatcgtgaggagtccttgatgatgaatcggttggcaaacgtccgaaagtgcactgacaggcagaactcaccagtcacatcaccaggatcctctccccttgcccagagaagaaagccacagcctgacccactccagatcccacatctaagcctgccacccgtgcctcctcgcctggatctaattcagaaaggcatagttagatctccctgtggcagcccaacgggttcaccaaagtcttctccttgcatggtgagaaaacaagataaaccactcccagcaccacctcctcccttaagagatcctcctccaccgccacctgaaagacctccaccaatcccaccagacaatagactgagtagacacatccatcatgtggaaagcgtgccttccagagacccgccaatgcctcttgaagcatggtgccctcgggatgtgtttgggactaatcagcttgtgggatgtcgactcctaggggagggctctccaaaacctggaatcacagcgagttcaaatgtcaatggaaggcacagtagagtgggctctgacccagtgcttatgcggaaacacagacgccatgatttgcctttagaaggagctaaggtcttttccaatggtcaccttggaagtgaagaatatgatgttcctccccggctttctcctcctcctccagttaccaccctcctccctagcataaagtgtactggtccgttagcaaattctctttcagagaaaacaagagacccagtagaggaagatgatgatgaatacaagattccttcatcccaccctgtttccctgaattcacaaccatctcattgtcataatgtaaaacctcctgttcggtcttgtgataatggtcactgtatgctgaatggaacacatggtccatcttcagagaagaaatcaaacatccctgacttaagcatatatttaaagggtacgtatagaatataatttcctttgtgatgtacatcttaatggtcagaatttaaaggcaaaatttcatgccattgtactgaaaatacattaaggttttgtgttatcctctaggagatgtttttgattcagcctctgatcccgtgccattaccacctgccaggcctccaactcgggacaatccaaagcatggttcttcactcaacaggacgccctctgattatgatcttctcatccctccattaggttgaaacctttaaaaaagttttgaacaacccacccctccttcttttaatttcagaattttcagaattcagagttcagtataacacagactcactgggttgtgaatttgcctgaaatttgaatgggttctccaggtgccggtgactcccaagttcacgagaccattactccatgtagatgattaaggtagtagtgtagtagttgggcatcagtcaggttttaagcaagttgttttgtccatactaaatgtagtctaaaaacacatgagagctttgtgctctagtagttttgaagtgatgacttgaagtgttgagattttctttaagtataataattcttaataaatatgaacttgcttttcttgcagcatgagcaccagttccacttacgctaattaaattatgcaaaattaaatagttgtatgtagagaactgataataaattctgttttattctaatcattacaactgtaacacattcaaaaaaatctcaatttccttgtttcaaattataataatgaagaaacatcctatgtgtatttttgtttgtatccacaggtgaaggtatatgtaggtgtgtgtatatgttgaagttggctggtgccactgtcactgttaatttcattaattctaattaggaagcatctcaccctgtttttagaagacagaatgtctgcacaccttacataacgcttcacaataacaagtcactgtaacataaaataatatatgatgaaagtcaatttacaagcttttctgaactggctgttaggccaccagaaatacgaaatgaacctttccattttctcacaagtaccactgactagtattttgaatgacacaattgcagtatcttttgctcctgttctctctgtagttcaggactttattctcacctacatcaattacaaaaggctcctaactctgttacctacagtctttctctcccttccacttcttcctgcacacttgtttttgacatattacccagatcttcatcacctggataagcattgttcaataaagctttctgtgg

SEQ ID NO: 9696 - protein, 770 aa, Homo sapiens
MANSMNGRNPGGRGGNPRKGRILGIIDAIQDAVGPPKQAAADRRTVEKTWKLMDKVVRLCQNPKLQLKNSPPYILDILPDTYQHLRLILSKYDDNQKLAQLSENEYFKIYIDSLMKKSKRAIRLFKEGKERMYEEQSQDRRNLTKLSLIFSHMLAEIKAIFPNGQFQGDNFRITKADAAEFWRKFFGDKTIVPWKVFRQCLHEVHQISSGLEAMALKSTIDLTCNDYISVFEFDIFTRLFQPWGSILRNWNFLAVTHPGYMAFLTYDEVKARLQKYSTKPGSYIFRLSCTRLGQWAIGYVTGDGNILQTIPHNKPLFQALIDGSREGFYLYPDGRSYNPDLTGLCEPTPHDHIKVTQEQYELYCEMGSTFQLCKICAENDKDVKIEPCGHLMCTSCLTAWQESDGQGCPFCRCEIKGTEPIIVDPFDPRDEGSRCCSIIDPFGMPMLDLDDDDDREESLMMNRLANVRKCTDRQNSPVTSPGSSPLAQRRKPQPDPLQIPHLSLPPVPPRLDLIQKGIVRSPCGSPTGSPKSSPCMVRKQDKPLPAPPPPLRDPPPPPPERPPPIPPDNRLSRHIHHVESVPSRDPPMPLEAWCPRDVFGTNQLVGCRLLGEGSPKPGITASSNVNGRHSRVGSDPVLMRKHRRHDLPLEGAKVFSNGHLGSEEYDVPPRLSPPPPVTTLLPSIKCTGPLANSLSEKTRDPVEEDDDEYKIPSSHPVSLNSQPSHCHNVKPPVRSCDNGHCMLNGTHGPSSEKKSNIPDLSIYLKGTYRI

SEQ ID NO: 9697 - DNA, 2361 bp, Homo sapiens
atcaaaagaagttcaatactaaagataaagagttttccttattgaaatatatattgttaagcttttaaaccaaatgaaagtatgagtggtcatatttatactgtagtaggttttcataatagattttccggattaaaaccatttgttgaaatcatcaaagagatgttaatcctgctttagcattaatgcaaagttaaaataactgacattaaaaaaatcatttgggaagctttattgaatatattgagataaggtttattgtagtccttctcttcatgcatactgctgttacaattccaggaggtttcaaaatccatgtgaatgaccccattcaaccctcaaactgtccaattcctggcctaattcaccttcactctgctgtagctaccagttgcaggactagctgcattttggccagaactgcatcaccctggaaattttaaacacactctctctcttctgattgccctctttttctggttccatctcagctttattcccactgcattgttctttatctttggagctctctaaatccctccctagctgtgctagtggtggatgaggtgtttaacaaaggaaatgtaagatcttcctttagttgccagttcagtgtagttttttggaattagtttgctaaatttcttttaaagtgatcagtttagtatccaaaaagtaaaatggagcaagttgaaaaattgtcctgcctgtgtttcagtttaggttgttcctaggcgcactgctgacttctcttatgactttgggtagattcagtctttattggtatttgaacttttaatgtctgttgtgtactctccttagacacatttaaaactttaaagcatttgggcagggggaatgggtaaggatccagttttatttaagactgtcaggacccatctcaatagtagtatctattcccatgagagaaaaatgaaaggcaaggcttacatcagcctagtctcctcacttaggaatcacaacattcctaaggtcagaaacagtgtgaagtaagtctctgaacccattttggagggcagtacatcagaaatacagtggaaattgctctttagctggatgtgagtttcattttaagcaccactgtttatattctttatgtcttgcctttctttttatattgagtttgtttcaccttgtaaaattaagaagagcatgttctagcttttaaatgtgagaattgaattattaatagtttttgggtaaaagtatcacctcccatttcttctaccaaaagcagcacatcctcacagacttttcacctcactgaaaatggtcatttaaagtttttactaattcagcatttaaagctttttatttcctccttgatttataacacagctgtttcttgaatagaaaaaactcaaggactacatgcaatctaattagattacattctttgtgtgagtctcctgcatttagtggaggccactaatcaaatcttgatatattttctatttcttttatttatttattcatttaattcatcaagtcaagatggctataattagagcagattactcctaccacattgtattatgatgatctcttcatgtttttttgtttcatactatatgatattcattaagggtagcattgtgccatcctccatcaagcattatatgcttcctttgtgcttatgatgttgaccgtagcaaccttaaactgttaagacttgtttataaacggtgaagctccatcattccaacagagtcagcatgctaattcactctagttcaaatccacattctagttgaatccctgcaatgtaacttgacatttggagaaattgattcataccattttaaagaaatatgatataggtgacagaatccaggatgaagaggtaccttgttgcttagatgatgacgttgtggattcatttcacatctctctctctttttaatgtagctcttctccctccttggtttttattcctccctccttctttcttcttcaagcctcctctaatgttaacatctttggcagtttggccagtgttgacaactactttttgattatttggtattttaaaatatttggtattttaaaatgcttttattggccaggcgtggtggctcacaccttataatcccagtactttgggaggccgaggcgggcagatcatgaggtcgagattgagaccatcctggctaacacggtgaaaccctgtctctactaaaactacaaaaaattagctgggcatggtggcgggcgcctgtagtcccagctactcaggaggctgaggcaggagaatggcatgaacctgggaggtggagctggcagtgagccgagatcgcgccaccgcactctagcctgggtgacagagcgagactccatctc

SEQ ID NO: 9698 - protein, 55 aa, Homo sapiens
MHTAVTIPGGFKIHVNDPIQPSNCPIPGLIHLHSAVATSCRTSCILARTASPWKF

SEQ ID NO: 9699 - DNA, 388 bp, Homo sapiens
atcagtaagagaaattatctgaagtggatttgaagactcttcctttgattctagtgaagagatcctttaagaccctgagaaaacatgtggcaattctctgtgaatttggaaaggaagcattcacctatgaaagaaaatgcttccatcaggtacttcaaggttgaagaggcagaggacgagttatccacaaggaatttggaagagaagcttgtttcaaagttggatgagccatgagaacaactaccaaataaatcattgtgtggaaaagaattgatttgggaatcaattgtctgggaaagaaaatcacaaagaagtgattgtgaagacattcatttgttcttcagatatgtaactgtttaatctgaagtaaactttgggatggaaaact

SEQ ID NO: 9700 - protein, 45 aa, Homo sapiens
MLPSGTSRLKRQRTSYPQGIWKRSLFQSWMSHENNYQINHCVEKN

SEQ ID NO: 9701 - DNA, 3090 bp, Homo sapiens
atgggaactggggggagcaaagagtggggaactgggcaggcagacacccccacagagcactcatggcccccacagaaatacacccacactcatcacagcaaaccaaaacaatcacacgccggtacacaaacacacacacccccgcaccaatccaggcagacacaaagctcacggcgacaggcagatctgattcacacagacacaggcacaggtgcttcctgatgccaccctctcttggtcacgtgccagcacttggagggaggaaagtgcctcaccaggctgagatgcccaagggaccccccagggagggaaagcaggacacactgggacagttgcttccagccctgtccacacccttgtgcccatcaggtatgccgctcacccccaccccacctggaccttggtgtcacctaggattgcagaggccgccttcagcccagagcctggggccttgcccactgcctcacctcccaggatagggcatgctgttcctttctccttccctttctttgctcttgtgtgcctgcctttagcaaacgcccactgggtgtgtgggtacactgcggcctttaaagagaagagaaacacatgaggcttacagcaggaggccctgcctaggttccaagggacatggagcagggtggctgtgtagagctggggagcatcccaagcctgtgccaaggttccaaggacaaaaagggcaaggaggcccagtgcggggtggtgggggagcagctagccagggccaacagtgagcctcgcgcctgggcaggtgtagcctttaaacgcggtgggggaaccatggacagcatctaagcagggacgtgccgtgagtcctgggggtgcaggggtgtctagaggggaagctgggaagcaggggtcacagctttccgactggtggctgagtgtggggaagacaggaggggcaggtgtgagatgtacagcagacacagctgtgtgctggggcatggtgggctgtggtgagagagaggagcaggtcttctccccgcgtgttcagagcagatccaaactcttctcccattccttcctccaccgtgcatcctcagcacccctcagcactggcctgtgtgggcagcgtgagcacagagagcaggagcttgccctcagaggcttcagggggtcgcttgtacccagtggtatggtcagcatcatgtttgaccaaagggaggaaggtggctgtgaccagagcgagggggggtcctgatgcagctggggagtcaggctcgagtgcatgctgtgcatgttctctgcctctcttcctggggggcaggcgagtctccagagcctggaggacaagttagccttgcgaaggatagcagaggacccagcccaggggtccccaaaatggagcaccaaccctccatgcaggccaagccactggtgaatatgctgcaaaaaatatgctggaacttctatgaataccacagggtgtgagaagaaaacattagaacttctattttgtacctgtgttactccacaacaagaaagcaatcagcttgatcaatgcctactgtaaagacggcaccgccctccggaggtcctttctcagccctggtgttcggacagccacatcccctcgcagcagggggaggcctgaagcatagaggggcccatgcaggtctattctgtttcagcgaattgcctgggaaataatccaggatccatttcgtgtggtcatcttgtctccctggtcccctccagcctttcctcatcttttgtgacctggtcactctggaagggcgctggccagttagtccacaggatgggcctcccctggggcttttctgatgcttccttatgatggcactggcatcctgagggggaggaccacagagaggaggtgctcctcatcacaccacatgggggtccatgcaccagtgccactgctttccagggctcttcaccttcatcactggtggaggtggcgtctgccaagaagcagaaagttgaggcttagaaggtgcacggccctacctcttccgaggtgcccctgcgggctgtctacagaccaggcagcacatgcctgatagcagctgcataaggaaaagcaggagccagctcgtgcacagtggcctcaagtgtgcactgggcatgttctctgcctcaccatccctgtgtgacagatgaagcatgacagccctcaacagaagccaaggccaagtcctcgaacttcctagtctgcacaatgtctgtctttcagacacttctgatgaaactgaaaatgccaccagggagaagcagctgaacttcaaggaccacagagggccaagtgcaggagtaagaggctggcgtgctgacagtggccaagggcattggagggaaggacctgtcatcactgggccaaggaaggaactccagactgcctacttccagagggcctgctgaggaattttagcttgaacttgcctgccttgactagggctttctgagcagcagatgattctgcaatggtgttagtccaggcctggttctgcatgacattgaccatactgtgcaccctggggtcattatgtcttgggcttcaaggggctccatgggctccagggggctccatgtgacactgcacagagctctctctaggtcacctggatgtgtctcttcctaggaaccccaaagagctctctcaacaaacacacccacgagttccaggagtgaggctgcagggaacagcctcactctcagaggggatacagaattgttccactggacaagggctgggatcgtcataggatgccgttggcctgtggtttccaacagaggtgcagttcattgaactgtggtctacagtccattctctaacttggggacccttgaagaagtgtggaatcatgacaacaaccctgttgggagacactattattcccatcacatggatgagcacacggaggcaaaaggaagttatatgattgtctgagatcacccagtgaagactgtgtggctgggagttgtccccagtgttatctgcacgctgcttccttttgatgcctggcccttctttatcaaaagaagcattggcagaatctgggtgtttatgggtcagctcaaaataaattactttatatgtcattc

SEQ ID NO: 9702 - protein, 84 aa, Homo sapiens
MTALNRSQGQVLELPSLHNVCLSDTSDETENATREKQLNFKDHRGPSAGVRGWRADSGQGHWREGPVITGPRKELQTAYFQRAC

SEQ ID NO: 9703 - DNA, 692 bp, Homo sapiens
cccggtctagtagggagggcttcctggagtagggacagccacattcatcccggctgtggactgaactgtgtccccttcagatgtcatatgttgaagcccttgcctccactgtgactgcatttggagactgggcctatcaggagataagagatcacatggagacacagcaagaaggcagctgtctgcagccaggaagagagccctcagcagaacctgcgcctgccagcaccatggtcttggactcccagtctccagaactatgagaaactgtaagtcagagttaagactggagcccaggccatctccctccaccacccacacctgacatccgcacactgcgcttcctgcatggtggacagtgcctgcctgctcacaactgggaccactgcctcctctgcttctctgtagccctggccctagctcgtggaaggagcaacagggccatatttgagtttcagagcactgctcaggggggcagaaggcagggtcagattcttctggaagaggtcggaggtttcccagccagaacaaaactgggatgagaagctggggttcctcccacccctctccaggacctgtgaatgtccctcccctgtggagctggaaagccagcccgaaggcacctgccccgtgggaggacacacccctgagcctggatgcctcatctcctgcagctttggaattctagcccc

SEQ ID NO: 9704 - protein, 60 aa, Homo sapiens
MSYVEALASTVTAFGDWAYQEIRDHMETQQEGSCLQPGREPSAEPAPASTMVLDSQSPEL

SEQ ID NO: 9705 - DNA, 1227 bp, Homo sapiens
aatgcagaggtgggggacagagtgggtggggaggggagccgccatacagtggccaggaccagctttgcccaagtggtggcaaccgcatgaccacaggaacgatggcgccaagccactggtgaatatgctgcaaaaaatatgctggaacttctatgaataccacagggtgtgagaagaaaacattagaacttctattttgtacctgtgttactccacaacaagaaagcaatcagcttgatcaatgcctactgtaaagacggcaccgccctccggaggtcctttctcagccctggtgttcggacagccacatcccctcgcagcagggggaggcctgaagcatagaggggcccatgcaggtctattctgtttcagcgaattgcctgggaaataatccaggatccatttcgtgtggtcatcttgtctccctggtcccctccagcctttcctcatcttttgtgacctggtcactctggaagggcgctggccagttagtccacaggatgggcctcccctggggcttttctgatgcttccttatgatggcactggcatcctgagggggaggaccacagagaggaggtgctcctcatcacaccacatgggggtccatgcaccagtgccactgctttccagggctcttcaccttcatcactggtggaggtggcgtctgccaagaagcagaaagttgaggcttagaaggtgcacggccctacctcttccgaggtgcccctgcgggctgtctacagaccaggcagcacatgcctgatagcagctgcataaggaaaagcaggagccagctcgtgcacagtggcctcaagtaagccaaggccaagtcctcgaacttcctagtctgcacaatgtctgtctttcagacacttctgatgaaactgaaaatgccaccagggagaagcagctgaaataacacttgtgctgaggtcgctgagccactgtggaagacatccaagctccataaagacaggtcaagtgcacatgctccagtcaacagcccagctgagccctcagcatacagccaacaccaactgcaagctgagggtgaaacaacttggatgtccatttggatgtcaagctggacttcagatgcctgtggttgcagctctgtctgcaactacatggaagacgccatgtgaaccacctagtagagcccttcctagaattgttggccctcagactctacatgcatatcaaaatgaatgttgtttgaagccat

SEQ ID NO: 9706 - protein, 79 aa, Homo sapiens
MLPYDGTGILRGRTTERRCSSSHHMGVHAPVPLLSRALHLHHWWRWRLPRSRKLRLRRCTALPLPRCPCGLSTDQAAHA

SEQ ID NO: 9707 - DNA, 226 bp, Homo sapiens
gtctgtctttcagacacttctgatgaaactgaaaatgccaccagggagaagcagctgaagaggatttttttttgtttcaccccagcaatgtgagagatagaatggatgccctaaagaagaggatgcagcagaaattaggaagagataaagaagagcaacattccttaagaaatgccctatggttgggaatggccatttcatgttagaaacaaaggtgataatattc

SEQ ID NO: 9708 - protein, 34 aa, Homo sapiens
MDALKKRMQQKLGRDKEEQHSLRNALWLGMAISC

SEQ ID NO: 9709 - DNA, 420 bp, Homo sapiens
gtgaccggggtcctgcccaagggtcctgcttccctaggcatcccagaagttcagcctgcatctcgaccagagcctgagagtagacacctgccggtttatctgtcccttcatgtagcaggtgacagaggtgccaggggcatggcaggggtactctgacacagcactgccccacggagcccatgtcccagggcagaagacccacgatgcacagccagccaggtggcctcatccgatcagtcaaaggcctcaatagaaccaagactgacctctgccaaagagagaattctttcagcagacggccttcggacttgagctatgacggcaactcttccccgggcccacctgacggactgggtttctcagcctccacagtcgtgtgagccaattccgtaagataaatctctctctcttctctctcaa

SEQ ID NO: 9710 - protein, 66 aa, Homo sapiens
MSQGRRPTMHSQPGGLIRSVKGLNRTKTDLCQRENSFSRRPSDLSYDGNSSPGPPDGLGFSASTVV

SEQ ID NO: 9711 - DNA, 1870 bp, Homo sapiens
gccttgcacatggagatgcttagctgagggggtggctttgttagactatttgcaggtcgtgagatagagcctgagatgggggactgggcccctgcctgggggattgggtcgtgacctgtgtggagccccacactgagctgcagtgggtggggagggtggtttacaggggtgctctgtgcagcccctctgattttcccctgggagtcccaggtccaggggaaggaggacagtggcccaggccacacagctcactgggcggctctcactcccccagggctggctgctggcgggatggacaccctggaggaggtgacttgggccaatgggagcacagcgctacccccacccctggcaccaaacatcagtgtgcctcatcgctgcctgctgctgctctacgaagacattggcacctccagggtccggtactgggacctcttgctgctcatccccaatgtgctcttcctcatcttcctgctctggaagcttccatctgctcgggcgaagatccgcatcacctccagccccatttttatcaccttctacatcctggtgtttgtggtggcgctggtgggcattgcccgggccgtggtatccatgacggtgagcacctcgaacgctgcaactgttgctgataagatcctgtgggagatcacccgcttcttcctgctggccatcgagctgagtgtgatcatcctgggcctggcctttggccacctggagagtaagtccagcatcaagcgggtgctggccatcaccacagtgctgtccctggcctactctgtcacccaggggaccctggagatcctgtaccctgatgcccatctctcagctgaggactttaatatctatggccatgggggccgccagttctggctggtcagctcctgcttcttcttcctggtctactctctggtggtcatccttcccaagaccccgctgaaggagcgcatctccctgccttctcggaggagcttctacgtgtatgcgggcatcctggcactgctcaacctactgcaggggctggggagtgtgctgctgtgcttcgacatcatcgaggggctctgctgtgtagatgccacaaccttcctgtacttcagcttcttcgctccgctcatctacgtggctttcctccggggcttcttcggctcggagcccaagatcctcttctcctacaaatgccaagtggacgagacagaggagccagatgtacacctaccccagccctacgctgtggcccggcgggagggcctggaggctgcaggggctgctggggcctcagctgccagctactcgagcacgcagttcgactctgccggcggggtggcctacctggatgacatcgcttccatgccctgccacactggcagcatcaacagcacagacagcgagcgctggaaggccatcaatgcctgagggcagctgccagggcctgtggaggacaggccagagaggaggccagcaggcccagagtccccaggggaggaggaccaggtcaagggacgttctgtgggcagtagccctgtgtggccctgttcccaccatgagtctggaggccccacctccctggggctcccaatcccctttgccatctctgctctcactggggaccctcctccccttcccacctgctctcatactgctcagtgacatggcccaggctttccttccagggccatgcttggcaaggttggctgagggcaccctccttctctgcacccttggcacgagggcagggctggctctcccaatgcctccatcccatccccatggtgctttggcctcctcaaagcatccaccatggtggatggactgaagtgtgtatattttcttgatctattttttaataaaaaggaaaaggagcagaaggtgc

SEQ ID NO: 9712 - protein, 373 aa, Homo sapiens
MDTLEEVTWANGSTALPPPLAPNISVPHRCLLLLYEDIGTSRVRYWDLLLLIPNVLFLIFLLWKLPSARAKIRITSSPIFITFYILVFVVALVGIARAVVSMTVSTSNAATVADKILWEITRFFLLAIELSVIILGLAFGHLESKSSIKRVLAITTVLSLAYSVTQGTLEILYPDAHLSAEDFNIYGHGGRQFWLVSSCFFFLVYSLVVILPKTPLKERISLPSRRSFYVYAGILALLNLLQGLGSVLLCFDIIEGLCCVDATTFLYFSFFAPLIYVAFLRGFFGSEPKILFSYKCQVDETEEPDVHLPQPYAVARREGLEAAGAAGASAASYSSTQFDSAGGVAYLDDIASMPCHTGSINSTDSERWKAINA

SEQ ID NO: 9713 - DNA, 1956 bp, Homo sapiens
gagtgataacagggactctgggactctgggacttgtgggactgtggccgttttcgcaatttgggctggacgaaaaagacggtcttgctttcccggtcgccgctgtcgggaagggctgcagggtgtccgcgagacccgcggcccggcgagctgaccccgcctcgcctttcctgcctagccctcattccacggagccggtcgcgcccggtccttgcgcgacgcttcccggcccaggccgcctggtctggcgctggaggccggagtcccgcggcctgtgctggatccgcgcacacccagtggcggcggatgggcggccggggcggccggggcggccggtcctgagcgcggcccgggctgtcagggctggctgctggcgggatggacaccctggaggaggtgacttgggccaatgggagcacagcgctacccccacccctggcaccaaacatcagtgtgcctcatcgctgcctgctgctgctctacgaagacattggcacctccagggtccggtactgggacctcttgctgctcatccccaatgtgctcttcctcatcttcctgctctggaagcttccatctgctcgggcgaagatccgcatcacctccagccccatttttatcaccttctacatcctggtgtttgtggtggcgctggtgggcattgcccgggccgtggtatccatgacggtgagcacctcgaacgctgcaactgttgctgataagatcctgtgggagatcacccgcttcttcctgctggccatcgagctgagtgtgatcatcctgggcctggcctttggccacctggagagtaagtccagcatcaagcgggtgctggccatcaccacagtgctgtccctggcctactctgtcacccaggggaccctggagatcctgtaccctgatgcccatctctcagctgaggactttaatatctatggccatgggggccgccagttctggctggtcagctcctgcttcttcttcctggtctactctctggtggtcatccttcccaagaccccgctgaaggagcgcatctccctgccttctcggaggagcttctacgtgtatgcgggcatcctggcactgctcaacctactgcaggggctggggagtgtgctgctgtgcttcgacatcatcgaggggctctgctgtgtagatgccacaaccttcctgtacttcagcttcttcgctccgctcatctacgtggctttcctccggggcttcttcggctcggagcccaagatcctcttctcctacaaatgccaagtggacgagacagaggagccagatgtacacctaccccagccctacgctgtggcccggcgggagggcctggaggctgcaggggctgctggggcctcagctgccagctactcgagcacgcagttcgactctgccggcggggtggcctacctggatgacatcgcttccatgccctgccacactggcagcatcaacagcacagacagcgagcgctggaaggccatcaatgcctgagggcagctgccagggcctgtggaggacaggccagagaggaggccagcaggcccagagtccccaggggaggaggaccaggtcaagggacgttctgtgggcagtagccctgtgtggccctgttcccaccatgagtctggaggccccacctccctggggctcccaatcccctttgccatctctgctctcactggggaccctcctccccttcccacctgctctcatactgctcagtgacatggcccaggctttccttccagggccatgcttggcaaggttggctgagggcaccctccttctctgcacccttggcacgagggcagggctggctctcccaatgcctccatcccatccccatggtgctttggcctcctcaaagcatccaccatggtggatggactgaagtgtgtatattttcttgatctattttttaataaaaaggaaaaggagcagaaggtgc

SEQ ID NO: 9714 - protein, 373 aa, Homo sapiens; identical to SEQ ID NO: 9712

SEQ ID NO: 9715 - DNA, 1792 bp, Homo sapiens
gagtgataacagggactctgggactctgggacttgtgggactgtggccgttttcgcaatttgggctggacgaaaaagacggtcttgctttcccggtcgccgctgtcgggaagggctgcagggtgtccgcgagacccgcggcccggcgagctgaccccgcctcgcctttcctgcctagccctcattccacggagccggtcgcgcccggtccttgcgcgacgcttcccggcccaggccgcctggtctggcgctggaggccggagtcccgcggcctgtgctggatccgcgcacacccagtggcggcggatgggcggccggggcggccggggcggccggtcctgagcgcggcccgggctgtcagggctggctgctggcgggatggacaccctggaggaggtgacttgggccaatgggagcacagcgctacccccacccctggcaccaaacatcagtgtgcctcatcgctgcctgctgctgctctacgaagacattggcacctccagggtccggtactgggacctcttgctgctcatccccaatgtgctcttcctcatcttcctgctctggaagcttccatctgctcgggcgaagatccgcatcacctccagccccatttttatcaccttctacatcctggtgtttgtggtggcgctggtgggcattgcccgggccgtggtatccatgacggtgagcacctcgaacgctgcaactgttgctgataagatcctgtgggagatcacccgcttcttcctgctggccatcgagctgagtgtgatcatcctgggcctggcctttggccacctggagagtaagtccagcatcaagcgggtgctggccatcaccacagtgctgtccctggcctactctgtcacccaggggaccctggagatcctgtaccctgatgcccatctctcagctgaggactttaatatctatggccatgggggccgccagttctggctggtcagctcctgcttcttcttcctgctgtgtagatgccacaaccttcctgtacttcagcttcttcgctccgctcatctacgtggctttcctccggggcttcttcggctcggagcccaagatcctcttctcctacaaatgccaagtggacgagacagaggagccagatgtacacctaccccagccctacgctgtggcccggcgggagggcctggaggctgcaggggctgctggggcctcagctgccagctactcgagcacgcagttcgactctgccggcggggtggcctacctggatgacatcgcttccatgccctgccacactggcagcatcaacagcacagacagcgagcgctggaaggccatcaatgcctgagggcagctgccagggcctgtggaggacaggccagagaggaggccagcaggcccagagtccccaggggaggaggaccaggtcaagggacgttctgtgggcagtagccctgtgtggccctgttcccaccatgagtctggaggccccacctccctggggctcccaatcccctttgccatctctgctctcactggggaccctcctccccttcccacctgctctcatactgctcagtgacatggcccaggctttccttccagggccatgcttggcaaggttggctgagggcaccctccttctctgcacccttggcacgagggcagggctggctctcccaatgcctccatcccatccccatggtgctttggcctcctcaaagcatccaccatggtggatggactgaagtgtgtatattttcttgatctattttttaataaaaaggaaaaggagcagaaggtgc

SEQ ID NO: 9716 - protein, 293 aa, Homo sapiens
MDTLEEVTWANGSTALPPPLAPNISVPHRCLLLLYEDIGTSRVRYWDLLLLIPNVLFLIFLLWKLPSARAKIRITSSPIFITFYILVFVVALVGIARAVVSMTVSTSNAATVADKILWEITRFFLLAIELSVIILGLAFGHLESKSSIKRVLAITTVLSLAYSVTQGTLEILYPDAHLSAEDFNIYGHGGRQFWLVSSCFFFLLCRCHNLPVLQLLRSAHLRGFPPGLLRLGAQDPLLLQMPSGRDRGARCTPTPALRCGPAGGPGGCRGCWGLSCQLLEHAVRLCRRGGLPG

SEQ ID NO: 9717 - DNA, 1013 bp, Homo sapiens
gtcccccctttctcacctgccaggtcttgtggggaggggatcagcctcccacctgggtgaagctgggagagggccagactggtccatggccccagcttggatctttgcacacaatttctcccctgagcctcaggctcctttttgtaaattgggtgtagtgtgtcccccttggagagttgccctgagggccgagggacgaggtcagagtggagtgggtggtaacatgagcagcaggggtcacaggagtgggggcggaggccacagccaatgtctcctgagtgcttgggcaggcactgttgaagcctcatgatttatgtccattcttcctccacacggtgtccacacacccatttcaccatgaggaagcaggcacagatgccccccgcctgagctcacacagccagggggaggagggctgggttccaaaacaagtctagatgggctctggggtccagctcacaggcccactcagagtgggtgtcaggcgactgttggtcaattccttccttatctggtggccccatcagcctggagaggaaggctcttcctgaatcactcagtgaggcttccatgcccctcttttccttttatcagctcggagcccaagatcctcttctcctacaaatgccaagtggacgagacagaggagccagatgtacacctaccccagccctacgctgtggcccggcgggagggcctggaggctgcaggggctgctggggcctcagctgccagctactcgagcacgcagttcgactctgccggcggggtggcctacctggatgacatcgcttccatgccctgccacactggcagcatcaacagcacagacagcgagcgctggaaggccatcaatgcctgagggcagctgccagggcctggcagggctggctctcccaatgcctccatcccatccccatggtgctttggcctcctcaaagcatccaccatggtggatggactgaagtgtgtatattttcttgatctattttttaataaaaaggaaaaggagc

SEQ ID NO: 9718 - protein, 103 aa, Homo sapiens
MYTYPSPTLWPGGRAWRLQGLLGPQLPATRARSSTLPAGWPTWMTSLPCPATLAASTAQTASAGRPSMPEGSCQGLAGLALPMPPSHPHGALASSKHPPWWMD

SEQ ID NO: 9719 - DNA, 882 bp, Homo sapiens
tggccgttttcgcaatttgggctggacgaaaaagacggtcttgctttcccggtcgccgctgtcgggaagggctgcagggtgtccgcgagacccgcggcccggcgagctgaccccgcctcgcctttcctgcctagccctcattccacggagccggtcgcgcccggtccttgcgcgacgcttcccggcccaggccgcctggtctggcgctggaggccggagtcccgcggcctgtgctggatccgcgcacacccagtggcggcggatgggcggccggggcggccggggcggccggtcctgagcgcggcccgggctgtcagggctggctgctggcgggatggacaccctggaggaggtgacttgggccaatgggagcacagcgctacccccacccctggcaccaaacatcagtgtgcctcatcgctgcctgctgctgctctacgaagacattggcacctccagggtccggtactgggacctcttgctgctcatccccaatgtgctcttcctcatcttcctgctctggaagcttccatctgctcgggcgaagatccgcatcacctccagccccatttttatcaccttctacatcctggtgtttgtggtggcgctggtgggcattgcccgggccgtggtatccatgacggtgagcacctcgaacgctgcaactgttgctgataagatcctgtgggagatcacccgcttcttcctgctggccatcgagctgagtgtgatcatcctgggcctggcctttggtgtgtgtaccgctgggctcttgggccctggcgatgctctcccctgcccctccctggctgtgggctgactctggagtggtcacctgggctggctcctgcctgctgaccagcatgtttcttccaggccacc

SEQ ID NO: 9720 - protein, 161 aa, Homo sapiens
MDTLEEVTWANGSTALPPPLAPNISVPHRCLLLLYEDIGTSRVRYWDLLLLIPNVLFLIFLLWKLPSARAKIRITSSPIFITFYILVFVVALVGIARAVVSMTVSTSNAATVADKILWEITRFFLLAIELSVIILGLAFGVCTAGLLGPGDALPCPSLAVG

SEQ ID NO: 9721 - DNA, 3455 bp, Homo sapiens
gtcacgtgaaccacttttcgcgcgaaacctggttgttgctgtagtggcggagaggatcgtggtactgctatggcggaatcatcggaatccttcaccatggcatccagcccggcccagcgtcggcgaggcaatgatcctctcacctccagccctggccgaagctcccggcgtactgatgccctcacctccagccctggccgtgaccttccaccatttgaggatgagtccgaggggctcctaggcacagaggggcccctggaggaagaagaggatggagaggagctcattggagatggcatggaaagggactaccgcgccatcccagagctggacgcctatgaggccgagggactggctctggatgatgaggacgtagaggagctgacggccagtcagagggaggcagcagagcgggccatgcggcagcgtgaccgggaggctggccggggcctgggccgcatgcgccgtgggctcctgtatgacagcgatgaggaggacgaggagcgccctgcccgcaagcgccgccaggtggagcgggccacggaggacggcgaggaggacgaggagatgatcgagagcatcgagaacctggaggatctcaaaggccactctgtgcgcgagtgggtgagcatggcgggcccccggctggagatccaccaccgcttcaagaacttcctgcgcactcacgtcgacagccacggccacaacgtcttcaaggagcgcatcagcgacatgtgcaaagagaaccgtgagagcctggtggtgaactatgaggacttggcagccagggagcacgtgctggcctacttcctgcctgaggcaccggcggagctgctgcagatctttgatgaggctgccctggaggtggtactggccatgtaccccaagtacgaccgcatcaccaaccacatccatgtccgcatctcccacctgcctctggtggaggagctgcgctcgctgaggcagctgcatctgaaccagctgatccgcaccagtggggtggtgaccagctgcactggcgtcctgccccagctcagcatggtcaagtacaactgcaacaagtgcaatttcgtcctgggtcctttctgccagtcccagaaccaggaggtgaaaccaggctcctgtcctgagtgccagtcggccggcccctttgaggtcaacatggaggagaccatctatcagaactaccagcgtatccgaatccaggagagtccaggcaaagtggcggctggccggctgccccgctccaaggacgccattctcctcgcagatctggtggacagctgcaagccaggagacgagatagagctgactggcatctatcacaacaactatgatggctccctcaacactgccaatggcttccctgtctttgccactgtcatcctagccaaccacgtggccaagaaggacaacaaggttgctgtaggggaactgaccgatgaagatgtgaagatgatcactagcctctccaaggatcagcagatcggagagaagatctttgccagcattgctccttccatctatggtcatgaagacatcaagagaggcctggctctggccctgttcggaggggagcccaaaaacccaggtggcaagcacaaggtacgtggtgatatcaacgtgctcttgtgcggagaccctggcacagcgaagtcgcagtttctcaagtatattgagaaagtgtccagccgagccatcttcaccactggccagggggcgtcggctgtgggcctcacggcgtatgtccagcggcaccctgtcagcagggagtggaccttggaggctggggccctggttctggctgaccgaggagtgtgtctcattgatgaatttgacaagatgaatgaccaggacagaaccagcatccatgaggccatggagcaacagagcatctccatctcgaaggctggcatcgtcacctccctgcaggctcgctgcacggtcattgctgccgccaaccccataggagggcgctacgacccctcgctgactttctctgagaacgtggacctcacagagcccatcatctcacgctttgacatcctgtgtgtggtgagggacaccgtggacccagtccaggacgagatgctggcccgcttcgtggtgggcagccacgtcagacaccaccccagcaacaaggaggaggaggggctggccaatggcagcgctgctgagcccgccatgcccaacacgtatggcgtggagcccctgccccaggaggtcctgaagaagtacatcatctacgccaaggagagggtccacccgaagctcaaccagatggaccaggacaaggtggccaagatgtacagtgacctgaggaaagaatctatggcgacaggcagcatccccattacggtgcggcacatcgagtccatgatccgcatggcggaggcccacgcgcgcatccatctgcgggactatgtgatcgaagacgacgtcaacatggccatccgcgtgatgctggagagcttcatagacacacagaagttcagcgtcatgcgcagcatgcgcaagacttttgcccgctacctttcattccggcgtgacaacaatgagctgttgctcttcatactgaagcagttagtggcagagcaggtgacatatcagcgcaaccgctttggggcccagcaggacactattgaggtccctgagaaggacttggtggataaggctcgtcagatcaacatccacaacctctctgcattttatgacagtgagctcttcaggatgaacaagttcagccacgacctgaaaaggaaaatgatcctgcagcagttctgaggccctatgccatccataaggattccttgggattctggtttggggtggtcagtgccctctgtgctttatggacacaaaaccagagcacttgatgaactcggggtactagggtcagggcttatagcaggatgtctggctgcacctggcatgactgtttgtttctccaagcctgctttgtgcttctcacctttgggtgggatgccttgccagtgtgtcttacttggttgctgaacatcttgccacctccgagtgctttgtctccactcagtaccttggatcagagctgctgagttcaggatgcctgcgtgtggtttaggtgttagccttcttacatggatgtcaggagagctgctgccctcttggcgtgagttgcgtattcaggctgcttttgctgcctttggccagagagctggttgaagatgtttgtaatcgttttcagtctcctgcaggtttctgtgcccctgtggtggaagagggcacgacagtgccagcgcagcgttctgggctcctcagtcgcaggggtgggatgtgagtcatgcggattatccactcgccacagttatcagctgccattgctccctgtctgtttccccactctcttatttgtgcattcggtttggtttctgtagttttaatttttaataaagttgaataaaatataaacgctggta

SEQ ID NO: 9722 - protein, 904 aa, Homo sapiens; identical to SEQ ID NO: 836

SEQ ID NO: 9723 - DNA, 3155 bp, Homo sapiens
acttttcgcgcgaaacctggttgttgctgtagtggcggagaggatcgtggtactgctatggcggaatcatcggaatccttcaccatggcatccagcccggcccagcgtcggcgaggcaatgatcctctcacctccagccctggccggggcctgggccgcatgcgccgtgggctcctgtatgacagcgatgaggaggacgaggagcgccctgcccgcaagcgccgccaggtggagcgggccacggaggacggcgaggaggacgaggagatgatcgagagcatcgagaacctggaggatctcaaaggccactctgtgcgcgagtgggtgagcatggcgggcccccggctggagatccaccaccgcttcaagaacttcctgcgcactcacgtcgacagccacggccacaacgtcttcaaggagcgcatcagcgacatgtgcaaagagaaccgtgagagcctggtggtgaactatgaggacttggcagccagggagcacgtgctggcctacttcctgcctgaggcaccggcggagctgctgcagatctttgatgaggctgccctggaggtggtactggccatgtaccccaagtacgaccgcatcaccaaccacatccatgtccgcatctcccacctgcctctggtggaggagctgcgctcgctgaggcagctgcatctgaaccagctgatccgcaccagtggggtggtgaccagctgcactggcgtcctgccccagctcagcatggtcaagtacaactgcaacaagtgcaatttcgtcctgggtcctttctgccagtcccagaaccaggaggtgaaaccaggctcctgtcctgagtgccagtcggccggcccctttgaggtcaacatggaggagaccatctatcagaactaccagcgtatccgaatccaggagagtccaggcaaagtggcggctggccggctgccccgctccaaggacgccattctcctcgcagatctggtggacagctgcaagccaggagacgagatagagctgactggcatctatcacaacaactatgatggctccctcaacactgccaatggcttccctgtctttgccactgtcatcctagccaaccacgtggccaagaaggacaacaaggttgctgtaggggaactgaccgatgaagatgtgaagatgatcactagcctctccaaggatcagcagatcggagagaagatctttgccagcattgctccttccatctatggtcatgaagacatcaagagaggcctggctctggccctgttcggaggggagcccaaaaacccaggtggcaagcacaaggtacgtggtgatatcaacgtgctcttgtgcggagaccctggcacagcgaagtcgcagtttctcaagtatattgagaaagtgtccagccgagccatcttcaccactggccagggggcgtcggctgtgggcctcacggcgtatgtccagcggcaccctgtcagcagggagtggaccttggaggctggggccctggttctggctgaccgaggagtgtgtctcattgatgaatttgacaagatgaatgaccaggacagaaccagcatccatgaggccatggagcaacagagcatctccatctcgaaggctggcatcgtcacctccctgcaggctcgctgcacggtcattgctgccgccaaccccataggagggcgctacgacccctcgctgactttctctgagaacgtggacctcacagagcccatcatctcacgctttgacatcctgtgtgtggtgagggacaccgtggacccagtccaggacgagatgctggcccgcttcgtggtgggcagccacgtcagacaccaccccagcaacaaggaggaggaggggctggccaatggcagcgctgctgagcccgccatgcccaacacgtatggcgtggagcccctgccccaggaggtcctgaagaagtacatcatctacgccaaggagagggtccacccgaagctcaaccagatggaccaggacaaggtggccaagatgtacagtgacctgaggaaagaatctatggcgacaggcagcatccccattacggtgcggcacatcgagtccatgatccgcatggcggaggcccacgcgcgcatccatctgcgggactatgtgatcgaagacgacgtcaacatggccatccgcgtgatgctggagagcttcatagacacacagaagttcagcgtcatgcgcagcatgcgcaagacttttgcccgctacctttcattccggcgtgacaacaatgagctgttgctcttcatactgaagcagttagtggcagagcaggtgacatatcagcgcaaccgctttggggcccagcaggacactattgaggtccctgagaaggacttggtggataaggctcgtcagatcaacatccacaacctctctgcattttatgacagtgagctcttcaggatgaacaagttcagccacgacctgaaaaggaaaatgatcctgcagcagttctgaggccctatgccatccataaggattccttgggattctggtttggggtggtcagtgccctctgtgctttatggacacaaaaccagagcacttgatgaactcggggtactagggtcagggcttatagcaggatgtctggctgcacctggcatgactgtttgtttctccaagcctgctttgtgcttctcacctttgggtgggatgccttgccagtgtgtcttacttggttgctgaacatcttgccacctccgagtgctttgtctccactcagtaccttggatcagagctgctgagttcaggatgcctgcgtgtggtttaggtgttagccttcttacatggatgtcaggagagctgctgccctcttggcgtgagttgcgtattcaggctgcttttgctgcctttggccagagagctggttgaagatgtttgtaatcgttttcagtctcctgcaggtttctgtgcccctgtggtggaagagggcacgacagtgccagcgcagcgttctgggctcctcagtcgcaggggtgggatgtgagtcatgcggattatccactcgccacagttatcagctgccattgctccctgtctgtttccccactctcttatttgtgcattcggtttggtttctgtagttttaatttttaataaagttgaataaaatataaacgctggta

SEQ ID NO: 9724 - protein, 808 aa, Homo sapiens
MAESSESFTMASSPAQRRRGNDPLTSSPGRGLGRMRRGLLYDSDEEDEERPARKRRQVERATEDGEEDEEMIESIENLEDLKGHSVREWVSMAGPRLEIHHRFKNFLRTHVDSHGHNVFKERISDMCKENRESLVVNYEDLAAREHVLAYFLPEAPAELLQIFDEAALEVVLAMYPKYDRITNHIHVRISHLPLVEELRSLRQLHLNQLIRTSGVVTSCTGVLPQLSMVKYNCNKCNFVLGPFCQSQNQEVKPGSCPECQSAGPFEVNMEETIYQNYQRIRIQESPGKVAAGRLPRSKDAILLADLVDSCKPGDEIELTGIYHNNYDGSLNTANGFPVFATVILANHVAKKDNKVAVGELTDEDVKMITSLSKDQQIGEKIFASIAPSIYGHEDIKRGLALALFGGEPKNPGGKHKVRGDINVLLCGDPGTAKSQFLKYIEKVSSRAIFTTGQGASAVGLTAYVQRHPVSREWTLEAGALVLADRGVCLIDEFDKMNDQDRTSIHEAMEQQSISISKAGIVTSLQARCTVIAAANPIGGRYDPSLTFSENVDLTEPIISRFDILCVVRDTVDPVQDEMLARFVVGSHVRHHPSNKEEEGLANGSAAEPAMPNTYGVEPLPQEVLKKYIIYAKERVHPKLNQMDQDKVAKMYSDLRKESMATGSIPITVRHIESMIRMAEAHARIHLRDYVIEDDVNMAIRVMLESFIDTQKFSVMRSMRKTFARYLSFRRDNNELLLFILKQLVAEQVTYQRNRFGAQQDTIEVPEKDLVDKARQINIHNLSAFYDSELFRMNKFSHDLKRKMILQQF

SEQ ID NO: 9725 - DNA, 1744 bp, Homo sapiens
aagaacccaggctctgtcacccactgtgttcttggtttttcctcctggggaagcagttatgctttctgtctaaattaggctattttgggccctggttagggtaagctctttgctgtctcagacagcaggtgctaagtacccacctatgtcttcctcttccactgccctcatccccttctgccatcagagcagcctggggtccctgagatgggaggataggggaatccaccctgatggaggtgctcccctgtgtttcaggagggcgctacgacccctcgctgactttctctgagaacgtggacctcacagagcccatcatctcacgctttgacatcctgtgtgtggtgagggacaccgtggacccagtccaggacgagatgctggcccgcttcgtggtgggcagccacgtcagacaccaccccagcaacaaggaggaggaggggctggccaatggcagcgctgctgagcccgccatgcccaacacgtatggcgtggagcccctgccccaggaggtcctgaagaagtacatcatctacgccaaggagagggtccacccgaagctcaaccagatggaccaggacaaggtggccaagatgtacagtgacctgaggaaagaatctatggcgacaggcagcatccccattacggtgcggcacatcgagtccatgatccgcatggcggaggcccacgcgcgcatccatctgcgggactatgtgatcgaagacgacgtcaacatggccatccgcgtgatgctggagagcttcatagacacacagaagttcagcgtcatgcgcagcatgcgcaagacttttgcccgctacctttcattccggcgtgacaacaatgagctgttgctcttcatactgaagcagttagtggcagagcaggtgacatatcagcgcaaccgctttggggcccagcaggacactattgaggtccctgagaaggacttggtggataaggctcgtcagatcaacatccacaacctctctgcattttatgacagtgagctcttcaggatgaacaagttcagccacgacctgaaaaggaaaatgatcctgcagcagttctgaggccctatgccatccataaggattccttgggattctggtttggggtggtcagtgccctctgtgctttatggacacaaaaccagagcacttgatgaactcggggtactagggtcagggcttatagcaggatgtctggctgcacctggcatgactgtttgtttctccaagcctgctttgtgcttctcacctttgggtgggatgccttgccagtgtgtcttacttggttgctgaacatcttgccacctccgagtgctttgtctccactcagtaccttggatcagagctgctgagttcaggatgcctgcgtgtggtttaggtgttagccttcttacatggatgtcaggagagctgctgccctcttggcgtgagttgcgtattcaggctgcttttgctgcctttggccagagagctggttgaagatgtttgtaatcgttttcagtctcctgcaggtttctgtgcccctgtggtggaagagggcacgacagtgccagcgcagcgttctgggctcctcagtcgcaggggtgggatgtgagtcatgcggattatccactcgccacagttatcagctgccattgctccctgtctgtttccccactctcttatttgtgcattcggtttggtttctgtagttttaatttttaataaagttgaataaaatataaacgctggta

SEQ ID NO: 9726 - protein, 279 aa, Homo sapiens [sequence omitted]

SEQ ID NO: 9727 - DNA, 559 bp, Homo sapiens
tttatattttattcaactttattaaaaattaaaactacagaaaccaaaccgaatgcacaaataagagagtggggaaacagacagggagcaatggcagctgataactgtggcgagtggataatccgcatgactcacatcccacccctgcgactgaggagcccagaacgctgcgctggcactgtcgtgccctcttccaccacaggggcacagaaacctgcaggagactgaaaacgattacaaacatcttcaaccagctctctggccaaaggcagcaaaagcagcctgaatacgcaactcacgccaagagggcagcagctctcctgacatccatgtaagaaggctaacacctaaaccacacgcaggcatcctgaactcagcagctctgatccaaggtactgagtggagacaaagcactcggaggtggcaagatgttcagcaaccaaccagacatcctgctataagccctgaccctagtaccccgagttcatcaagtgctctggttttgtgtccataaagcacagagggcactgaccaccccaaaccagaatcccaaggaatc

SEQ ID NO: 9728 - protein, 45 aa, Homo sapiens
MAADNCGEWIIRMTHIPPLRLRSPERCAGTVVPSSTTGAQKPAGD

SEQ ID NO: 9729 - DNA, 1980 bp, Homo sapiens
cggcccctgacgcgggcccgggcgccgcgccgctgcggctgcaggcggcgacggctacaccatgggccggctgctgcgggccgcccggctgccgccgctgctttcgccgctgctgcttctgctggttgggggagcgttcctgggtgcctgtgtggctgggtctgatgagcctggcccagagggcctcacctccacctccctgctagacctcctgctgcccactggcttggagccactggactcagaggagcctagtgagaccatgggcctgggagctgggctgggagcccctggctcaggcttccccagcgaagagaatgaagagtctcggattctgcagccaccacagtacttctgggaagaggaggaagagctgaatgactcaagtctggacctgggacccactgcagattatgtttttcctgacttaactgagaaggcaggttccattgaagacaccagccaggctcaagagctgccaaacctcccctctcccttgcccaagatgaatctggttgagcctccctggcatatgcctcccagagaggaggaagaagaggaagaggaagaggaggagagggagaaggaagaggtagagaaacaagaggaggaggaagaggaggagctgctccctgtgaatggatcccaagaagaagccaagcctcaggtccgtgacttttctctcaccagcagcagccagaccccaggggccaccaaaagcaggcatgaagactccggggaccaggcctcatcaggtgtggaggtggagagcagcatggggcccagcttgctgctgccttcagtcaccccaactacagtgactccgggggaccaggactccaccagccaagaggcagaggccacagtgctgccagctgcagggcttggggtagagttcgaggctcctcaggaagcaagcgaggaagccactgcaggagcagctggtttgtctggccagcacgaggaggtgccggccttgccttcattccctcaaaccacagctcccagtggggccgagcacccagatgaagatccccttggctctagaacctcagcctcttccccactgctcctggccctggtggaagaggtgctgccccgccatggcagtggccaccatggggcctggcacatctctctgagcaagcccagcgagaaggagcagcaccttctcatgacactggtgggcgagcagggggtggtgcccactcaagatgtcctttccatgctgggtgacatccgcaggagcctggaggagattggcatccagaactattccacaaccagcagctgccaggcgcgggccagccaggtgcgcagcgactacggcacgctcttcgtggtgctggtggtcattggggccatctgcatcatcatcattgcgcttggcctgctctacaactgctggcagcgccggctgcccaagctcaagcacgtgtcgcacggcgaggagctgcgcttcgtggagaacggctgccacgacaaccccacgctggacgtggccagcgacagccagtcggagatgcaggagaagcaccccagcctgaacggcggcggggccctcaacggcccggggagctggggggcgctcatggggggcaagcgggaccccgaggactcggacgtgttcgaggaggacacgcacctgtgagcgcagccgaggcgcaggccgagtgggccgccaggaccaagcgaggtggaccccgaaacggacggcccggagcccgcaccagccccgcgcctacccgggccgcccccgcggcctggccctcggcgcgggctccttcccgcttcccccgacttcacacggcggcttcggaccaactccctcactcccgcccgaggggcaggcctcaaagcccgccttggccccgctttcccgcccctgaaccccggccccgcgggcggcgggcggcgcttcctgcgccccgggactcaattaaacccgcccggagaccacgccgggcccagcgcgtctgc

SEQ ID NO: 9730 - protein, 529 aa, Homo sapiens [sequence omitted]

SEQ ID NO: 9731 - DNA, 2204 bp, Homo sapiens
ccctgacgcgggcccgggcgccgcgccgctgcggctgcaggcggcgacggctacaccatgggccggctgctgcgggccgcccggctgccgccgctgctttcgccgctgctgcttctgctggttgggggagcgttcctgggtgcctgtgtggctgggtctgatgagcctggcccagagggcctcacctccacctccctgctagacctcctgctgcccactggcttggagccactggactcagaggagcctagtgagaccatgggcctgggagctgggctgggagcccctggctcaggcttccccagcgaagagaatgaagagtctcggattctgcagccaccacagtacttctgggaagaggaggaagagctgaatgactcaagtctggacctgggacccactgcagattatgtttttcctgacttaactgagaaggcaggttccattgaagacaccagccaggctcaagagctgccaaacctcccctctcccttgcccaagatgaatctggttgagcctccctggcatatgcctcccagagaggaggaagaagaggaagaggaagaggaggagagggagaaggaagaggtagagaaacaagaggaggaggaagaggaggagctgctccctgtgaatggatcccaagaagaagccaagcctcaggtccgtgacttttctctcaccagcagcagccagaccccaggggccaccaaaagcaggcatgaagactccggggaccaggcctcatcaggtgtggaggtggagagcagcatggggcccagcttgctgctgccttcagtcaccccaactacagtgactccgggggaccaggactccaccagccaagaggcagaggccacagtgctgccagctgcagggcttggggtagagttcgaggctcctcaggaagcaagcgaggaagccactgcaggagcagctggtttgtctggccagcacgaggaggtgccggccttgccttcattccctcaaaccacagctcccagtggggccgagcacccagatgaagatccccttggctctagaacctcagcctcttccccactggcccctggagacatggaactgacaccttcctctgctaccttgggacaagaagatctcaaccagcagctcctagaagggcaggcagctgaagctcaatccaggataccctgggattctacgcaggtgatctgcaaggactggagcaatctggctgggaaaaactacatcattctgaacatgacagagaacatagactgtgaggtgttccggcagcaccgggggccacagctcctggccctggtggaagaggtgctgccccgccatggcagtggccaccatggggcctggcacatctctctgagcaagcccagcgagaaggagcagcaccttctcatgacactggtgggcgagcagggggtggtgcccactcaagatgtcctttccatgctgggtgacatccgcaggagcctggaggagattggcatccagaactattccacaaccagcagctgccaggcgcgggccagccaggtgcgcagcgactacggcacgctcttcgtggtgctggtggtcattggggccatctgcatcatcatcattgcgcttggcctgctctacaactgctggcagcgccggctgcccaagctcaagcacgtgtcgcacggcgaggagctgcgcttcgtggagaacggctgccacgacaaccccacgctggacgtggccagcgacagccagtcggagatgcaggagaagcaccccagcctgaacggcggcggggccctcaacggcccggggagctggggggcgctcatggggggcaagcgggaccccgaggactcggacgtgttcgaggaggacacgcacctgtgagcgcagccgaggcgcaggccgagtgggccgccaggaccaagcgaggtggaccccgaaacggacggcccggagcccgcaccagccccgcgcctacccgggccgcccccgcggcctggccctcggcgcgggctccttcccgcttcccccgacttcacacggcggcttcggaccaactccctcactcccgcccgaggggcaggcctcaaagcccgccttggccccgctttcccgcccctgaaccccggccccgcgggcggcgggcggcgcttcctgcgccccgggactcaattaaacccgcccggagaccacgccgggcccagcgcgtctgc

SEQ ID NO: 9732 - protein, 605 aa, Homo sapiens; identical to SEQ ID NO: 838

SEQ ID NO: 9733 - DNA, 377 bp, Homo sapiens
gagagcatcaacatctccagagggcaccaacagaactccctaaactgtgtacagcctcctcagagatgcatcatcagtcacgctgtcggcagcatgatctgggactcagccactaacttatctgcgcacgcagtggctccacagctatcggcccatcctaaggacatggatacacctgatgtgtgggcaatgacccagaaggtcaaatcattctacagcagacacaatcacaacaaggcttcgctgtacaggaaccagctccaggtcccagcagacagctgctcggtcggtctgctttctccaaaattgattacggcaatgataattaaagtagcctaatgaaggactttgtattgaggggagcagcagatcttgaa

SEQ ID NO: 9734 - protein, 81 aa, Homo sapiens
MIWDSATNLSAHAVAPQLSAHPKDMDTPDVWAMTQKVKSFYSRHNHNKASLYRNQLQVPADSCSVGLLSPKLITAMIIKVA

SEQ ID NO: 9735 - DNA, 784 bp, Homo sapiens
cctggtggaagaggtgctgccccgccatggcagtggccaccatggggcctggcacatctctctgagcaagcccagcgagaaggagcagcaccttctcatgacactggtgggcgagcagggggtggtgcccactcaagatgtcctttccatgctgggtgacatccgcaggagcctggaggagattggcatccagaactattccacaaccagcagctcgccggctgcccaagctcaagcacgtgtcgcacggcgaggagctgcgcttcgtggagaacggctgccacgacaaccccacgctggacgtggccagcgacagccagtcggagatgcaggagaagcaccccagcctgaacggcggcggggccctcaacggcccggggagctggggggcgctcatggggggcaagcgggaccccgaggactcggacgtgttcgaggaggacacgcacctgtgagcgcagccgaggcgcaggccgagtgggccgccaggaccaagcgaggtggaccccgaaacggacggcccggagcccgcaccagccccgcgcctacccgggccgcccccgcggcctggccctcggcgcgggctccttcccgcttcccccgacttcacacggcggcttcggaccaactccctcactcccgcccgaggggcaggcctcaaagcccgccttggccccgctttcccgcccctgaaccccggccccgcgggcggcgggcggcgcttcctgcgccccgggactcaattaaacccgcccggagaccacgccgggcccagcgcgtctgc

SEQ ID NO: 9736 - protein, 228 aa, Homo sapiens [sequence omitted]

SEQ ID NO: 9737 - DNA, 800 bp, Homo sapiens
gagcccaatgcaaccaccccagaggagccatggcaccccaggacctcagctgaggaaactggcccctcccacccctagattggcatccagaactattccacaaccagcagctgccaggcgcgggccagccaggtgcgcagcgactacggcacgctcttcgtggtgctggtggtcattggggccatctgcatcatcatcattgcgcttggcctgctctacaactgctggcagcgccggctgcccaagctcaagcacgtgtcgcacggcgaggagctgcgcttcgtggagaacggctgccacgacaaccccacgctggacgtggccagcgacagccagtcggagatgcaggagaagcaccccagcctgaacggcggcggggccctcaacggcccggggagctggggggcgctcatggggggcaagcgggaccccgaggactcggacgtgttcgaggaggacacgcacctgtgagcgcagccgaggcgcaggccgagtgggccgccaggaccaagcgaggtggaccccgaaacggacggcccggagcccgcaccagccccgcgcctacccgggccgcccccgcggcctggccctcggcgcgggctccttcccgcttcccccgacttcacacggcggcttcggaccaactccctcactcccgcccgaggggcaggcctcaaagcccgccttggccccgctttcccgcccctgaaccccggccccgcgggcggcgggcggcgcttcctgcgccccgggactcaattaaacccgcccggagaccacgccgggcccagcgcgtctgc

SEQ ID NO: 9738 - protein, 119 aa, Homo sapiens
MQPPQRSHGTPGPQLRKLAPPTPRLASRTIPQPAAARRGPARCAATTARSSWCWWSLGPSASSSLRLACSTTAGSAGCPSSSTCRTARSCASWRTAATTTPRWTWPATASRRCRRSTPA

SEQ ID NO: 9739 - DNA, 1986 bp, Homo sapiens
ggcggggcggggctgagcgtgtttacatccgccgggtgcgcggcttcgccgcccgaggtcgttcggctcgggtaccatcctccgcgccatggacaccagcgacctgttcgccagctgcaggaagggggatgtgggccgagtgcgaccatgaacccgtcctgacccaggctctgacctccttcctgcccaggtacctgctggagcagcgagacgtggaggtactatgcctgcttgtgtgggcacgaggagctggtactctaccttctggccaatggagcccgctgcgaggccaacaccttcgatggtgagcgctgcctctatggggcactgagtgaccccatccgccgggctctacgcgattacaagcaggtcacggcttcctgcaggaggcgggattactatgacgacttcttgcagcggcttctagagcagggcatccacagtgacgtggtctttgtagtacacgggaagccattccgggtgcatcgctgcgtcctgggtgcacgtagtgcctactttgccaacatgctggacaccaaatggaagggcaagagtgtcgtggttctcaggcacccactgatcaaccccgtggcctttggggccctgctgcagtacctgtacacaggccgcctggacattggcgtagagcatgtgagtgactgtgagcgcctggccaagcaatgccagctgtgggacctgctcagcgacctggaggccaagtgcgagaaggtgtctgagtttgtggcgtctaagccaggcacgtgtgtgaaggtgctgaccatcgagcccccacctgcagacccccgcctccgggaggacatggcgctgctggccgattgtgccctgccccccgagctccgaggtgatctttgggagctgcccttcccttgtcctgacggcttcaacagctgccctgacatctgcttccgagtggctggctgcagcttcctctgccacaaggcctttttctgtggccgcagtgactacttccgagccctgctggatgaccacttccgagagagcgaggagccagcgacctcagggggccccccagccgtcaccctgcatggcatctcacccgacgtcttcactcacgtgctctactacatgtacagcgaccacactgagctgtcccccgaggcagcctatgatgtgctgagcgtcgccgacatgtacctgctgccaggcctgaagaggctgtgcggccgcagcctggctcagatgctagacgaggacactgtggtgggtgtgtggcgcgtggccaagctcttccgcctggcgcggcttgaggaccagtgcactgagtacatggccaaggtcattgagaagctggtggagcgggaggacttcgtggaggcggtgaaggaggaggcagcggctgtggcagcccggcaggagacggactctatcccgctggtggacgacatccgcttccacgtggccagcacggtgcagacctacagcgccatagaggaggcgcagcagcgtctgcgggcactcgaggacctgctcgtgtccatcggtctggactgttgagcccctggctgggcagccccaggggccaggagctctcttggagacaagcatgtgtatgcgtttgtgtgcagctcttcttcctgctccctgcacattgagggcttcatggggggtgcgaggggctcagtggggcttctcttccctccatgagcctggagaccccaggggaggatccatttgggatgagccccctccccccaatgcacaagccagcccccaagaccctgggggtggacaccactcagggaaacctggggtgggggtgggctttggtcttagcactttccttctccagatcccccctacccaccccagtcccaaatccagtcctctggcccttgcctagccctgaattgcttctctaagctggtgttcccatgcacagggccattcaggaagggctgggggagtgtgtgtggcaataaagcttgaaggcaccgtgggagcatg

SEQ ID NO: 9740 - protein, 336 aa, Homo sapiens; identical to SEQ ID NO: 840

SEQ ID NO: 9741 - DNA, 1975 bp, Homo sapiens
ggcggggcggggctgagcgtgtttacatccgccgggtgcgcggcttcgccgcccgaggtcgttcggctcgggtaccatcctccgcgccatggacaccagcgacctgttcgccagctgcaggaagggggatgtgggccgagtgcggtacctgctggagcagcgagacgtggaggtgaatgtgcgggacaagtgggacagcacccccttgtactatgcctgcttgtgtgggcacgaggagctggtactctaccttctggccaatggagcccgctgcgaggccaacaccttcgatggtgagcgctgcctctatggggcactgagtgaccccatccgccgggctctacgcgattacaagcaggtcacggcttcctgcaggaggcgggattactatgacgacttcttgcagcggcttctagagcagggcatccacagtgacgtggtctttgtagtacacgggaagccattccgggtgcatcgctgcgtcctgggtgcacgtagtgcctactttgccaacatgctggacaccaaatggaagggcaagagtgtcgtggttctcaggcacccactgatcaaccccgtggcctttggggccctgctgcagtacctgtacacaggccgcctggacattggcgtagagcatgtgagtgactgtgagcgcctggccaagcaatgccagctgtgggacctgctcagcgacctggaggccaagtgcgagaaggtgtctgagtttgtggcgtctaagccaggcacgtgtgtgaaggtgctgaccatcgagcccccacctgcagacccccgcctccgggaggacatggcgctgctggccgattgtgccctgccccccgagctccgaggtgatctttgggagctgcccttcccttgtcctgacggcttcaacagctgccctgacatctgcttccgagtggctggctgcagcttcctctgccacaaggcctttttctgtggccgcagtgactacttccgagccctgctggatgaccacttccgagagagcgaggagccagcgacctcagggggccccccagccgtcaccctgcatggcatctcacccgacgtcttcactcacgtgctctactacatgtacagcgaccacactgagctgtcccccgaggcagcctatgatgtgctgagcgtcgccgacatgtacctgctgccaggcctgaagaggctgtgcggccgcagcctggctcagatgctagacgaggacactgtggtgggtgtgtggcgcgtggccaagctcttccgcctggcgcggcttgaggaccagtgcactgagtacatggccaaggtcattgagaagctggtggagcgggaggacttcgtggaggcggtgaaggaggaggcagcggctgtggcagcccggcaggagacggactctatcccgctggtggacgacatccgcttccacgtggccagcacggtgcagacctacagcgccatagaggaggcgcagcagcgtctgcgggcactcgaggacctgctcgtgtccatcggtctggactgttgagcccctggctgggcagccccaggggccaggagctctcttggagacaagcatgtgtatgcgtttgtgtgcagctcttcttcctgctccctgcacattgagggcttcatggggggtgcgaggggctcagtggggcttctcttccctccatgagcctggagaccccaggggaggatccatttgggatgagccccctccccccaatgcacaagccagcccccaagaccctgggggtggacaccactcagggaaacctggggtgggggtgggctttggtcttagcactttccttctccagatcccccctacccaccccagtcccaaatccagtcctctggcccttgcctagccctgaattgcttctctaagctggtgttcccatgcacagggccattcaggaagggctgggggagtgtgtgtggcaataaagcttgaaggcaccgtgggagcatg

SEQ ID NO: 9742 - protein, 478 aa, Homo sapiens; identical to SEQ ID NO: 842

SEQ ID NO: 9743 - DNA, 1940 bp, Homo sapiens
ggcggggcggggctgagcgtgtttacatccgccgggtgcgcggcttcgccgcccgaggtcgttcggctcgggtaccatcctccgcgccatggacaccagcgacctgttcgccagctgcaggaagggggatgtgggccgagtgcggtacctgctggagcagcgagacgtggaggtactatgcctgcttgtgtgggcacgaggagctggtactctaccttctggccaatggagcccgctgcgaggccaacaccttcgatggtgagcgctgcctctatggggcactgagtgaccccatccgccgggctctacgcgattacaagcaggtcacggcttcctgcaggaggcgggattactatgacgacttcttgcagcggcttctagagcagggcatccacagtgacgtggtctttgtagtacacgggaagccattccgggtgcatcgctgcgtcctgggtgcacgtagtgcctactttgccaacatgctggacaccaaatggaagggcaagagtgtcgtggttctcaggcacccactgatcaaccccgtggcctttggggccctgctgcagtacctgtacacaggccgcctggacattggcgtagagcatgtgagtgactgtgagcgcctggccaagcaatgccagctgtgggacctgctcagcgacctggaggccaagtgcgagaaggtgtctgagtttgtggcgtctaagccaggcacgtgtgtgaaggtgctgaccatcgagcccccacctgcagacccccgcctccgggaggacatggcgctgctggccgattgtgccctgccccccgagctccgaggtgatctttgggagctgcccttcccttgtcctgacggcttcaacagctgccctgacatctgcttccgagtggctggctgcagcttcctctgccacaaggcctttttctgtggccgcagtgactacttccgagccctgctggatgaccacttccgagagagcgaggagccagcgacctcagggggccccccagccgtcaccctgcatggcatctcacccgacgtcttcactcacgtgctctactacatgtacagcgaccacactgagctgtcccccgaggcagcctatgatgtgctgagcgtcgccgacatgtacctgctgccaggcctgaagaggctgtgcggccgcagcctggctcagatgctagacgaggacactgtggtgggtgtgtggcgcgtggccaagctcttccgcctggcgcggcttgaggaccagtgcactgagtacatggccaaggtcattgagaagctggtggagcgggaggacttcgtggaggcggtgaaggaggaggcagcggctgtggcagcccggcaggagacggactctatcccgctggtggacgacatccgcttccacgtggccagcacggtgcagacctacagcgccatagaggaggcgcagcagcgtctgcgggcactcgaggacctgctcgtgtccatcggtctggactgttgagcccctggctgggcagccccaggggccaggagctctcttggagacaagcatgtgtatgcgtttgtgtgcagctcttcttcctgctccctgcacattgagggcttcatggggggtgcgaggggctcagtggggcttctcttccctccatgagcctggagaccccaggggaggatccatttgggatgagccccctccccccaatgcacaagccagcccccaagaccctgggggtggacaccactcagggaaacctggggtgggggtgggctttggtcttagcactttccttctccagatcccccctacccaccccagtcccaaatccagtcctctggcccttgcctagccctgaattgcttctctaagctggtgttcccatgcacagggccattcaggaagggctgggggagtgtgtgtggcaataaagcttgaaggcaccgtgggagcatg

SEQ ID NO: 9744 - protein, 453 aa, Homo sapiens; identical to SEQ ID NO: 844

SEQ ID NO: 9745 - DNA, 919 bp, Homo sapiens
cggggcggggctgagcgtgtttacatccgccgggtgcgcggcttcgccgcccgaggtcgttcggctcgggtaccatcctccgcgccatggacaccagcgacctgttcgccagctgcaggaagggggatgtgggccgagtgcggtacctgctggagcagcgagacgtggaggtactatgcctgcttgtgtgggcacgaggagctggtactctaccttctggccaatggagcccgctgcgaggccaacaccttcgatggtgagcgctgcctctatggggcactgagtgaccccatccgccgggctctacgcgattacaagcaggtcacggcttcctgcaggaggcgggattactatgacgacttcttgcagcggcttctagagcagggcatccacagtgacgtggtctttgtagtacacgggaagccattccgggtgcatcgctgcgtcctgggtgcacgtagtgcctactttgccaacatgctggacaccaaatggaagggcaagagtgtcgtggttctcaggcacccactgatcaaccccgtggcctttggggccctgctgcagtacctgtacacaggtgaccccctgggtccagggtaggaggagagggagtgggccgtccttctggacagcagtacacctaggtgtggctgggctgacctttcacctctagacacttcatggtccccccggggtggttccagctgcctctcgggttgggttgcaagagagaggactagtgtgcctgctcaggaagagcttgtcccacccacatgctgaggccctcccatctgttccctggggcctgtagaacagcttttgatggggaaaccatggtggcaagtgggcccaggagtcctagtcctgcagccaggtggccaggtgggaggggatcaccctttttctgtgggcctgatga

SEQ ID NO: 9746 - protein, 157 aa, Homo sapiens [sequence omitted]

SEQ ID NO: 9747 - DNA, 685 bp, Homo sapiens
gagcgtgtttacatccgccgggtgcgcggcttcgccgcccgaggtcgttcggctcgggtaccatcctccgcgccatggacaccagcgacctgttcgccagctgcaggaagggggatgtgggccgagtgcggtacctgctggagcagcgagacgtggaggtgaatgtgcgggacaagtgggacagcacccccttgtactatgcctgcttgtgtgggcacgaggagctggtactctaccttctggccaatggagcccgctgcgaggccaacaccttcgatggtgagcgctgcctctatggggcactgagtgaccccatccgccgggctctacgcgattacaagcaggtcacggcttcctgcaggaggcgggattactatgacgacttcttgcagcggtgagccagggcacacgaggggtgcagcatggggtgcggtggccctggtgggtgtggcgagtctgctctgactgtggcctgcactgggttctgagtgctccgaggaatggggtggggctgtgccaagtatcctccctcctggcttgtccctccccaggcttctagagcagggcatccacagtgacgtggtctttgtagtacacgggaagccattccgggtgcatcgctgcgtcctgggtgcacgtagtgcctactttgccaacatgctggacaccaaatggaagggcaaga

SEQ ID NO: 9748 - protein, 107 aa, Homo sapiens
MDTSDLFASCRKGDVGRVRYLLEQRDVEVNVRDKWDSTPLYYACLCGHEELVLYLLANGARCEANTFDGERCLYGALSDPIRRALRDYKQVTASCRRRDYYDDFLQR

SEQ ID NO: 9749 - DNA, 997 bp, Homo sapiens
agcgtgtttacatccgccgggtgcgcggcttcgccgcccgaggtcgttcggctcgggtaccatcctccgcgccatggacaccagcgacctgttcgccagctgcaggaagggggatgtgggccgagtgcgaccatgaacccgtcctgacccaggctctgacctccttcctgcccaggtacctgctggagcagcgagacgtggaggtactatgcctgcttgtgtgggcacgaggagctggtactctaccttctggccaatggagcccgctgcgaggccaacaccttcgatggtgagcgctgcctctatggggcactgagtgaccccatccgccgggctctacgcgattacaagcaggtcacggcttcctgcaggaggcgggattactatgacgacttcttgcagcggcttctagagcagggcatccacagtgacgtggtctttgtagtacacgggaagccattccgggtgcatcgctgcgtcctgggtgcacgtagtgcctactttgccaacatgctggacaccaaatggaagggcaagagtgtcgtggttctcaggcacccactgatcaaccccgtggcctttggggccctgctgcagtacctgtacacaggtgaccccctgggtccagggtaggaggagagggagtgggccgtccttctggacagcagtacacctaggtgtggctgggctgacctttcacctctagacacttcatggtccccccggggtggttccagctgcctctcgggttgggttgcaagagagaggactagtgtgcctgctcaggaagagcttgtcccacccacatgctgaggccctcccatctgttccctggggcctgtagaacagcttttgatggggaaaccatggtggcaagtgggcccaggagtcctagtcctgcagccaggtggccaggtgggaggggatcaccctttttctgtgggcctgatgacagctgaggtcccgcaggccctcatcctccccactgcccccaggc

SEQ ID NO: 9750 - protein, 59 aa, Homo sapiens
MWAECDHEPVLTQALTSFLPRYLLEQRDVEVLCLLVWARGAGTLPSGQWSPLRGQHLRW

SEQ ID NO: 9751 - DNA, 1385 bp, Homo sapiens
gtgtttacatccgccgggtgcgcggcttcgccgcccgaggtcgttcggctcgggtaccatcctccgcgccatggacaccagcgacctgttcgccagctgcaggaagggggatgtgggccgagtgcggtgaggacgagctggtactctaccttctggccaatggagcccgctgcgaggccaacaccttcgatggtgagcgctgcctctatggggcactgagtgaccccatccgccgggctctacgcgattacaagcagctgtgggacctgctcagcgacctggaggccaagtgcgagaaggtgtctgagtttgtggcgtctaagccaggcacgtgtgtgaaggtgctgaccatcgagcccccacctgcagacccccgcctccgggaggacatggcgctgctggccgattgtgccctgccccccgagctccgagcctttttctgtggccgcagtgactacttccgagccctgctggatgaccacttccgagagagcgaggagccagcgacctcagggggccccccagccgtcaccctgcatggcatctcacccgacgtcttcactcacgtgctctactacatgtacagcgaccacactgagctgtcccccgaggcagcctatgatgtgctgagcgtcgccgacatgtacctgctgccaggcctgaagaggctgtgcggccgcagcctggctcagatgctagacgaggacactgtggtgggtgtgtggcgcgtggccaagctcttccgcctggcgcggcttgaggaccagtgcactgagtacatggccaaggtcattgagaagctggtggagcgggaggacttcgtggaggcggtgaaggaggaggcagcggctgtggcagcccggcaggagacggactctatcccgctggtggacgacatccgcttccacgtggccagcacggtgcagacctacagcgccatagaggaggcgcagcagcgtctgcggagctctcttggagacaagcatgtgtatgcgtttgtgtgcagctcttcttcctgctccctgcacattgagggcttcatggggggtgcgaggggctcagtggggcttctcttccctccatgagcctggagaccccaggggaggatccatttgggatgagccccctccccccaatgcacaagccagcccccaagaccctgggggtggacaccactcagggaaacctggggtgggggtgggctttggtcttagcactttccttctccagatcccccctacccaccccagtcccaaatccagtcctctggcccttgcctagccctgaattgcttctctaagctggtgttcccatgcacagggccattcaggaagggctgggggagtgtgtgtggcaataaagcttgaaggcaccgtgggagcatg

SEQ ID NO: 9752 - protein, 324 aa, Homo sapiens
MWAECGEDELVLYLLANGARCEANTFDGERCLYGALSDPIRRALRDYKQLWDLLSDLEAKCEKVSEFVASKPGTCVKVLTIEPPPADPRLREDMALLADCALPPELRAFFCGRSDYFRALLDDHFRESEEPATSGGPPAVTLHGISPDVFTHVLYYMYSDHTELSPEAAYDVLSVADMYLLPGLKRLCGRSLAQMLDEDTVVGVWRVAKLFRLARLEDQCTEYMAKVIEKLVEREDFVEAVKEEAAAVAARQETDSIPLVDDIRFHVASTVQTYSAIEEAQQRLRSSLGDKHVYAFVCSSSSCSLHIEGFMGGARGSVGLLFPP

SEQ ID NO: 9753 - DNA, 1107 bp, Homo sapiens
gtgtttacatccgccgggtgcgcggcttcgccgcccgaggtcgttcggctcgggtaccatcctccgcgccatggacaccagcgacctgttcgccagctgcaggaagggggatgtgggccgagtgcggtacctgctggagcagccgaggagccagcgacctcagggggccccccagccgtcaccctgcatggcatctcacccgacgtcttcactcacgtgctctactacatgtacagcgaccacactgagctgtcccccgaggcagcctatgatgtgctgagcgtcgccgacatgtacctgctgccaggcctgaagaggctgtgcggccgcagcctggctcagatgctagacgaggacactgtggtgggtgtgtggcgcgtggccaagctcttccgcctggcgcggcttgaggaccagtgcactgagtacatggccaaggtcattgagaagctggtggagcgggaggacttcgtggaggcggtgaaggaggaggcagcggctgtggcagcccggcaggagacggactctatcccgctggtggacgacatccgcttccacgtggccagcacggtgcagacctacagcgccatagaggaggcgcagcagcgtctgcgggcactcgaggacctgctcgtgtccatcggtctggactgttgagcccctggctgggcagccccaggggccaggagctctcttggagacaagcatgtgtatgcgtttgtgtgcagctcttcttcctgctccctgcacattgagggcttcatggggggtgcgaggggctcagtggggcttctcttccctccatgagcctggagaccccaggggaggatccatttgggatgagccccctccccccaatgcacaagccagcccccaagaccctgggggtggacaccactcagggaaacctggggtgggggtgggctttggtcttagcactttccttctccagatcccccctacccaccccagtcccaaatccagtcctctggcccttgcctagccctgaattgcttctctaagctggtgttcccatgcacagggccattcaggaagggctgggggagtgtgtgtggcaataaagcttgaaggcaccgtgggagcatg

SEQ ID NO: 9754 - protein, 142 aa, Homo sapiens [sequence omitted]

SEQ ID NO: 9755 - DNA, 787 bp, Homo sapiens
aggtcgttcggctcgggtaccatcctccgcgccatggacaccagcgacctgttcgccagctgcaggaagggggatgtgggccgagtgcggtacctgctggagcagcgagacgtggaggtgaatgtgcgggacaagtgggacagcacccccttgtactatgcctgcttgtgtgggcacgaggagctggtactctaccttctggccaatggagcccgctgcgaggccaacaccttcgatggtgagcgctgcctctatggggcactgagtgaccccatccgccgggctctacgcgattacaagcaggtcacggcttcctgcaggaggcgggattactatgacgacttcttgcagcggcttctagagcagggcatccacagtgacgtggtctttgtagtacacgggaagccattccgggtgcatcgctgcgtcctgggtgcacgtagtgcctactttgccaacatgctggacaccaaatggaagggcaagagtgtcgtggttctcaggcacccactgatcaaccccgtggcctttggggccctgctgcagtacctgtacacaggtgaccccctgggtccagggtaggaggagagggagtgggccgtccttctggacagcagtacacctaggtgtggctgggctgacctttcacctctagacacttcatggtccccccggggtggttccagctgcctctcgggttgggttgcaagagagaggactagtgtgcctgctcaggaagagcttgtcccacccacatgctgaggccctcccatctgttccctggggc

SEQ ID NO: 9756 - protein, 182 aa, Homo sapiens
MDTSDLFASCRKGDVGRVRYLLEQRDVEVNVRDKWDSTPLYYACLCGHEELVLYLLANGARCEANTFDGERCLYGALSDPIRRALRDYKQVTASCRRRDYYDDFLQRLLEQGIHSDVVFVVHGKPFRVHRCVLGARSAYFANMLDTKWKGKSVVVLRHPLINPVAFGALLQYLYTGDPLGPG

SEQ ID NO: 9757 - DNA, 2694 bp, Homo sapiens
agagcccataatcggcctccggtccctgaggattcggaaactcctgacgcagctaaagtgaatctggcgctgagatgccccctccatgggccggacgcggagggaaggggtgcccagttgggttctggggcccttcccctccttgggcttccactatcccgtttgacctccttttttcttggcccttcctcccccttgacctggtgctgactgactgcttccacctcccctgggctggcgccgggctgctgtactcccgtagcctccctgggccgctccctgacatcccgtgccactcaagagttagtgcatagtgtcaacgctgagtgggttcacagcacttccaggtgcagcctggaggcctcctttgggctgcccccgcctcagtggggctgcattagcattggcgactcccctcgctcaccttccgcatcccatcagttgctgtatcccgcgactcctgcctcctagaattgtgtgccctccacaccatcaggaggcctgcagcagctttttcccgggctccctgcttctaacagggccagcttcttcctgcagtagagagctctggtgggagtgaaggctccatcacctcctctcccaaacgctgaaaggccaaaggtccagcctcggcactggctctggcttctgtccctgtagcccatcgtcccccagcactgatagcacacagtgtctgcctgttcgaccccacctccacatccttgcctgcactttgccttgagtgcctctcctgctctggtctgcctgtcacctgccctcacctgggggaggcttccccataccaaaagggatgttttctctccgttcctttccacgggccttctttctcagaccatgaacccgtcctgacccaggctctgacctccttcctgcccaggtacctgctggagcagcgagacgtggaggtactatgcctgcttgtgtgggcacgaggagctggtactctaccttctggccaatggagcccgctgcgaggccaacaccttcgatggtgagcgctgcctctatggggcactgagtgaccccatccgccgggctctacgcgattacaagcaggtcacggcttcctgcaggaggcgggattactatgacgacttcttgcagcggcttctagagcagggcatccacagtgacgtggtctttgtagtacacgggaagccattccgggtgcatcgctgcgtcctgggtgcacgtagtgcctactttgccaacatgctggacaccaaatggaagggcaagagtgtcgtggttctcaggcacccactgatcaaccccgtggcctttggggccctgctgcagtacctgtacacaggccgcctggacattggcgtagagcatgtgagtgactgtgagcgcctggccaagcaatgccagctgtgggacctgctcagcgacctggaggccaagtgcgagaaggtgtctgagtttgtggcgtctaagccaggcacgtgtgtgaaggtgctgaccatcgagcccccacctgcagacccccgcctccgggaggacatggcgctgctggccgattgtgccctgccccccgagctccgaggtgatctttgggagctgcccttcccttgtcctgacggcttcaacagctgccctgacatctgcttccgagtggctggctgcagcttcctctgccacaaggcctttttctgtggccgcagtgactacttccgagccctgctggatgaccacttccgagagagcgaggagccagcgacctcagggggccccccagccgtcaccctgcatggcatctcacccgacgtcttcactcacgtgctctactacatgtacagcgaccacactgagctgtcccccgaggcagcctatgatgtgctgagcgtcgccgacatgtacctgctgccaggcctgaagaggctgtgcggccgcagcctggctcagatgctagacgaggacactgtggtgggtgtgtggcgcgtggccaagctcttccgcctggcgcggcttgaggaccagtgcactgagtacatggccaaggtcattgagaagctggtggagcgggaggacttcgtggaggcggtgaaggaggaggcagcggctgtggcagcccggcaggagacggactctatcccgctggtggacgacatccgcttccacgtggccagcacggtgcagacctacagcgccatagaggaggcgcagcagcgtctgcgggcactcgaggacctgctcgtgtccatcggtctggactgttgagcccctggctgggcagccccaggggccaggagctctcttggagacaagcatgtgtatgcgtttgtgtgcagctcttcttcctgctccctgcacattgagggcttcatggggggtgcgaggggctcagtggggcttctcttccctccatgagcctggagaccccaggggaggatccatttgggatgagccccctccccccaatgcacaagccagcccccaagaccctgggggtggacaccactcagggaaacctggggtgggggtgggctttggtcttagcactttccttctccagatcccccctacccaccccagtcccaaatccagtcctctggcccttgcctagccctgaattgcttctctaagctggtgttcccatgcacagggccattcaggaagggctgggggagtgtgtgtggcaataaagcttgaaggcaccgtgggagcatg

SEQ ID NO: 9758 - protein, 336 aa, Homo sapiens; identical to SEQ ID NO: 840

SEQ ID NO: 9759 - DNA, 4298 bp, Homo sapiens
ccaggttggtctcaaactcctgagcccaagtgatccacctaccttggtctcgcaaagtgcctggattataggtgtgagctgccacgcccaggcttgtttttcttaatagtccctgccatcgttaggtagtgggttgattgtcctgcctcactagagtataagttcagcaggacagggacctgtgtctcgttcactgctgtgctccagtgtgtgggacaagcccagccaccaagtcagctctccgttctgtgttgtctgtcttccgtgtgagtgagtatgtgcctgtgtgagtgcacacagacgtgcccattcgcctagcccttgactgggagggtgttggggtcagagtgggcccagggtaatttgggaaggcatcgccagagattcggagccccatgtgtgggaaggtggggaggagggacagggagattagaatttcccccaggccccttccctgctaactggtgagccctgcctcccccaggagcccgctgcgaggccaacaccttcgatggtgagcgctgcctctatggggcactgagtgaccccatccgccgggctctacgcgattacaagcaggtcacggcttcctgcaggaggcgggattactatgacgacttcttgcagcggtgagccagggcacacgaggggtgcagcatggggtgcggtggccctggtgggtgtggcgagtctgctctgactgtggcctgcactgggttctgagtgctccgaggaatggggtggggctgtgccaagtatcctccctcctggcttgtccctccccaggcttctagagcagggcatccacagtgacgtggtctttgtagtacacgggaagccattccgggtgcatcgctgcgtcctgggtgcacgtagtgcctactttgccaacatgctggacaccaaatggaagggcaagagtgtcgtggttctcaggcacccactgatcaaccccgtggcctttggggccctgctgcagtacctgtacacaggtgaccccctgggtccagggtaggaggagagggagtgggccgtccttctggacagcagtacacctaggtgtggctgggctgacctttcacctctagacacttcatggtccccccggggtggttccagctgcctctcgggttgggttgcaagagagaggactagtgtgcctgctcaggaagagcttgtcccacccacatgctgaggccctcccatctgttccctggggcctgtagaacagcttttgatggggaaaccatggtggcaagtgggcccaggagtcctagtcctgcagccaggtggccaggtgggaggggatcaccctttttctgtgggcctgatgacagctgaggtcccgcaggccctcatcctccccactgcccccaggccgcctggacattggcgtagagcatgtgagtgactgtgagcgcctggccaagcaatgccagctgtgggacctgctcagcgacctggaggccaagtgcgagaaggtgtctgagtttggtgcgagcagggtttggggcccggggccatgggtgcggcctggcagggctggcctggctccctgaagttgttcttcccctgtagtggcgtctaagccaggcacgtgtgtgaaggtgctgaccatcgagcccccacctgcagacccccgcctccgggaggacatggcgctgctggccgattgtgccctgccccccgagctccgaggtgatctttgggagctgcccttcccttgtcctgacggcttcaacagctgccctgacatctgcttccgagtggctggctgcagcttcctctgccacaaggtgcctgtgccctcctgttgcccctggccccagcccgttgccctgagcccccgtctagctcctcaggagacagaccctggccctcacacttcctgagcccggcctcccccaggcctttttctgtggccgcagtgactacttccgagccctgctggatgaccacttccgagagagcgaggagccagcgacctcagggggccccccagccgtcaccctgcatggcatctcacccgacgtcttcactcacgtgctctactacatgtacagcgaccacactgaggtgggggctcaggcagagctggggatggcacacaacctgtgctgccgtgggctgagagggagcgccagggccctgggggtctgtggaagggcccagctggccccatggttgacgttttgagaaggctggaggggaaggctgtgggactttggatttttctttcaggtagaggaagccttgttgggctccagagagaggatgagtgatgagcctgtgtcacagacactccacacttgtcagccacttgggatcctcagcttctctagcaggagggtggagggtgggtggggacagcctcctctctgtggtgctgcagatccctggggttctgggttcccagtctcctcttcccttgctgcctgcctctgtctccagctgccccaaggtgtccgtaagccaaggctgcagggcagcagcagagtgctgaaggtttgctctgccagggtgtgtgagagagagagagagtgtgtgtgtgcgtgcgcgtgcgcgcgcactataaagcaatccccatatctggtggcttaaagaagaggggagtttgtttctccttcacttctgactgaggtgggtgccccagggcaagtggcttgcggaagatcaggtcatccctccatcttgcccctgtatgcctaagggtgaaggtcaaaaaccttttctctgaaggtgagtgtttcaggttctgtgggccatatggccctgttgtagctactcaactctgtagcgcaaaggtagccagagacagtacagagatgagtgggtgaggctgcattccaataaaactttacttgcacaaacaggctggatttggtccacaggccgtagcttacccatcctgcctggggcatcgcgtttggccatggagattgggtcctaggcaaactcatgctctaggaggaagaggaaggcagggcaagcaatgctgtttttgtagaagccaccggaaattgcaccacttctcatgttcccctggagagaacttcgtgcctacctgccaacaagggaggcttggaaagtcattctgtggccagggccctgttttgtgggggaaggggaggaagcatgctgggagacagagggcagtccctactgctgctctatctccagtggcagctcccttgtccatccctccgcgcggcctgacagcccctcagcctccatctttcccaccccctctactgggcatctcctgcagctcagcccagctctctggcccctgtagcaggggttacctttgcccaccctggagaagctccctcttcaaggagcctcgccacccaaagggcaccttgtctcagagtgtggcttgggctcttaacctgggttgatactggttgagctgtgtgacactgggtgagctttgtgatcttgggccagttacttaactgctctgtgcctctagaacatggggatagctctcgtcgtcacttcctaaggccttgtgcagatgcatgggttacccaggtaaaggaggtggcatggcacatggcacatggcttgtaatgtggtcgcagagctccccttgtctctgtctgcagcttgctccctgtgccacccaggctctggcctgaatctgagggcttcagtcttatccagcacaggatgtatctgtaggtgggctctgtgtccccacagcctcttgagagggagggagctggtagatagtctcccacccctggcagagtccctgcataggtcttgactagctgcctctgtcccaccattctgacagcccccgcaggtaggcatggttatctatacctcatggactgggaactagaggcacagggaggtgcagtgacttgcccagggccccacagctagaagtgtcagacccaggtctgtataactcggagctcagaccctggctcctgcgagggccctgcctcccgcctgccctgccagcctgctcagggcatgggagaaccccccagtcttctgccccctagcggtcctgcagatccctgtgggaatctgggccagccccccgacccccaaccccatacatgcgcagggagctcctactcccactggaagccttcccgccagtgccccccaaccaccacaggccctagccttggctgttgtgccctgggagcccttggtgacctcggggggcaccttcatccctgtcttcactgcagctgtcccccgaggcagcctatgatgtgctgagcgtcgccgacatgtacctgctgccaggcctgaagaggctgtgcggccgc

SEQ ID NO: 9760 - protein, 78 aa, Homo sapiens
MALLADCALPPELRGDLWELPFPCPDGFNSCPDICFRVAGCSFLCHKVPVPSCCPWPQPVALSPRLAPQETDPGPHTS

SEQ ID NO: 9761 - DNA, 316 bp, Homo sapiens
gagtctgctctgactgtggcctgcactgggttctgagtgctccgaggaatggggtggggctgtgccaagtatcctccctcctggcttgtccctccccaggcttctagagcagggcatccacagtgacgtggtctttgtagtacacgggaagccattccgggtgcatcgctgcgtcctgggtgcacgtagtgcctactttgccaacatgctggacaccaaatggaagggcaagagtgtcgtggttctcaggcacccactgatcaaccccgtggcctttggggccctgctgcagtacctgtacacaggccgcctggac

SEQ ID NO: 9762 - protein, 36 aa, Homo sapiens
MLDTKWKGKSVVVLRHPLINPVAFGALLQYLYTGRL

SEQ ID NO: 9763 - DNA, 1293 bp, Homo sapiens
gacctgctcagcgacctggaggccaagtgcgagaaggtgtctgagtttgtggcgtctaagccaggcacgtgtgtgaaggtgctgaccatcgagcccccacctgcagacccccgcctccgggaggacatggcgctgctggccgattgtgccctgccccccgagctccgaggtgatctttgggagctgcccttcccttgtcctgacggcttcaacagctgccctgacatctgcttccgagtggctggctgcagcttcctctgccacaaggcctttttctgtggccgcagtgactacttccgagccctgctggatgaccacttccgagagagcgaggagccagcgacctcagggggccccccagccgtcaccctgcatggcatctcacccgacgtcttcactcacgtgctctactacatgtacagcgaccacactgagctgtcccccgaggcagcctatgatgtgctgagcgtcgccgacatgtacctgctgccaggcctgaagaggctgtgcggccgcagcctggctcagatgctagacgaggacactgtggtgggtgtgtggcgcgtggccaagctcttccgcctggcgcggcttgaggaccagtgcactgagtacatggccaaggtcattgagaagctggtggagcgggaggacttcgtggaggcggtgaaggaggaggcagcggctgtggcagcccggcaggagacggactctatcccgctggtggacgacatccgcttccacgtggccagcacggtgcagacctacagcgccatagaggaggcgcagcagcgtctgcgggcactcgaggacctgctcgtgtccatcggtctggactgttgagcccctggctgggcagccccaggggccaggagctctcttggagacaagcatgtgtatgcgtttgtgtgcagctcttcttcctgctccctgcacattgagggcttcatggggggtgcgaggggctcagtggggcttctcttccctccatgagcctggagaccccaggggaggatccatttgggatgagccccctccccccaatgcacaagccagcccccaagaccctgggggtggacaccactcagggaaacctggggtgggggtgggctttggtcttagcactttccttctccagatcccccctacccaccccagtcccaaatccagtcctctggcccttgcctagccctgaattgcttctctaagctggtgttcccatgcacagggccattcaggaagggctgggggagtgtgtgtggcaataaagcttgaaggcaccgtgggagcatg

SEQ ID NO: 9764 - protein, 238 aa, Homo sapiens [sequence omitted]

SEQ ID NO: 9765 - DNA, 2986 bp, Homo sapiens
cagagctggggatggcacacaacctgtgctgccgtgggctgagagggagcgccagggccctgggggtctgtggaagggcccagctggccccatggttgacgttttgagaaggctggaggggaaggctgtgggactttggatttttctttcaggtagaggaagccttgttgggctccagagagaggatgagtgatgagcctgtgtcacagacactccacacttgtcagccacttgggatcctcagcttctctagcaggagggtggagggtgggtggggacagcctcctctctgtggtgctgcagatccctggggttctgggttcccagtctcctcttcccttgctgcctgcctctgtctccagctgccccaaggtgtccgtaagccaaggctgcagggcagcagcagagtgctgaaggtttgctctgccagggtgtgtgagagagagagagagtgtgtgtgtgcgtgcgcgtgcgcgcgcactataaagcaatccccatatctggtggcttaaagaagaggggagtttgtttctccttcacttctgactgaggtgggtgccccagggcaagtggcttgcggaagatcaggtcatccctccatcttgcccctgtatgcctaagggtgaaggtcaaaaaccttttctctgaaggtgagtgtttcaggttctgtgggccatatggccctgttgtagctactcaactctgtagcgcaaaggtagccagagacagtacagagatgagtgggtgaggctgcattccaataaaactttacttgcacaaacaggctggatttggtccacaggccgtagcttacccatcctgcctggggcatcgcgtttggccatggagattgggtcctaggcaaactcatgctctaggaggaagaggaaggcagggcaagcaatgctgtttttgtagaagccaccggaaattgcaccacttctcatgttcccctggagagaacttcgtgcctacctgccaacaagggaggcttggaaagtcattctgtggccagggccctgttttgtgggggaaggggaggaagcatgctgggagacagagggcagtccctactgctgctctatctccagtggcagctcccttgtccatccctccgcgcggcctgacagcccctcagcctccatctttcccaccccctctactgggcatctcctgcagctcagcccagctctctggcccctgtagcaggggttacctttgcccaccctggagaagctccctcttcaaggagcctcgccacccaaagggcaccttgtctcagagtgtggcttgggctcttaacctgggttgatactggttgagctgtgtgacactgggtgagctttgtgatcttgggccagttacttaactgctctgtgcctctagaacatggggatagctctcgtcgtcacttcctaaggccttgtgcagatgcatgggttacccaggtaaaggaggtggcatggcacatggcacatggcttgtaatgtggtcgcagagctccccttgtctctgtctgcagcttgctccctgtgccacccaggctctggcctgaatctgagggcttcagtcttatccagcacaggatgtatctgtaggtgggctctgtgtccccacagcctcttgagagggagggagctggtagatagtctcccacccctggcagagtccctgcataggtcttgactagctgcctctgtcccaccattctgacagcccccgcaggtaggcatggttatctatacctcatggactgggaactagaggcacagggaggtgcagtgacttgcccagggccccacagctagaagtgtcagacccaggtctgtataactcggagctcagaccctggctcctgcgagggccctgcctcccgcctgccctgccagcctgctcagggcatgggagaaccccccagtcttctgccccctagcggtcctgcagatccctgtgggaatctgggccagccccccgacccccaaccccatacatgcgcagggagctcctactcccactggaagccttcccgccagtgccccccaaccaccacaggccctagccttggctgttgtgccctgggagcccttggtgacctcggggggcaccttcatccctgtcttcactgcagctgtcccccgaggcagcctatgatgtgctgagcgtcgccgacatgtacctgctgccaggcctgaagaggctgtgcggccgcagcctggctcagatgctagacgaggacactgtggtgggtgtgtggcgcgtggccaagctcttccgcctggcgcggcttgaggaccagtgcactgagtacatggccaaggtcattgagaagctggtggagcgggaggacttcgtggaggcggtgaaggaggaggcagcggctgtggcagcccggcaggagacggactctatcccgctggtggacgacatccgcttccacgtggccagcacggtgcagacctacagcgccatagaggaggcgcagcagcgtctgcgggcactcgaggacctgctcgtgtccatcggtctggactgttgagcccctggctgggcagccccaggggccaggagctctcttggagacaagcatgtgtatgcgtttgtgtgcagctcttcttcctgctccctgcacattgagggcttcatggggggtgcgaggggctcagtggggcttctcttccctccatgagcctggagaccccaggggaggatccatttgggatgagccccctccccccaatgcacaagccagcccccaagaccctgggggtggacaccactcagggaaacctggggtgggggtgggctttggtcttagcactttccttctccagatcccccctacccaccccagtcccaaatccagtcctctggcccttgcctagccctgaattgcttctctaagctggtgttcccatgcacagggccattcaggaagggctgggggagtgtgtgtggcaataaagcttgaaggcaccgtgggagcatg

SEQ ID NO: 9766 - protein, 121 aa, Homo sapiens [sequence omitted]

SEQ ID NO: 9767 - DNA, 504 bp, Homo sapiens
ttgctccctgtgccacccaggctctggcctgaatctgagggcttcagtcttatccagcacaggatgtatctgtaggtgggctctgtgtccccacagcagctagaagtgtcagacccaggtctgtataactcggagctcagaccctggctcctgcgagggccctgcctcccgcctgccctgccagcctgctcagggcatgggagaaccccccagtcttctgccccctagcggtcctgcagatccctgtgggaatctgggccagccccccgacccccaaccccatacatgcgcagggagctcctactcccactggaagccttcccgccagtgccccccaaccaccacaggccctagccttggctgttgtgccctgggagcccttggtgacctcggggggcaccttcatccctgtcttcactgcagctgtcccccgaggcagcctatgatgtgctgagcgtcgccgacatgtacctgctgccaggcctgaagaggctgtgcggccgc

SEQ ID NO: 9768 - protein, 85 aa, Homo sapiens
MGEPPSLLPPSGPADPCGNLGQPPDPQPHTCAGSSYSHWKPSRQCPPTTTGPSLGCCALGALGDLGGHLHPCLHCSCPPRQPMMC

SEQ ID NO: 9769 - DNA, 490 bp, Homo sapiens
ccacggtgccttcaagctttattgccacacacactcccccagcccttcctgaatggccctgtgcatgggaacaccagcttagagaagcaattcagggctaggcaagggccagaggactggatttgggactggggtgggtaggggggatctggagaaggaaagtgctaagaccaaagcccacccccaccccaggtttccctgagtggtgtccacccccagggtcttgggggctggcttgtgcattggggggagggggctcatcccaaatggatcctcccctggggtctccaggctcatggagggaagagaagccccactgagcccctcgcaccccccatgaagccctcaatgtgcagggagcaggaagaagagctgcacacaaacgcatacacatgcttgtctccaagagagcttggccatgtactcagtgcactggtcctcaagccgcgccaggcggaagagcttggccacgcgccacacacccaccaca

SEQ ID NO: 9770 - protein, 50 aa, Homo sapiens
MKPSMCREQEEELHTNAYTCLSPRELGHVLSALVLKPRQAEELGHAPHTH

SEQ ID NO: 9771 - DNA, 2724 bp, Homo sapiens
agatttatgaaggtgcctaccatgttctccacaaggagcttcctgaagtcaccaactccgtcttccatgaaataaacatgtgggtctctcaaaggacagccacggcaggaactgcgtccccaccctgaatgcattggccggtgcccggctcatggtctgggggatgcaggcaggggaagggcagagatggcttctcagatatggcttgccaaaaaaaaaaaaaaaaaaaaatcagaaattggagaaatccttagcacaattttctaaaaaataacagacatttttgttatacattagactatcagacactggacctaccttaatggttagacactttatgcaaaaaaagagaaaggtcccaggtgattttccacaaagaatgtgctaaaatgtccactgaaaacaaagccaagcctctgccctgcctctcccagctcccacaagggttccaggaattcctggtgttcccaggacaccagactgcaataactggaggcgcctccttcctgcccacccttcgctcacgccccagcgccctctctgaccagcctccgcttggtggccttcctctggccgtgtgatgaggtggttgctgtctccataggggccagctccccagggcagactcacgtgcccctctgaggctcagaaaatgcccagcccttcctcaaaatgagcagccacccatgactttgtgggctccttgttagcctgagaccaggctttgcagaggggcggggggtgaggcttagcccagaaggagaactgagcaggaaaccaaggctcttctctgtcccctgcccttcccctcctgccagggggaggctcaggttggtccccgagtgccgcctgccacagcaggacaggccgggacaggcctcacccaaggccaaggctggcatcagccaatcattcagagctgaggccctgggcctagcctgcccttctcaggtgccaataccaccccagccctgcccttggcctcactttttcccagcaataagtggggttcaccacccgcctcgggaatactttccccttctaaatgggacttgctgttacctcaggaggctccttagtgcaaatatgaccctggtcagggctttgccaccgttgaagccctgcagaaggtgcaatgtaggggttctggggccacagaggagaggccacttcccaccaggacccccaacatgaagtctaggcctcaggggctcccgcccttcttcctccagcagcgggaactgccactgctctcccaggccctgttctggaggctaaccttggttcctggagagtgtgcccctccaccctccctccagcagccctgatcacaccatgagagccaggaacgggtcaccctgctgaagatcactctgtgccctgggggaggagccaagccctcaccccacaaggggcaggtgggggcttggttgctgacccggcccaagtccccacagagcaccttctgtagctccagcttgtctccctggcttctctttgaaggagaaaaatgtaaaatatgcactgagaaagccagccccgcctgcttagtcagccccggcagcagggcagccatgggaactcaggaaaagcaggaaccctttccaaaagcccagagatgccctgggctcagatctgtaattctcccaggagctgtgatagagcaggccacacaaagtccctacgcctccctgctgcctcccccagatgcatgtggtggcatcaccattccccaaattgaatatcagcatgcggcctgaccagggactctttagatgcatgaatttatttatatgaaggctctcacagagacacacacagcacttcagtagcatttgcattcctggttaaagaatcaccaatatttaaaataaaaactttcctgaaattgggactgtcatgttatccagaagggctggtacatccgcccaccatgtccccctgctgggtcaggagccaacacaggaccctgcgtgtgagcgtgcctgacatctcacgcacggccactccagagccggtccctgtccttggaaagctgtgaagccttgcgttgagttccttctcgatactgacggctccgtgctgacattctgagctctggagtcacaccagcgcaggggcgtggaggaactgaggtttggaaggaatgccaggtctcgcacagcttggcctcgagaaggtgagaggaaggcaaaggccagggaggggacccagagaggcctggcacacaaggcccaagcaccaccgtcaacacagcccagtccatacagaaatgggtttcatgcctgaaaagctttttacagaaagatgccgcctgtagccagtgacagccgcaaccctacaggcctcagttccttgcagaggtgaggggtagagagtcagcctccctcccttccagcagcgacccagcttccctccacttccaggtggtgctgggctcaccgagggagcactggtgggtgctctgaaaacccacaggatcccacctccaggcccacctgggtcccatctcactctcttcttctttcaccaattgctaacatagaccttgttgggatcacgatggcttcacaagccagctgttgggtttgctatgtcactgtggctcagtcacatccctgcgtgtatactgtctgcggggcacatatgtatccatttagagctaaaggaatcagtgtacactacagctaatcctaataaatccgatgttttcggaatggcgtc

SEQ ID NO: 9772 - protein, 63 aa, Homo sapiens
MSTENKAKPLPCLSQLPQGFQEFLVFPGHQTAITGGASFLPTLRSRPSALSDQPPLGGLPLAV

SEQ ID NO: 9773 - DNA, 7788 bp, Homo sapiens
gcggttccatcttcctgggaagacagggagttacagatcgttttaagggaatcccaggactctagaagtctccttcatgggtttctctttctgcacctttcctgtgaatggtgtatccacccgggtcccctcctgcctctttgcacactctctgtggtgtaacttgcacccagggcttcagcagccatctatgcactgagacctttctgttcttggggtggcattcctcgggatttagtgccaggacacacctgtgtgcgcattcactgggaaaagtctgcagaatctacaccaggccttcctggagggcgtgttcctccatctacattcgtgatggaacaaccagttattgtcgccgggacaccagtgcctcatgcacaccatcagccacgggagttttactgttacaagcttgtcctcttaggcacattccctcatcctgaacctgctggcagcagctcctttaggggagcgagggtggctgcttgtcccttccgtccttgggcagccagcgctcagctggatgcatgcagtggaagtcaccttctgcctccactcctgagcaggatgtgctctccccacatctcctgtttgcgctttcagcaatagatcattcacagccataggacggggaggcctcccagtccttggctttttgtacctggaaggggatggtgaggcgttcagctgccaggaatcacttccttccctccagggaccagccccttgcattgttcattttctaaagcaaatacttctcaggaagtggctctcctctttttttttttttcctacgaagctcttttcttaaaagcttactttaactgcaaaaagttccactgttcatggaggaagaaaatcaggcttgctgggtgagacgacagaatagggcttgctgtaattctctcctggaggcaggctctctctctggctctctgttcccccttccccaacctctgtgaaaccacttcaaggatggctcaagctgcgctgatccttgaggcgccaacagcctaagctgtcagcatcttctccagagcctggaagtagaggccttgtcactttttggtataaaagttttgggttaagaggtgccagcagcagaaacatatgttcaaggatgaaggtaagtctgtcttcacaaatgactgatcctgaagatggactggcacctccaggcccaggtccctgcagaatcaggtgatgggtccccaaaacacaaatggtggcacaatgagaaatctggtggtgggcttggacgaaatggtgtggatgctgggtggtctcttgctttcacctctgtggcaggcactgctgaggtgctgggtccctgggccttttcttggctctgagccatctggtcagggaatgggtaggaagctggcttacataaaacagtcatgtccctgagaaggctgtgtgggccccagcaggcaggtgggttgacctgggagcagcgcctgcaaggctggcacttgcacaccatcccgttacacagagccttcctgcggttcctgagtgtggtggggatcctcccgccacagctggcagccccatgtctcctctggctgcacacaggatcactagggaactttaaaaaggcactgatgccagggctccacttcggccaatacaatcagtctctcagggcagcactgggaggaggtgtttgtggtgtttcatggacacacacactgccagcatcagggagtagtgacagggtactgagaacagcagaatatctagaagtgagttcttcataactgtggaacacagaagtcttccctcacagtgtggcccttgcccactgctgctggaggagagcgctaaggccctggaacactcgtccttacacagccagagtctagtgaaggccacagagccacagcccactgcctttatgcactgatccactccattttctcatttttagattgttttaacctttgaaagcacagatcccaatgcagacgagctcccaattcttggagttcacagacatttgatccgtgtttgaaaataccccagtccttgtgcagagttcccagaattccaagttttcctttcccaggctcgttcttggagctggcccatgatactagctggactcttgaacattcctgacccatcacggccacccttcgaggcttccgattatgcagacacaccatgcccctgcacagtgctcaaagtcaggctgccgcatgcttctatactagacagtcaaagtcggagcccagggctcagcaaagcacctggcacagtggcggctgcagaatgagatctgcttgcctggatgccaaggctggagggcagtaagcttcggtatcctcagaggcagggggctgccacctttgcactaagaaggaattactgatttctaccatttgagaaaaggagtgttgaccacatggaactccgaataggttcatgcacatggaacaaagccctttaggagaaaagcccgttttttgctgtctgcctgatactggatggttgagaaacaatcgtggtgggcagtcacgccacacttgtgcgggcctaggacacaggaaggtttagccctggcctacagggagggtgggcaagcacagcaatcttgtcccccaaaagaacatcagtggccgctggtgccaagacccacgggaaggttagagctctgggttacatttgtggagagagacacagacagcggcagagacagagacgtagtaatccaggctgtgtggcataagaagataaagcggccccccagcccggggcccctcccatggacctcatggtaccgagcctccattttctcatctgttcagtgaggatgaagcctcatctcccagggtttttgcaaagacagggagactggccgggcgccgtggcttacgcctataatcccagcaccttgggaggccgaggcaggcggatcacaaggtcaggagtttgagaccagcctaaccaacatggtgaaaccccgtctctactaaaaatacaaaaattaggcaggcgtggtggcacgcgcctgtaatcccagctactcaggaggctgaggcaggagaatcacttgaacccaggaggcagaggttgcagtgagccgagattgcgccactgcactccagcctgggtgacagagcaagactctcaaaaaaaaaaaaaaaaagatagggaaactgtgcccaatgcaccagaaggtggttcctcggtgcctgtgagtgcccttgccctctgccaagggtactgagctacgtgccctgtgcccttgatgtacactgagaattcactgcttgccaccttccgtccaattctaatttcagcatttcacagctcacttttgaaatagcatctttcatccccaaatgtctgtgcacattgcagaaatgaaaacagcccctctctgaaggcagaagtgtgagatccgggttctctgttttcctgggaaaacaagagatccagaaggagagatgggggagggggtgggaaggtttgggcctcaatcaggctcaagttcaatgagcatgtgttaagctcctgctgtgttccctgggcttttgcacacagggtgttattcaccttccccgtggtcctctgggggagggtcaaggtcccactggcagctgaggaaacggaggctcagcgatgtggaaatcccagcccatgttcacgaggcagcagagctaggaatcaaacccagcaatccttccctctgccacacagcctcctcatcgagctggtgctatttctacttccacccgagagaaatggacgcacactttctctgtgtggctcctgtgggcccttccgcactgccctgcttcgtgctcagttgatctgtgtgattctgcacctgccgtgtattttcagtaccccagagaaatggccagagctcatcccaggcaactcttgccagtgatgcaaaattacaacccatgagcgatcatggggagggtatagagcgggcaaaattcagacgtgacttcccaccttgggcgcagcggctgcctggccagctcccccaaggtggagcagagccaggctgaatagaggctgagtcagaagggagagtccttgggcatgcaggcttaaggacgcaggcttgggagacgaacctggctgatgttcagtttgggcatcactctccttaatgtactgtaaactgtcactgcggaagagccgggtgtggatgccacttgtgctcacagcccttgttttccctccccggctaggtccttgctgcgaaagtgctcaaccttgtgctgccaaacttgtccctcgggcccatcgactccagcgtgctctctcggaataagacagaggtcgacatttataactcagaccccctgatctgccgggcagggctgaaggtgtgcttcggcatccaactgctgaatgccgtctcacgggtggagcgcgccctccccaagctgactgtgcccttcctgctgctccagggctctgccgatcgcctatgtgacagcaaaggggcctacctgctcatggagttagccaagagccaggacaagactctcaagatttatgaaggtgcctaccatgttctccacaaggagcttcctgaagtcaccaactccgtcttccatgaaataaacatgtgggtctctcaaaggacagccacggcaggaactgcgtccccaccctgaatgcattggccggtgcccggctcatggtctgggggatgcaggcaggggaagggcagagatggcttctcagatatggcttgccaaaaaaaaaaaaaaaaaaaaatcagaaattggagaaatccttagcacaattttctaaaaaataacagacatttttgttatacattagactatcagacactggacctaccttaatggttagacactttatgcaaaaaaagagaaaggtcccaggtgattttccacaaagaatgtgctaaaatgtccactgaaaacaaagccaagcctctgccctgcctctcccagctcccacaagggttccaggaattcctggtgttcccaggacaccagactgcaataactggaggcgcctccttcctgcccacccttcgctcacgccccagcgccctctctgaccagcctccgcttggtggccttcctctggccgtgtgatgaggtggttgctgtctccataggggccagctccccagggcagactcacgtgcccctctgaggctcagaaaatgcccagcccttcctcaaaatgagcagccacccatgactttgtgggctccttgttagcctgagaccaggctttgcagaggggcggggggtgaggcttagcccagaaggagaactgagcaggaaaccaaggctcttctctgtcccctgcccttcccctcctgccagggggaggctcaggttggtccccgagtgccgcctgtactcacaaaggctgcctttcctctagagtcactaattttacctgatgctatgagagaatcatattgaagatgaaatgtctaatatataatgtatattttaaagcagagactattttggtggataggtgggagggagcaaggggagtttgagggaatcagagcttgatgctactgtacagaactggacaggttgggccggcagtggtggggccagagggctctgtgctctaggagctaagccagcagcccccgagaggggacttggctgggcctttcctatgggcaaggcccagtgctcttcctgcccaccagggaccatggagcagtggcaccctatggggctatgatccctaggcctgggcctgggcctgcctatggcccagagctaccctgggagtgtcagtgctagcagcacagctacctctggtggcaggagaagagaggcccagcacagcagcaggccaggccttcctgtccaggtctgcatggagcactcggtgacccagagcagggactggaggcacccccagccctgccccaggccacagcaggacaggccgggacaggcctcacccaaggccaaggctggcatcagccaatcattcagagctgaggccctgggcctagcctgcccttctcaggtgccaataccaccccagccctgcccttggcctcactttttcccagcaataagtggggttcaccacccgcctcgggaatactttccccttctaaatgggacttgctgttacctcaggaggctccttagtgcaaatatgaccctggtcagggctttgccaccgttgaagccctgcagaaggtgcaatgtaggggttctggggccacagaggagaggccacttcccaccaggacccccaacatgaagtctaggcctcaggggctcccgcccttcttcctccagcagcgggaactgccactgctctcccaggccctgttctggaggctaaccttggttcctggagagtgtgcccctccaccctccctccagcagccctgatcacaccatgagagccaggaacgggtcaccctgctgaagatcactctgtgccctgggggaggagccaagccctcaccccacaaggggcaggtgggggcttggttgctgacccggcccaagtccccacagagcaccttctgtagctccagcttgtctccctggcttctctttgaaggagaaaaatgtaaaatatgcactgagaaagccagccccgcctgcttagtcagccccggcagcagggcagccatgggaactcaggaaaagcaggaaccctttccaaaagcccagagatgccctgggctcagatctgtaattctcccaggagctgtgatagagcaggccacacaaagtccctacgcctccctgctgcctcccccagatgcatgtggtggcatcaccattccccaaattgaatatcagcatgcggcctgaccagggactctttagatgcatgaatttatttatatgaaggctctcacagagacacacacagcacttcagtagcatttgcattcctggttaaagaatcaccaatatttaaaataaaaactttcctgaaattgggactgtcatgttatccagaagggctggtacatccgcccaccatgtccccctgctgggtcaggagccaacacaggaccctgcgtgtgagcgtgcctgacatctcacgcacggccactccagagccggtccctgtccttggaaagctgtgaagccttgcgttgagttccttctcgatactgacggctccgtgctgacattctgagctctggagtcacaccagcgcaggggcgtggaggaactgaggtttggaaggaatgccaggtctcgcacagcttggcctcgagaaggtgagaggaaggcaaaggccagggaggggacccagagaggcctggcacacaaggcccaagcaccaccgtcaacacagcccagtccatacagaaatgggtttcatgcctgaaaagctttttacagaaagatgccgcctgtagccagtgacagccgcaaccctacaggcctcagttccttgcagaggtgaggggtagagagtcagcctccctcccttccagcagcgacccagcttccctccacttccaggtggtgctgggctcaccgagggagcactggtgggtgctctgaaaacccacaggatcccacctccaggcccacctgggtcccatctcactctcttcttctttcaccaattgctaacatagaccttgttgggatcacgatggcttcacaagccagctgttgggtttgctatgtcactgtggctcagtcacatccctgcgtgtatactgtctgcggggcacatatgtatccatttagagctaaaggaatcagtgtacactacagctaatcctaataaatccgatgttttcggaatggcgtc

SEQ ID NO: 9774 - protein, 53 aa, Homo sapiens
MELAKSQDKTLKIYEGAYHVLHKELPEVTNSVFHEINMWVSQRTATAGTASPP

SEQ ID NO: 9775 - DNA, 2874 bp, Homo sapiens
aggacctgaagacccttccagcatgccagaggaaagttcccccaggcggaccccgcagagaattcctggtgttcccaggacaccagactgcaataactggaggcgcctccttcctgcccacccttcgctcacgccccagcgccctctctgaccagcctccgcttggtggccttcctctggccgtgtgatgaggtggttgctgtctccataggggccagctccccagggcagactcacgtgcccctctgaggctcagaaaatgcccagcccttcctcaaaatgagcagccacccatgactttgtgggctccttgttagcctgagaccaggctttgcagaggggcggggggtgaggcttagcccagaaggagaactgagcaggaaaccaaggctcttctctgtcccctgcccttcccctcctgccagggggaggctcaggttggtccccgagtgccgcctgtactcacaaaggctgcctttcctctagagtcactaattttacctgatgctatgagagaatcatattgaagatgaaatgtctaatatataatgtatattttaaagcagagactattttggtggataggtgggagggagcaaggggagtttgagggaatcagagcttgatgctactgtacagaactggacaggttgggccggcagtggtggggccagagggctctgtgctctaggagctaagccagcagcccccgagaggggacttggctgggcctttcctatgggcaaggcccagtgctcttcctgcccaccagggaccatggagcagtggcaccctatggggctatgatccctaggcctgggcctgggcctgcctatggcccagagctaccctgggagtgtcagtgctagcagcacagctacctctggtggcaggagaagagaggcccagcacagcagcaggccaggccttcctgtccaggtctgcatggagcactcggtgacccagagcagggactggaggcacccccagccctgccccaggccacagcaggacaggccgggacaggcctcacccaaggccaaggctggcatcagccaatcattcagagctgaggccctgggcctagcctgcccttctcaggtgccaataccaccccagccctgcccttggcctcactttttcccagcaataagtggggttcaccacccgcctcgggaatactttccccttctaaatgggacttgctgttacctcaggaggctccttagtgcaaatatgaccctggtcagggctttgccaccgttgaagccctgcagaaggtgcaatgtaggggttctggggccacagaggagaggccacttcccaccaggacccccaacatgaagtctaggcctcaggggctcccgcccttcttcctccagcagcgggaactgccactgctctcccaggccctgttctggaggctaaccttggttcctggagagtgtgcccctccaccctccctccagcagccctgatcacaccatgagagccaggaacgggtcaccctgctgaagatcactctgtgccctgggggaggagccaagccctcaccccacaaggggcaggtgggggcttggttgctgacccggcccaagtccccacagagcaccttctgtagctccagcttgtctccctggcttctctttgaaggagaaaaatgtaaaatatgcactgagaaagccagccccgcctgcttagtcagccccggcagcagggcagccatgggaactcaggaaaagcaggaaccctttccaaaagcccagagatgccctgggctcagatctgtaattctcccaggagctgtgatagagcaggccacacaaagtccctacgcctccctgctgcctcccccagatgcatgtggtggcatcaccattccccaaattgaatatcagcatgcggcctgaccagggactctttagatgcatgaatttatttatatgaaggctctcacagagacacacacagcacttcagtagcatttgcattcctggttaaagaatcaccaatatttaaaataaaaactttcctgaaattgggactgtcatgttatccagaagggctggtacatccgcccaccatgtccccctgctgggtcaggagccaacacaggaccctgcgtgtgagcgtgcctgacatctcacgcacggccactccagagccggtccctgtccttggaaagctgtgaagccttgcgttgagttccttctcgatactgacggctccgtgctgacattctgagctctggagtcacaccagcgcaggggcgtggaggaactgaggtttggaaggaatgccaggtctcgcacagcttggcctcgagaaggtgagaggaaggcaaaggccagggaggggacccagagaggcctggcacacaaggcccaagcaccaccgtcaacacagcccagtccatacagaaatgggtttcatgcctgaaaagctttttacagaaagatgccgcctgtagccagtgacagccgcaaccctacaggcctcagttccttgcagaggtgaggggtagagagtcagcctccctcccttccagcagcgacccagcttccctccacttccaggtggtgctgggctcaccgagggagcactggtgggtgctctgaaaacccacaggatcccacctccaggcccacctgggtcccatctcactctcttcttctttcaccaattgctaacatagaccttgttgggatcacgatggcttcacaagccagctgttgggtttgctatgtcactgtggctcagtcacatccctgcgtgtatactgtctgcggggcacatatgtatccatttagagctaaaggaatcagtgtacactacagctaatcctaataaatccgatgttttcggaatggcgtc

SEQ ID NO: 9776 - protein, 42 aa, Homo sapiens [sequence omitted]

SEQ ID NO: 9777 - DNA, 4948 bp, Homo sapiens
gtcgccgcgaagccggtcgcgcgcagctcgtcccggccctggcccgccgcaaacgaggatccgctgcgctcggggaacgcgacagcggcgctcgtggccccggtaactgcctcccggcccctgccccagcccgccagtgccgccgtcaggggtggggagcagcactggggtcccggacacgcccggcgtgggctcccgctacccatgtgtgcgtgtgtgtgtgtgcacggtgtgtgtgcgcgcgtgtccgagtgtgcgcgcgtgtgcgcgcgcgcgcgccctccctgctccttcgcaccagcccccaaaccaacttgtccccatcaactccatctttctagtccccaccttccccggtgcagacacccggcgaagcccacccggttttcccagcggcatttccgatgacagcttcggggctacgtgtcctgtgctgtcggagacgcacaggaagcaaagtttgtgagaagccttgggggcgactttgccttgggcacccgcatttgtgcgtctgcgaggtgcctcggtgtgcgcggagctagtttcccagtttcccgggcccctcccttctccgagcccctctagcgatttgtttaggaaaagtgatgacatgaactagtagtggagaatcgcagcgccgctccccgccctggggagggaggggagccccggagagcctgccggtgggagctggaagcaggctcccggctgagcgccccagcccgaaaggcagggtctgggtgcgggaagagggctcggagctgccttcctgctgccttggggccgcccagatgagggaacagcccgatttgcctggttctgattctccaggctgtcgtggttgtggaatgcaaacgccagcacataatggaaacaggacctgaagacccttccagcatgccagaggaaagttcccccaggcggaccccgcagagcattccctaccaggacctccctcacctggtcaatgcagacggacagtacctcttctgcaggtactggaaacccacaggcacacccaaggccctcatctttgtgtcccatggagccggagagcacagtggccgctatgaagagctggctcggatgctgatggggctggacctgctggtgttcgcccacgaccatgttggccacggacagagcgaaggggagaggatggtagtgtctgacttccacgttttcgtcagggatgtgttgcagcatgtggattccatgcagaaagactaccctgggcttcctgtcttccttctgggccactccatgggaggcgccatcgccatcctcacggccgcagagaggccgggccacttcgccggcatggtactcatttcgcctctggttcttgccaatcctgaatctgcaacaactttcaaggtccttgctgcgaaagtgctcaaccttgtgctgccaaacttgtccctcgggcccatcgactccagcgtgctctctcggaataagacagaggtcgacatttataactcagaccccctgatctgccgggcagggctgaaggtgtgcttcggcatccaactgctgaatgccgtctcacgggtggagcgcgccctccccaagctgactgtgcccttcctgctgctccagggctctgccgatcgcctatgtgacagcaaaggggcctacctgctcatggagttagccaagagccaggacaagactctcaagatttatgaaggtgcctaccatgttctccacaaggagcttcctgaagtcaccaactccgtcttccatgaaataaacatgtgggtctctcaaaggacagccacggcaggaactgcgtccccaccctgaatgcattggccggtgcccggctcatggtctgggggatgcaggcaggggaagggcagagatggcttctcagatatggcttgccaaaaaaaaaaaaaaaaaaaaatcagaaattggagaaatccttagcacaattttctaaaaaataacagacatttttgttatacattagactatcagacactggacctaccttaatggttagacactttatgcaaaaaaagagaaaggtcccaggtgattttccacaaagaatgtgctaaaatgtccactgaaaacaaagccaagcctctgccctgcctctcccagctcccacaagggttccaggaattcctggtgttcccaggacaccagactgcaataactggaggcgcctccttcctgcccacccttcgctcacgccccagcgccctctctgaccagcctccgcttggtggccttcctctggccgtgtgatgaggtggttgctgtctccataggggccagctccccagggcagactcacgtgcccctctgaggctcagaaaatgcccagcccttcctcaaaatgagcagccacccatgactttgtgggctccttgttagcctgagaccaggctttgcagaggggcggggggtgaggcttagcccagaaggagaactgagcaggaaaccaaggctcttctctgtcccctgcccttcccctcctgccagggggaggctcaggttggtccccgagtgccgcctgtactcacaaaggctgcctttcctctagagtcactaattttacctgatgctatgagagaatcatattgaagatgaaatgtctaatatataatgtatattttaaagcagagactattttggtggataggtgggagggagcaaggggagtttgagggaatcagagcttgatgctactgtacagaactggacaggttgggccggcagtggtggggccagagggctctgtgctctaggagctaagccagcagcccccgagaggggacttggctgggcctttcctatgggcaaggcccagtgctcttcctgcccaccagggaccatggagcagtggcaccctatggggctatgatccctaggcctgggcctgggcctgcctatggcccagagctaccctgggagtgtcagtgctagcagcacagctacctctggtggcaggagaagagaggcccagcacagcagcaggccaggccttcctgtccaggtctgcatggagcactcggtgacccagagcagggactggaggcacccccagccctgccccaggccacagcaggacaggccgggacaggcctcacccaaggccaaggctggcatcagccaatcattcagagctgaggccctgggcctagcctgcccttctcaggtgccaataccaccccagccctgcccttggcctcactttttcccagcaataagtggggttcaccacccgcctcgggaatactttccccttctaaatgggacttgctgttacctcaggaggctccttagtgcaaatatgaccctggtcagggctttgccaccgttgaagccctgcagaaggtgcaatgtaggggttctggggccacagaggagaggccacttcccaccaggacccccaacatgaagtctaggcctcaggggctcccgcccttcttcctccagcagcgggaactgccactgctctcccaggccctgttctggaggctaaccttggttcctggagagtgtgcccctccaccctccctccagcagccctgatcacaccatgagagccaggaacgggtcaccctgctgaagatcactctgtgccctgggggaggagccaagccctcaccccacaaggggcaggtgggggcttggttgctgacccggcccaagtccccacagagcaccttctgtagctccagcttgtctccctggcttctctttgaaggagaaaaatgtaaaatatgcactgagaaagccagccccgcctgcttagtcagccccggcagcagggcagccatgggaactcaggaaaagcaggaaccctttccaaaagcccagagatgccctgggctcagatctgtaattctcccaggagctgtgatagagcaggccacacaaagtccctacgcctccctgctgcctcccccagatgcatgtggtggcatcaccattccccaaattgaatatcagcatgcggcctgaccagggactctttagatgcatgaatttatttatatgaaggctctcacagagacacacacagcacttcagtagcatttgcattcctggttaaagaatcaccaatatttaaaataaaaactttcctgaaattgggactgtcatgttatccagaagggctggtacatccgcccaccatgtccccctgctgggtcaggagccaacacaggaccctgcgtgtgagcgtgcctgacatctcacgcacggccactccagagccggtccctgtccttggaaagctgtgaagccttgcgttgagttccttctcgatactgacggctccgtgctgacattctgagctctggagtcacaccagcgcaggggcgtggaggaactgaggtttggaaggaatgccaggtctcgcacagcttggcctcgagaaggtgagaggaaggcaaaggccagggaggggacccagagaggcctggcacacaaggcccaagcaccaccgtcaacacagcccagtccatacagaaatgggtttcatgcctgaaaagctttttacagaaagatgccgcctgtagccagtgacagccgcaaccctacaggcctcagttccttgcagaggtgaggggtagagagtcagcctccctcccttccagcagcgacccagcttccctccacttccaggtggtgctgggctcaccgagggagcactggtgggtgctctgaaaacccacaggatcccacctccaggcccacctgggtcccatctcactctcttcttctttcaccaattgctaacatagaccttgttgggatcacgatggcttcacaagccagctgttgggtttgctatgtcactgtggctcagtcacatccctgcgtgtatactgtctgcggggcacatatgtatccatttagagctaaaggaatcagtgtacactacagctaatcctaataaatccgatgttttcggaatggcgtc

SEQ ID NO: 9778 - protein, 313 aa, Homo sapiens; identical to SEQ ID NO: 848

SEQ ID NO: 9779 - DNA, 4138 bp, Homo sapiens
gcccccgccgccgagccggcccagggataaagtggcggcgcagacgccgcaccctgtcgccgcgaagccggtcgcgcgcagctcgtcccggccctggcccgccgcaaacgaggatccgctgcgctcggggaacgcgacagcggcgctcgtggccccggacctgaagacccttccagcatgccagaggaaagttcccccaggcggaccccgcagagcattccctaccaggacctccctcacctggtcaatgcagacggacagtacctcttctgcaggtactggaaacccacaggcacacccaaggccctcatctttgtgtcccatggagccggagagcacagtggccgctatgaagagctggctcggatgctgatggggctggacctgctggtgttcgcccacgaccatgttggccacggacagagcgaaggggagaggatggtagtgtctgacttccacgttttcgtcagggatgtgttgcagcatgtggattccatgcagaaagactaccctgggcttcctgtcttccttctgggccactccatgggaggcgccatcgccatcctcacggccgcagagaggccgggccacttcgccggcatggtactcatttcgcctctggttcttgccaatcctgaatctgcaacaactttcaaggtcgacatttataactcagaccccctgatctgccgggcagggctgaaggtgtgcttcggcatccaactgctgaatgccgtctcacgggtggagcgcgccctccccaagctgactgtgcccttcctgctgctccagggctctgccgatcgcctatgtgacagcaaaggggcctacctgctcatggagttagccaagagccaggacaagactctcaagatttatgaaggtgcctaccatgttctccacaaggagcttcctgaagtcaccaactccgtcttccatgaaataaacatgtgggtctctcaaaggacagccacggcaggaactgcgtccccaccctgaatgcattggccggtgcccggctcatggtctgggggatgcaggcaggggaagggcagagatggcttctcagatatggcttgccaaaaaaaaaaaaaaaaaaaaatcagaaattggagaaatccttagcacaattttctaaaaaataacagacatttttgttatacattagactatcagacactggacctaccttaatggttagacactttatgcaaaaaaagagaaaggtcccaggtgattttccacaaagaatgtgctaaaatgtccactgaaaacaaagccaagcctctgccctgcctctcccagctcccacaagggttccaggaattcctggtgttcccaggacaccagactgcaataactggaggcgcctccttcctgcccacccttcgctcacgccccagcgccctctctgaccagcctccgcttggtggccttcctctggccgtgtgatgaggtggttgctgtctccataggggccagctccccagggcagactcacgtgcccctctgaggctcagaaaatgcccagcccttcctcaaaatgagcagccacccatgactttgtgggctccttgttagcctgagaccaggctttgcagaggggcggggggtgaggcttagcccagaaggagaactgagcaggaaaccaaggctcttctctgtcccctgcccttcccctcctgccagggggaggctcaggttggtccccgagtgccgcctgtactcacaaaggctgcctttcctctagagtcactaattttacctgatgctatgagagaatcatattgaagatgaaatgtctaatatataatgtatattttaaagcagagactattttggtggataggtgggagggagcaaggggagtttgagggaatcagagcttgatgctactgtacagaactggacaggttgggccggcagtggtggggccagagggctctgtgctctaggagctaagccagcagcccccgagaggggacttggctgggcctttcctatgggcaaggcccagtgctcttcctgcccaccagggaccatggagcagtggcaccctatggggctatgatccctaggcctgggcctgggcctgcctatggcccagagctaccctgggagtgtcagtgctagcagcacagctacctctggtggcaggagaagagaggcccagcacagcagcaggccaggccttcctgtccaggtctgcatggagcactcggtgacccagagcagggactggaggcacccccagccctgccccaggccacagcaggacaggccgggacaggcctcacccaaggccaaggctggcatcagccaatcattcagagctgaggccctgggcctagcctgcccttctcaggtgccaataccaccccagccctgcccttggcctcactttttcccagcaataagtggggttcaccacccgcctcgggaatactttccccttctaaatgggacttgctgttacctcaggaggctccttagtgcaaatatgaccctggtcagggctttgccaccgttgaagccctgcagaaggtgcaatgtaggggttctggggccacagaggagaggccacttcccaccaggacccccaacatgaagtctaggcctcaggggctcccgcccttcttcctccagcagcgggaactgccactgctctcccaggccctgttctggaggctaaccttggttcctggagagtgtgcccctccaccctccctccagcagccctgatcacaccatgagagccaggaacgggtcaccctgctgaagatcactctgtgccctgggggaggagccaagccctcaccccacaaggggcaggtgggggcttggttgctgacccggcccaagtccccacagagcaccttctgtagctccagcttgtctccctggcttctctttgaaggagaaaaatgtaaaatatgcactgagaaagccagccccgcctgcttagtcagccccggcagcagggcagccatgggaactcaggaaaagcaggaaccctttccaaaagcccagagatgccctgggctcagatctgtaattctcccaggagctgtgatagagcaggccacacaaagtccctacgcctccctgctgcctcccccagatgcatgtggtggcatcaccattccccaaattgaatatcagcatgcggcctgaccagggactctttagatgcatgaatttatttatatgaaggctctcacagagacacacacagcacttcagtagcatttgcattcctggttaaagaatcaccaatatttaaaataaaaactttcctgaaattgggactgtcatgttatccagaagggctggtacatccgcccaccatgtccccctgctgggtcaggagccaacacaggaccctgcgtgtgagcgtgcctgacatctcacgcacggccactccagagccggtccctgtccttggaaagctgtgaagccttgcgttgagttccttctcgatactgacggctccgtgctgacattctgagctctggagtcacaccagcgcaggggcgtggaggaactgaggtttggaaggaatgccaggtctcgcacagcttggcctcgagaaggtgagaggaaggcaaaggccagggaggggacccagagaggcctggcacacaaggcccaagcaccaccgtcaacacagcccagtccatacagaaatgggtttcatgcctgaaaagctttttacagaaagatgccgcctgtagccagtgacagccgcaaccctacaggcctcagttccttgcagaggtgaggggtagagagtcagcctccctcccttccagcagcgacccagcttccctccacttccaggtggtgctgggctcaccgagggagcactggtgggtgctctgaaaacccacaggatcccacctccaggcccacctgggtcccatctcactctcttcttctttcaccaattgctaacatagaccttgttgggatcacgatggcttcacaagccagctgttgggtttgctatgtcactgtggctcagtcacatccctgcgtgtatactgtctgcggggcacatatgtatccatttagagctaaaggaatcagtgtacactacagctaatcctaataaatccgatgttttcggaatggcgtc

SEQ ID NO: 9780 - protein, 273 aa, Homo sapiens
MPEESSPRRTPQSIPYQDLPHLVNADGQYLFCRYWKPTGTPKALIFVSHGAGEHSGRYEELARMLMGLDLLVFAHDHVGHGQSEGERMVVSDFHVFVRDVLQHVDSMQKDYPGLPVFLLGHSMGGAIAILTAAERPGHFAGMVLISPLVLANPESATTFKVDIYNSDPLICRAGLKVCFGIQLLNAVSRVERALPKLTVPFLLLQGSADRLCDSKGAYLLMELAKSQDKTLKIYEGAYHVLHKELPEVTNSVFHEINMWVSQRTATAGTASPP

SEQ ID NO: 9781 - DNA, 4228 bp, Homo sapiens
gcccccgccgccgagccggcccagggataaagtggcggcgcagacgccgcaccctgtcgccgcgaagccggtcgcgcgcagctcgtcccggccctggcccgccgcaaacgaggatccgctgcgctcggggaacgcgacagcggcgctcgtggccccggacctgaagacccttccagcatgccagaggaaagttcccccaggcggaccccgcagagcattccctaccaggacctccctcacctggtcaatgcagacggacagtacctcttctgcaggtactggaaacccacaggcacacccaaggccctcatctttgtgtcccatggagccggagagcacagtggccgctatgaagagctggctcggatgctgatggggctggacctgctggtgttcgcccacgaccatgttggccacggacagagcgaaggggagaggatggtagtgtctgacttccacgttttcgtcagggatgtgttgcagcatgtggattccatgcagaaagactaccctgggcttcctgtcttccttctgggccactccatgggaggcgccatcgccatcctcacggccgcagagaggccgggccacttcgccggcatggtactcatttcgcctctggttcttgccaatcctgaatctgcaacaactttcaaggtccttgctgcgaaagtgctcaaccttgtgctgccaaacttgtccctcgggcccatcgactccagcgtgctctctcggaataagacagaggtcgacatttataactcagaccccctgatctgccgggcagggctgaaggtgtgcttcggcatccaactgctgaatgccgtctcacgggtggagcgcgccctccccaagctgactgtgcccttcctgctgctccagggctctgccgatcgcctatgtgacagcaaaggggcctacctgctcatggagttagccaagagccaggacaagactctcaagatttatgaaggtgcctaccatgttctccacaaggagcttcctgaagtcaccaactccgtcttccatgaaataaacatgtgggtctctcaaaggacagccacggcaggaactgcgtccccaccctgaatgcattggccggtgcccggctcatggtctgggggatgcaggcaggggaagggcagagatggcttctcagatatggcttgccaaaaaaaaaaaaaaaaaaaaatcagaaattggagaaatccttagcacaattttctaaaaaataacagacatttttgttatacattagactatcagacactggacctaccttaatggttagacactttatgcaaaaaaagagaaaggtcccaggtgattttccacaaagaatgtgctaaaatgtccactgaaaacaaagccaagcctctgccctgcctctcccagctcccacaagggttccaggaattcctggtgttcccaggacaccagactgcaataactggaggcgcctccttcctgcccacccttcgctcacgccccagcgccctctctgaccagcctccgcttggtggccttcctctggccgtgtgatgaggtggttgctgtctccataggggccagctccccagggcagactcacgtgcccctctgaggctcagaaaatgcccagcccttcctcaaaatgagcagccacccatgactttgtgggctccttgttagcctgagaccaggctttgcagaggggcggggggtgaggcttagcccagaaggagaactgagcaggaaaccaaggctcttctctgtcccctgcccttcccctcctgccagggggaggctcaggttggtccccgagtgccgcctgtactcacaaaggctgcctttcctctagagtcactaattttacctgatgctatgagagaatcatattgaagatgaaatgtctaatatataatgtatattttaaagcagagactattttggtggataggtgggagggagcaaggggagtttgagggaatcagagcttgatgctactgtacagaactggacaggttgggccggcagtggtggggccagagggctctgtgctctaggagctaagccagcagcccccgagaggggacttggctgggcctttcctatgggcaaggcccagtgctcttcctgcccaccagggaccatggagcagtggcaccctatggggctatgatccctaggcctgggcctgggcctgcctatggcccagagctaccctgggagtgtcagtgctagcagcacagctacctctggtggcaggagaagagaggcccagcacagcagcaggccaggccttcctgtccaggtctgcatggagcactcggtgacccagagcagggactggaggcacccccagccctgccccaggccacagcaggacaggccgggacaggcctcacccaaggccaaggctggcatcagccaatcattcagagctgaggccctgggcctagcctgcccttctcaggtgccaataccaccccagccctgcccttggcctcactttttcccagcaataagtggggttcaccacccgcctcgggaatactttccccttctaaatgggacttgctgttacctcaggaggctccttagtgcaaatatgaccctggtcagggctttgccaccgttgaagccctgcagaaggtgcaatgtaggggttctggggccacagaggagaggccacttcccaccaggacccccaacatgaagtctaggcctcaggggctcccgcccttcttcctccagcagcgggaactgccactgctctcccaggccctgttctggaggctaaccttggttcctggagagtgtgcccctccaccctccctccagcagccctgatcacaccatgagagccaggaacgggtcaccctgctgaagatcactctgtgccctgggggaggagccaagccctcaccccacaaggggcaggtgggggcttggttgctgacccggcccaagtccccacagagcaccttctgtagctccagcttgtctccctggcttctctttgaaggagaaaaatgtaaaatatgcactgagaaagccagccccgcctgcttagtcagccccggcagcagggcagccatgggaactcaggaaaagcaggaaccctttccaaaagcccagagatgccctgggctcagatctgtaattctcccaggagctgtgatagagcaggccacacaaagtccctacgcctccctgctgcctcccccagatgcatgtggtggcatcaccattccccaaattgaatatcagcatgcggcctgaccagggactctttagatgcatgaatttatttatatgaaggctctcacagagacacacacagcacttcagtagcatttgcattcctggttaaagaatcaccaatatttaaaataaaaactttcctgaaattgggactgtcatgttatccagaagggctggtacatccgcccaccatgtccccctgctgggtcaggagccaacacaggaccctgcgtgtgagcgtgcctgacatctcacgcacggccactccagagccggtccctgtccttggaaagctgtgaagccttgcgttgagttccttctcgatactgacggctccgtgctgacattctgagctctggagtcacaccagcgcaggggcgtggaggaactgaggtttggaaggaatgccaggtctcgcacagcttggcctcgagaaggtgagaggaaggcaaaggccagggaggggacccagagaggcctggcacacaaggcccaagcaccaccgtcaacacagcccagtccatacagaaatgggtttcatgcctgaaaagctttttacagaaagatgccgcctgtagccagtgacagccgcaaccctacaggcctcagttccttgcagaggtgaggggtagagagtcagcctccctcccttccagcagcgacccagcttccctccacttccaggtggtgctgggctcaccgagggagcactggtgggtgctctgaaaacccacaggatcccacctccaggcccacctgggtcccatctcactctcttcttctttcaccaattgctaacatagaccttgttgggatcacgatggcttcacaagccagctgttgggtttgctatgtcactgtggctcagtcacatccctgcgtgtatactgtctgcggggcacatatgtatccatttagagctaaaggaatcagtgtacactacagctaatcctaataaatccgatgttttcggaatggcgtc

SEQ ID NO: 9782 - protein, 303 aa, Homo sapiens; identical to SEQ ID NO: 846

SEQ ID NO: 9783 - DNA, 1113 bp, Homo sapiens
agccctcaccccacaaggggcaggtgggggcttggttgctgacccggcccaagtccccacagagcaccttctgtagctccagcttgtctccctggcttctctttgaaggagaaaaatgtaaaatatgcactgagaaagccagccccgcctgcttagtcagccccggcagcagggcagccatgggaactcaggaaaagcaggaaccctttccaaaagcccagagatgccctgggctcagatctgtaattctcccaggagctgtgatagagcaggccacacaaagtccctacgcctccctgctgcctcccccagatgcatgtggtggcatcaccattccccaaattgaatatcagcatgcggcctgaccagggactctttagatgcatgaatttatttatatgaaggctctcacagagacacacacagcacttcagtagcatttgcattcctggttaaagaatcaccaatatttaaaataaaaactttcctgaaattgggactgtcatgttatccagaagggctggtacatccgcccaccatgtccccctgctgggtcaggagccaacacaggaccctgcgtgtgagcgtgcctgacatctcacgcacggccactccagagccggtccctgtccttggaaagctgtgaagccttgcgttgagttccttctcgatactgacggctccgtgctgacattctgagctctggagtcacaccagcgcaggggcgtggaggaactgaggtttggaaggaatgccaggtctcgcacagcttggcctcgagaaggtgagaggaaggcaaaggccagggaggggacccagagaggctgggctcaccgagggagcactggtgggtgctctgaaaacccacaggatcccacctccaggcccacctgggtcccatctcactctcttcttctttcaccaattgctaacatagaccttgttgggatcacgatggcttcacaagccagctgttgggtttgctatgtcactgtggctcagtcacatccctgcgtgtatactgtctgcggggcacatatgtatccatttagagctaaaggaatcagtgtacactacagctaatcctaataaatccgatgttttcggaatggc

SEQ ID NO: 9784 - protein, 61 aa, Homo sapiens
MPGLAQLGLEKVRGRQRPGRGPREAGLTEGALVGALKTHRIPPPGPPGSHLTLFFFHQLLT

SEQ ID NO: 9785 - DNA, 1034 bp, Homo sapiens
agccctcaccccacaaggggcaggtgggggcttggttgctgacccggcccaagtccccacagagcaccttctgtagctccagcttgtctccctggcttctctttgaaggagaaaaatgtaaaatatgcactgagaaagccagccccgcctgcttagtcagccccggcagcagggcagccatgggaactcaggaaaagcaggaaccctttccaaaagcccagagatgccctgggctcagatctgtaattctcccaggagctgtgatagagcaggccacacaaagtccctacgcctccctgctgcctcccccagatgcatgtggtggcatcaccattccccaaattgaatatcagcatgcggcctgaccagggactctttagatgcatgaatttatttatatgaaggctctcacagagacacacacagcacttcagtagcatttgcattcctggttaaagaatcaccaatatttaaaataaaaactttcctgaaattgggactgtcatgttatccagaagggctggtacatccgcccaccatgtccccctgctgggtcaggagccaacacaggaccctgcgtgtgagcgtgcctgacatctcacgcacggccactccagagccggtccctgtccttggaaagctgtgaagccttgcgttgagttccttctcgatactgacggctccgtgctgacattctgagctctggagtcacaccagcgcaggggcgtggaggaactgaggtttggaaggaatgccaggtctcgcacagcttggcctcgagaaggtgagaggaaggcaaaggccagggaggggacccagagaggcctggcacacaaggcccaagcaccaccgtcaacacagcccagtccatacagaaatgggtttcatgcctgaaaagctttttacagaaagatgccgctgtggctcagtcacatccctgcgtgtatactgtctgcggggcacatatgtatccatttagagctaaaggaatcagtgtacactacagctaatcctaataaatccgatgttttcgg

SEQ ID NO: 9786 - protein, 75 aa, Homo sapiens
MPGLAQLGLEKVRGRQRPGRGPREAWHTRPKHHRQHSPVHTEMGFMPEKLFTERCRCGSVTSLRVYCLRGTYVSI

SEQ ID NO: 9787 - DNA, 1368 bp, Homo sapiens
ccagcaataagtggggttcaccacccgcctcgggaatactttccccttctaaatgggacttgctgttacctcaggaggctccttagtgcaaatatgaccctggtcagggctttgccaccgttgaagccctgcagaaggtgcaatgtaggggttctggggccacagaggagaggccacttcccaccaggacccccaacatgaagtctaggcctcaggggctcccgcccttcttcctccagcagcgggaactgccactgctctcccaggccctgttctggaggctaaccttggttcctggagagtgtgcccctccaccctccctccagcagccctgatcacaccatgagagccaggaacgggtcaccctgctgaagatcactctgtgccctgggggaggagccaagccctcaccccacaaggggcaggtgggggcttggttgctgacccggcccaagtccccacagagcaccttctgtagctccagcttgtctccctggcttctctttgaaggagaaaaatgtaaaatatgcactgagaaagccagccccgcctgcttagtcagccccggcagcagggcagccatgggaactcaggaaaagcaggaaccctttccaaaagcccagagatgccctgggctcagatctgtaattctcccaggagctgtgatagagcaggccacacaaagtccctacgcctccctgctgcctcccccagatgcatgtggtggcatcaccattccccaaattgaatatcagcatgcggcctgaccagggactctttagatgcatgaatttatttatatgaaggctctcacagagacacacacagcacttcagtagcatttgcattcctggttaaagaatcaccaatatttaaaataaaaactttcctgaaattgggactgtcatgttatccagaagggctggtacatccgcccaccatgtccccctgctgggtcaggagccaacacaggaccctgcgtgtgagcgtgcctgacatctcacgcacggccactccagagccggtccctgtccttggaaagctgtgaagccttgcgttgagttccttctcgatactgacggctccgtgctgacattctgagctctggagtcacaccagcgcaggggcgtggaggaactgaggtttggaaggaatgccaggtctcactctcttcttctttcaccaattgctaacatagaccttgttgggatcacgatggcttcacaagccagctgttgggtttgctatgtcactgtggctcagtcacatccctgcgtgtatactgtctgcggggcacatatgtatccatttagagctaaaggaatcagtgtacactacagctaatcctaataaatccgatgttttcgg

SEQ ID NO: 9788 - protein, 61 aa, Homo sapiens
MGTQEKQEPFPKAQRCPGLRSVILPGAVIEQATQSPYASLLPPPDACGGITIPQIEYQHAA

SEQ ID NO: 9789 - DNA, 1293 bp, Homo sapiens
gcccagtgctcttcctgcccaccagggaccatggagcagtggcaccctatggggctatgatccctaggcctgggcctgggcctgcctatggcccagagctaccctgggagtgtcagtgctagcagcacagctacctctggtggcaggagaagagaggcccagcacagcagcaggccaggccttcctgtccaggtctgcatggagcactcggtgacccagagcagggactggaggcacccccagccctgccccaggccacagcaggacaggccgggacaggcctcacccaaggccaaggctggcatcagccaatcattcagagctgaggccctgggcctagcctgcccttctcaggtgccaataccaccccagccctgcccttggcctcactttttcccagcaataagtggggttcaccacccgcctcgggaatactttccccttctaaatgggacttgctgttacctcaggaggctccttagtgcaaatatgaccctggtcagggctttgccaccgttgaagccctgcagaaggtgcaatgtaggggttctggggccacagaggagaggccacttcccaccaggacccccaacatgaagtctaggcctcaggggctcccgcccttcttcctccagcagcgggaactgccactgctctcccaggccctgttctggaggctaaccttggttcctggagagtgtgcccctccaccctccctccagcagccctgatcacaccatgagagccaggaacgggtcaccctgctgaagatcactctgtgccctgggggaggagccaagccctcaccccacaaggggcaggtgggggcttggttgctgacccggcccaagtccccacagagcaccttctgtagctccagcttgtctccctggcttctctttgaaggagaaaaatgtaaaatatgcactgagaaagccagccccgcctgcttagtcagccccggcagcagggcagccatgggaactcaggaaaagcaggaaccctttccaaaagcccagagatgccctgggctcagatctgtaattctcccaggagctgtgatagagcaggccacacaaagtcccatctcactctcttcttctttcaccaattgctaacatagaccttgttgggatcacgatggcttcacaagccagctgttgggtttgctatgtcactgtggctcagtcacatccctgcgtgtatactgtctgcggggcacatatgtatccatttagagctaaaggaatcagtgtacactacagctaatcctaataaatccgatgttttcgg

SEQ ID NO: 9790 - protein, 46 aa, Homo sapiens
MGTQEKQEPFPKAQRCPGLRSVILPGAVIEQATQSPISLSSSFTNC

SEQ ID NO: 9791 - DNA, 524 bp, Homo sapiens
caagttgcagcctgaagtaggaaggaaatatggagatgctggcatcctctctccaataaagcattgaggttaaagactggaatctgaaaatacacagcaatttcaggggaatctgctgaaactggaagattgtttttgaacttctgacctcaggtgatccacccacattggcctcccaaagtgctgaggttacaggcatgagccactgcgcctggcctgccttctgtagcttttgtctgtaaaccaagtactacagtagaaagaaggtgggttttgccacctattatataataaggacatttttttcaaatggtaactcccgtgctgacaaggatgtggcaaaactcaaacttccatactttgctgatgacaatgaaatgtcaagttgaaaagcatttttagttctatgtattagaactcatgaaaatattcgtatcttttgatctagaaatcccattttggtaagtttatcttgagaattccatagacatctgtaaaaagatgttcatttcagtgttatttat

SEQ ID NO: 9792 - protein, 30 aa, Homo sapiens
MVTPVLTRMWQNSNFHTLLMTMKCQVEKHF

SEQ ID NO: 9793 - DNA, 815 bp, Homo sapiens
tgagtgtgtggagggaccagaggtgaggatcactgatctggcattgccctgccatagcagtggtgtttctgggtgtctggattacagcctcaagacaatcaccaccaccactgagacatccctgggatggagaaaagcgaagatcagaaatagctcccaggaatggttttcattatcttctgccattgttgccttctctgaaacacactgctctcggtcattcggtaggctgactgcaaaaatggcttcaactccccctcctccttccatttgcacctgtccatgccgctctgcaaagtgccctgcagctcctcccagcaaggctggagtctgtgcttgtgactcactcggaccaacacaatgcagcaaaggtgatgtgtgccacgcctgagcctgggcttgaaaggtcttgcgtcttctgcttggtctcttgaaaccctgctgccaccaggtgaacaagcccaagctaacctactgggtgatcagagacacatcctagtcacctctcttgcatctgtcaccccagccaacagccagatgattcccagacacagctgccatgcgacctgcagctgaccacacatgtgtgaggggcccagctgagatgagagaacagcccagctgagcccagacgcatgcactggcttgaagcatcatgagatagataaatggctgttgtctgaagccggaacacctgattcgtatggacagaaggctgtaagaggaatcattacaaaaatgagagacacaatagtcaaaggtgtaaataaaaaagaagccccaaaagaaaacaagaagccagaagagaagtaacg

SEQ ID NO: 9794 - protein, 49 aa, Homo sapiens
MASTPPPPSICTCPCRSAKCPAAPPSKAGVCACDSLGPTQCSKGDVCHA

SEQ ID NO: 9795 - DNA, 435 bp, Homo sapiens
cactgcaggtccgtgggtcagctggggtgtctccgctcctcgtgtctcttatcctccttggacctagccaggaatgctctcatgggaatggcagaggcaaagatggttgggagaagaacaatcaccaaaaatgcagagtggggagcgggcctgagtgttggacctctccttaaacaaaccttcctgcagcctccaggtcaccatccttgtcacctctactgccagagacatcgagtgccttgaagtcctgggctttccggggattctgtggggtatttccagtgaagtcccactctcctcaaccctcagaggatctctggaaggccacacagaacctgggacaggaaccaaggcacagggatgggatggagactcacaattcactgttaacattttgattctcatttgaatttttaacacacgcatctatcactt

SEQ ID NO: 9796 - protein, 53 aa, Homo sapiens
MGMAEAKMVGRRTITKNAEWGAGLSVGPLLKQTFLQPPGHHPCHLYCQRHRVP

SEQ ID NO: 9797 - DNA, 4562 bp, Homo sapiens
gcgggggacgctcagtagggtacgggacgcgcgcggggagaccctgtgcagcgacaccggggctgtagtcgccgtctggaaccagcgcgggaataggtgcgcaggcgcacagtggctggagggcagcggcggcgtggtctcgggccacttccaagcagagggcagcacctgtcccctcggaggcgctgccagcgccctccctcctcctccgcagggcgcgggacctctatttatatcgcccagccagcacaggcccatattgggcagtggcctcagtcaggcccgctggccgccctgccacacggtagcgtccaagccaggtcgtggcccagcgagtggggacgcgccccgaaccaggcagcaccttcgtatcatgatagaggaaaccagttttgggaaaagttatgcacagctgaatttcgagaactctatgctctgggcagtattcataatgacctttatgttataggaggacagatgaaaattaaaaaccagtatcttattacaaactgtgttgataagtactctgtagaacgggacaattggaaaagggtgtctccccttccactgcaattggcatgtcatgctgtagtgacagtgaataataaactttatgtaattggaggctggacccctcagatggatcttcctgatgaagaacctgatcgattaagcaacaaactgttgcagtatgaccccagccaagatcaatggagtgtgcgggcacccatgaagtactctaagtaccgattcagtacagctgtagtcaacagtgagatttatgttttgggtggcattggctgtgtaggtcaagacaagggccaggttcgaaaatgccttgacgtggtggagatctacaacccagatggggacttttggcgagagggccctcccatgccaagtcccctcctctcactccgcaccaattccaccaatgcaggggcagtggatgggaaactctatgtctgcgggggattccatggagcagatcgccatgaggttatctccaaagaaatattggaactggacccatgggaaaaccagtggaatgttgtagccatcaacgtcctcatgcatgacagctatgatgtctgcctagtagccaggatgaatccccgagacctcatccccccgccttcagatttggtggaagaaggcaatgagcactaaggtgaccttgctggaggacctcctgctgttctgcaaacaaggccttcagaacggagagggcccacagcatctctgtcatgccagtcatgtgcactgcatgcgtagtggcctgtgtgtgaagaagcagtgtgtgctgggcactgggtggggagcatggggagtctcccttcagggacttcccagcctgatagggtaaataagacactacaaagaagaggtgatgacggccacaggaggggcacagggccacaggagagcagcagagggagggtctcactctgctggggacccatgaacagcactgccaaggagcagaccttttattgggtccccaaaaggatgaggaggaagtggtcccatgggtgcagtcaatgatgagttcatggaaacagccaagcaagggcccagagacagaaagctcgtgcctgtctgcagtatcctggctgggccagattgcctggggcacagggtttgtggtcaaggctggaaaagtaggttgtagctagatgaccaacgcctgaaagaatgaggagttggacctggtctgtaagccagggaattgtctcaaaatcgtgcattaagggagacttctctctgtgctctgttccagcttcagtcttataaacactgaccattctccttcagaatccccttctactgaagcaacgccacccagcagcagggctagctgtactaccagcccctaacaaccaaggcactcaagccagaccacagtggccaagaatcctgccctgggctgactctgtccgggacagggatgtggggttctgcagcctggtccactccggggctggcagggagtgtcctggagtgggctgacccaggctgcctttgcccacctctcagacacatacaaccatctgcagggtagtcctggctgaacaggactcgcccaagccacccaagccagggacagagaaggctctggctgaggacaggggaagaagcatctcctccagctgctgccaaccccatggcccggcctttgcaataaagatggagccacccacttcagcccacaattgagcataatcagaagacagtcactcccaaaatatatgttagaaataacatttaaatgacacatgggaagtccgtctatcttacttcccgtctctaattctggaagcacagtggattcaatgagggcatcttcatagctcttcttcagcaacttctccaaagagtttcacattgcacaaggctcttttggaagcaggagtggtcagtaaattcagagggagacaaaccctaagtagagacagctttctttggtgctgagctgtgtgattgtgatgaccgctagcctgtgcccctaggttccagctgcccaccaggcaggacaggcaggtcttgccaaaactggagcctgttggaaacctatttctgccaccaaggagagggaccaggagacccagcgtaggttggccccaagtaggctcaactcgggagggtgggggtcccgcctttctcttcgcacttgtgccccaagtgcactcacagtacctggcatgtgggtgacctcttgggtggccggcatggggcagtgtttctcaatcagagggcctgggccccgagcacgtccaggaatctgagttaaagtgagcttactctttccccagtggatgatcatgatctgtgcattctttttcttgctacaaagatgttcctcctagctgctgtgttggctgtcggcggccagggttgaggacggcctccacagggcctccacttccctccattcctcttcacatagtcactccacctgctccacctgcttgaaaagtccagaaagctgccgcgtctccctggctcaaggaggccttgttggcatgtcatggcacatctcctagatgttttgggttcaagatctgggttccagcccccgctctgctacttagctaaccatgtgaacttgggcaagatgacctttctaaagcctcatttccctcatatgcagagtgggaaggaaaatattaatacatactttatagggttggtatgaggattaagtgctgagcaaagtgcctgtgaaatcctgaaataataagcatgttttagctgccattattatcatcactgtcattatcattgcagtcagcacttcccaaagcaaggtgcccaaaacagactcagtgctttagggaagtggggcagatgtgcatatggcttgtgacggttctttctttttttttttttttttgagacggagtctctctctctcgccaggctggagtgcagtgcagtggcacgatctcagcccactgcaacctccgcctcccaggttcaagtgattctcctgcctcagcctcccaagtagctgggattacaggcgcccaccaccacacccagctaatttttgtatttttagtagagacggggtttcaccatgttggccaggatggtctcaatctcttgacctcgtgatctgcccgcctcggcctcccaaagtgctgggattacaggcatgagcccctgcacctggctgagatggttcttaatttcccataccctgttgcttggctcctccagttggcggctgagagttaagcaagggtttactcggatctgaggcccccgatgccctcaatggacacattcaggaccctgtggcagctcagcagaggcacctgagggtcacgctaggtgagaccatcgcccgcctgtgggaggcaagataagtgggtaaacatcattcctgtctaatgcgaggtctgggcagtgtcccagtggaactttccagagagtgccaagggaggaccgagaaggggcatgacctctgctggagccaggagggcagtgaccaggagctggcttagcactgaagggaagcaggcatcaagggcaggatttctcaaacttcttctgaggaatccccgaggtcgaaaccggtgcttcacagatttcagatgtctgatcttgatttttctttgattccatacaacagattgcttgcctgggttagtgcttattttaagttcttggtgcttcttgtctgacttctgtatttgcaattaaaaacaacatgaccctccccacctgcagccagatatcgttagaaattcaacttcgaaatatattcctatcactcctgttttcactttaatagaaggctgttgcagtactgcatgatgggctcttataaaacttctactatctgctaattcttatctttgtgacaggattgtttgacactgagcaaggaaacacaataaggaagtaatttggatgctaggctggcagaagcctgcagctgtcaaccacagcctgccccagtgtgttcaacacggtggcattgttctccctgacttcataatgagcaaatgtttcacatttgaacttaaggaataaatttttactaataaaagatc

SEQ ID NO: 9798 - protein, 230 aa, Homo sapiens
MKIKNQYLITNCVDKYSVERDNWKRVSPLPLQLACHAVVTVNNKLYVIGGWTPQMDLPDEEPDRLSNKLLQYDPSQDQWSVRAPMKYSKYRFSTAVVNSEIYVLGGIGCVGQDKGQVRKCLDVVEIYNPDGDFWREGPPMPSPLLSLRTNSTNAGAVDGKLYVCGGFHGADRHEVISKEILELDPWENQWNVVAINVLMHDSYDVCLVARMNPRDLIPPPSDLVEEGNEH

SEQ ID NO: 9799 - DNA, 4132 bp, Homo sapiens
agtgtgtgtcaaaaatatatgatggaccacatggatgcctccaactgtttaggtatctattattttgcaaagcagattggagctgaagatttatctgatcgatcaaagaaatatttatatcagcactttgccgaggtatcatgatagaggaaaccagttttgggaaaagttatgcacagctgaatttcgagaactctatgctctgggcaatggatcttcctgatgaagaacctgatcgattaagcaacaaactgttgcagtatgaccccagccaagatcaatggagtgtgcgggcacccatgaagtactctaagtaccgattcagtacagctgtagtcaacagtgagatttatgttttgggtggcattggctgtgtaggtcaagacaagggccaggttcgaaaatgccttgacgtggtggagatctacaacccagatggggacttttggcgagagggccctcccatgccaagtcccctcctctcactccgcaccaattccaccaatgcaggggcagtggatgggaaactctatgtctgcgggggattccatggagcagatcgccatgaggttatctccaaagaaatattggaactggacccatgggaaaaccagtggaatgttgtagccatcaacgtcctcatgcatgacagctatgatgtctgcctagtagccaggatgaatccccgagacctcatccccccgccttcagatttggtggaagaaggcaatgagcactaaggtgaccttgctggaggacctcctgctgttctgcaaacaaggccttcagaacggagagggcccacagcatctctgtcatgccagtcatgtgcactgcatgcgtagtggcctgtgtgtgaagaagcagtgtgtgctgggcactgggtggggagcatggggagtctcccttcagggacttcccagcctgatagggtaaataagacactacaaagaagaggtgatgacggccacaggaggggcacagggccacaggagagcagcagagggagggtctcactctgctggggacccatgaacagcactgccaaggagcagaccttttattgggtccccaaaaggatgaggaggaagtggtcccatgggtgcagtcaatgatgagttcatggaaacagccaagcaagggcccagagacagaaagctcgtgcctgtctgcagtatcctggctgggccagattgcctggggcacagggtttgtggtcaaggctggaaaagtaggttgtagctagatgaccaacgcctgaaagaatgaggagttggacctggtctgtaagccagggaattgtctcaaaatcgtgcattaagggagacttctctctgtgctctgttccagcttcagtcttataaacactgaccattctccttcagaatccccttctactgaagcaacgccacccagcagcagggctagctgtactaccagcccctaacaaccaaggcactcaagccagaccacagtggccaagaatcctgccctgggctgactctgtccgggacagggatgtggggttctgcagcctggtccactccggggctggcagggagtgtcctggagtgggctgacccaggctgcctttgcccacctctcagacacatacaaccatctgcagggtagtcctggctgaacaggactcgcccaagccacccaagccagggacagagaaggctctggctgaggacaggggaagaagcatctcctccagctgctgccaaccccatggcccggcctttgcaataaagatggagccacccacttcagcccacaattgagcataatcagaagacagtcactcccaaaatatatgttagaaataacatttaaatgacacatgggaagtccgtctatcttacttcccgtctctaattctggaagcacagtggattcaatgagggcatcttcatagctcttcttcagcaacttctccaaagagtttcacattgcacaaggctcttttggaagcaggagtggtcagtaaattcagagggagacaaaccctaagtagagacagctttctttggtgctgagctgtgtgattgtgatgaccgctagcctgtgcccctaggttccagctgcccaccaggcaggacaggcaggtcttgccaaaactggagcctgttggaaacctatttctgccaccaaggagagggaccaggagacccagcgtaggttggccccaagtaggctcaactcgggagggtgggggtcccgcctttctcttcgcacttgtgccccaagtgcactcacagtacctggcatgtgggtgacctcttgggtggccggcatggggcagtgtttctcaatcagagggcctgggccccgagcacgtccaggaatctgagttaaagtgagcttactctttccccagtggatgatcatgatctgtgcattctttttcttgctacaaagatgttcctcctagctgctgtgttggctgtcggcggccagggttgaggacggcctccacagggcctccacttccctccattcctcttcacatagtcactccacctgctccacctgcttgaaaagtccagaaagctgccgcgtctccctggctcaaggaggccttgttggcatgtcatggcacatctcctagatgttttgggttcaagatctgggttccagcccccgctctgctacttagctaaccatgtgaacttgggcaagatgacctttctaaagcctcatttccctcatatgcagagtgggaaggaaaatattaatacatactttatagggttggtatgaggattaagtgctgagcaaagtgcctgtgaaatcctgaaataataagcatgttttagctgccattattatcatcactgtcattatcattgcagtcagcacttcccaaagcaaggtgcccaaaacagactcagtgctttagggaagtggggcagatgtgcatatggcttgtgacggttctttctttttttttttttttttgagacggagtctctctctctcgccaggctggagtgcagtgcagtggcacgatctcagcccactgcaacctccgcctcccaggttcaagtgattctcctgcctcagcctcccaagtagctgggattacaggcgcccaccaccacacccagctaatttttgtatttttagtagagacggggtttcaccatgttggccaggatggtctcaatctcttgacctcgtgatctgcccgcctcggcctcccaaagtgctgggattacaggcatgagcccctgcacctggctgagatggttcttaatttcccataccctgttgcttggctcctccagttggcggctgagagttaagcaagggtttactcggatctgaggcccccgatgccctcaatggacacattcaggaccctgtggcagctcagcagaggcacctgagggtcacgctaggtgagaccatcgcccgcctgtgggaggcaagataagtgggtaaacatcattcctgtctaatgcgaggtctgggcagtgtcccagtggaactttccagagagtgccaagggaggaccgagaaggggcatgacctctgctggagccaggagggcagtgaccaggagctggcttagcactgaagggaagcaggcatcaagggcaggatttctcaaacttcttctgaggaatccccgaggtcgaaaccggtgcttcacagatttcagatgtctgatcttgatttttctttgattccatacaacagattgcttgcctgggttagtgcttattttaagttcttggtgcttcttgtctgacttctgtatttgcaattaaaaacaacatgaccctccccacctgcagccagatatcgttagaaattcaacttcgaaatatattcctatcactcctgttttcactttaatagaaggctgttgcagtactgcatgatgggctcttataaaacttctactatctgctaattcttatctttgtgacaggattgtttgacactgagcaaggaaacacaataaggaagtaatttggatgctaggctggcagaagcctgcagctgtcaaccacagcctgccccagtgtgttcaacacggtggcattgttctccctgacttcataatgagcaaatgtttcacatttgaacttaaggaataaatttttactaataaaagatc

SEQ ID NO: 9800 - protein, 199 aa, Homo sapiens
MIEETSFGKSYAQLNFENSMLWAMDLPDEEPDRLSNKLLQYDPSQDQWSVRAPMKYSKYRFSTAVVNSEIYVLGGIGCVGQDKGQVRKCLDVVEIYNPDGDFWREGPPMPSPLLSLRTNSTNAGAVDGKLYVCGGFHGADRHEVISKEILELDPWENQWNVVAINVLMHDSYDVCLVARMNPRDLIPPPSDLVEEGNEH

SEQ ID NO: 9801 - DNA, 8192 bp, Homo sapiens
atggcagtaaattttttaaagtttttggttcgttcatatgtttgtggttttgcaggccctgagtatgcagatgttgtgtttttggtggacagctctgatcgcctgggatccaagtccttcccatttgtgaaaatgttcatcaccaaaatgatcagcagtctccccatagaggccgacaaataccgtgtggccctggcccagtacagtgataaacttcacagtgaattccacctgagcaccttcaaaggcaggagccccatgctgaaccacctaaggaagaactttggattcattggcgggtccctgcagataggaaaggctcttcaggaggctcacaggacttatttctctgcacccgcaaatgggagagacaagaaacagtttcccccaattctagtggtcctggcttcatctgagtctgaggataatgtggaagaggcatcaaaggccctgcggaaagacggagtgaaaatcatctctgtaggggtgcagaaagcttctgaggaaaacctgaaggccatggccacgtctcagtttcatttcaaccttcggacagtcagagacctcagcatgttttcccaaaacatgacacacatcatcaaggatgtaataaagtacaaggagggagcagttgatgacatctttgtagaagcttgccaaggcccttctatggccgatgttgtgttcctattggatatgtcaatcaatggaagtgaggagaactttgactatcttaaaggattcttggaagaaagtgtatctgcccttgacataaaggaaaattgcatgagggttggccttgtggcctatagcaatgagacaaaagtgataaattcactgagcatgggcataaataagtcagaggttctccagcatatacagaacctttctccccgaactgggaaggcctatactggagctgccatcaaaaagctcaggaaggaagtttttagtgcacggaatggcagtcggaagaatcagggggtgccccagattgccgtgctggtgacccaccgagattcagaagacaacgtgacaaaagcagctgttaacctccgacgggagggtgtgaccatcttcaccctgggcatagagggcgccagcgacacccagttggaaaagatagcatcccaccctgctgagcagtatgtctccaaactgaagaccttcgctgacctggctgctcacaaccagacatttctgaagaagctgcggaaccaaataacacacacagtctctgtcttttcagagaggactgaaacgctcaaatctggttgtgtggacactgaggaagcagacatctatctgcttatcgatggctcagggagcacccaggccacagatttccatgaaatgaagacgttcctgtcagaggtggtagggatgttcaacattgctccccataaggtgcgggttggggccgttcagtatgctgacagctgggacttggaatttgagatcaataaatactccaacaagcaggatttgggaaaggccattgagaatatcaggcagatgggtgggaatacaaacacaggcgcagcactgaatttcacactgagtctgttgcaaaaagcaaagaagcagcgaggaaacaaagttccatgccaccttgttgtcctgacaaatggcatgtccaaggatagcatcttggagcctgcaaacagactgagagaagagcacatccgagtttatgctatcgggatcaaggaggccaaccaaacacagctgagagaaattgcaggagaggaaaagagagtgtattacgtgcatgactttgatgcattgaaagacataagaaaccaagttgttcaagaaatctgtactgaagaagcttgcaaagagatgaaagctgacatcatgtttctggtggacagttctggaagtataggacctgaaaacttcagcaaaatgaaaacatttatgaaaaacctggtgagcaagtctcagattggaccagatcgggtgcaaattggtgtagtccagttcagcgacatcaataaggaagagtttcagctcaacagattcatgtcccaaagcgacatttcaaatgcaatagaccaaatggctcacattggacaaaccaccctgactggtagtgccctgagctttgtgtctcagtacttcagccccaccaagggcgcccggcccaacatcagaaagtttctcatcctcatcacggatggtgaagctcaggacatagtaaaggaaccagcagtagtgcttcggcaagaaggtgtaatcatctattctgtgggagtgtttggctccaatgtcacccagcttgaggagatcagtgggaggcccgagatggttttttatgttgagaattttgacattctgcagcgcattgaagatgatcttgtttttggaatatgcagcccccgtgaagaatgcaagcggattgaagttttagacgttgtgtttgtcattgatagctctggcagtattgactatgatgagtataatatcatgaaggattttatgattggcttagtgaaaaaagctgatgtgggcaagaatcaggtccggtttggggctctgaagtatgctgatgacccagaggtgctgttttatctggatgactttggcacaaaactggaggtaatttcagtgctccagaatgaccaagccatgggtggcagtacttatactgctgaggcactgggcttctcagaccacatgttcactgaagcccggggcagccgcctgaacaagggggtcccccaagtcctcattgtgatcaccgatggggaatcccatgatgctgataaactcaatgccacggcaaaggccttgcgggacaaaggcattcttgtcctggctgtggggattgatggtgccaatcccgtggagctgttagccatggcaggatcaagcgacaagtacttcttcgtggagacttttggaggtctgaagggaatattttcagatgtgacagccagtgtctgcaactcttcaaaagtagattgtgaaattgacaaagtagatcttgttttccttatggatggttcaactagcattcagccaaatgacttcaagaaaatgaaggaatttctggcatctgttgttcaagactttgatgtcagcctcaacagagtgcgaataggagcggcccagtttagcgatacctatcacccggagtttccactgggaactttcataggtgaaaaagagatatcatttcagattgaaaacatcaagcagatctttggaaacacacacatcggtgctgcactcagggaggtggaacattacttcaggccagacatgggcagcaggataaatacaggtaccccacaggtgctgctggtccttacagatggccagtcccaagacgaggtggcccaggccgcggaagccctgagacacagaggtatcgacatctactccgtgggcattggggatgtggatgaccagcagctcattcagatcaccgggactgcagagaaaaaactgacagtgcacaacttcgatgaactgaagaaggtcaataaaaggatcgttcgcaacatctgtaccacagcgggtgaaagcagtgtgaggaaaaggccattgtttgcaatctggctggtttcagaggttgaagagcaatgcctcaaagaaaggaaatatttgactgatttttggttgcttggcaatacggcctatagggctgccaagagctgtggtacagactgtttcgtggatgttgtggtgggatttgatgtctcaactcaggagaaagggcagactttgcttgaaggtcagccttggatggaaacctaccttcaagacatcttacgtgccatcagctccctcaatggagtaagctgtgaggtgggcacagagactcaggtcagtgtggcttttcaagtgaccaatgccatggaaaaatattctcccaagtttgagatctacagtgaaaacatactgaatagcttgaaggatataacagttaaaggaccatctcttctcaatgcaaacctcttggattctctatgggatacatttcagaataaatcagctgctcgaggaaaggtggtccttttattttcagatggattggatgatgatgttgagaaacttgaacaaaaatctgatgaacttagaaaagaaggcctgaatgccctcataactgttgctctggatggacctgctgattcaagtgacttggctgatcttccctatattgaatttgggaaaggatttgagtacaggacacagctctctattggcatgagagaacttggaagccggctgtcaaagcagctggtcaatgttgctgaaaggacatgctgctgtttgttctgcaagtgcattggaggagatggcacaatgggagatcctggaccaccagggaaaaggcttcatgtaaagagagtggtagatttttttaaaaaacaaggctcagaaagaatggaaagaaagggacctccaggttttaaaggcagtgaaggctacctgggagaggagggaatcgctggagaaagaggagcccctggaccagtgggagagcaaggtactaagggatgctatggcaccaaaggtcctaagggaaacagaggactaaatggacaggagggagaagttggggaaaatggaattgacggattaaacggagaacagggtgataatggtcttcctggaagaaaaggagaaaagggagatgagggatctcagggaagcccagggaagagagggactcctggtgaccgtggagcaaagggcctgcgaggggatcccgtaagtgcacgggctgcaaactggagttagggcttgattcccatccgtacttctgatagggagtctcgatttcaagggagctcctggagttgacagtagcatagaaggacccacaggcttgaaaggagaacgtggaagacaaggcagaagaggctggccaggcccccccgggacaccaggctccagaagaaagacagcagctcatggcagaaggggacatacaggcccacagggaacagcaggcatcccaggaccagatggacttgaaggctccctgggacttaagggccctcagggcccaagaggagaggctggtgtgaaaggagaaaaaggaggtgtgggaagtaaaggtccccaggggcctccaggacccggaggagaggcagggaatcaaggccgtttgggaagccaaggaaataaaggagaacctggagatctgggagaaaaaggagctgttggctttcctggtcctcgtggcttgcagggcaatgatggcagtccaggttatggtagtgtcggacgcaagggagcaaagggacaagaaggattccctggagaaagtggacctaagggtgagattggggaccctggtggtccaggagagactgggctgaagggagctagaggcaaaatgatatctgctgggcttccaggagagatgggatcccctggggaaccaggacctcctggacgtaagggtgtgaaaggagccaaaggcttggcttcattttctacatgtgagctcattcagtatgtgcgagaccgcagtcctggcaggcatgattgacgacactggcacatttcaagtaatagtggttccctccggggccgactacataccagcattagagagactccagcggtgcactttctgctatgatgtgtgcaagccagatgcttcttgtgaccaagccagaccaccccctgtgcagtcttacatggatgctgctttccttctggatgcctcccggaacatgggaagtgctgaatttgaagacataagagccttccttggagcactattagatcactttgaaatcaccccagagccggagacttctgtcactggagaccgggtggccctattgagccatgctccccccgacttcctacccaacactcagaagagtccagttagagctgagttcaatcttaccacctacagaagtaagcgcctcatgaagaggcatgtgcacgagtcagttaaacaactaaatggagatgcttttattggtcatgccttacagtggactctggacaatgtatttttaagtacacccaatctgagaagaaacaaagtcatatttgtgatatctgctggggaaaccagccacttagatggggaaatcttaaagaaggaatccttgcgagccaaatgtcagggatatgccttatttgtgttttcccttggccctatttgggatgacaaggaactggaggatctcgccagccaccctttggatcaccacctggtccagcttggccgaattcataaacctgaccacagttatggtgtgaagtttgtgaagtcctttataaactcaatcaggcgtgcaatcaacaaatatccaccaataaacttaaaaataaagtgcaacagacttaactctatagatccaaagcagcccccacgaccattccgaagctttgttcctggaccacttaaagctaccctcaaagaagatgtattacagaaggcaaaattctttcaagataaaaaatatctttcaagagtagcaagaagtggcagagatgatgctattcaaaattttatgagaagcacctcccatacctttaagaatggaaggatgatagaaagtgctcccaaacaacatgattaaaaaaatgcttgaacaacttagccttaggaagcatggtaagactctggacttaaatagtaactaaatctgctgccagaactcaagcaacagtttgtaggttatcaggtgacttgaccccctgcattcattggtattaagatatatcttgttcatttatttgaccactcctgacaattccagcactctacgactgatatgtcgaagaactgtttcattagaagacagaagaatgaaagaagtgttttgaaaagtctaatggagatataatttgaaggtaaaatttatatgatgtatgcatatgtgtacatgggtcaatgttaattcttttatctctgtccagttcattttctgcaaacccatcctcctttcctaatttagtaatgtctaatgctcatctatttagtcaaagttattttttaatgttttaagctactccaaaatttatcctagaaatggatgctgtttatatgtcgtatttttttaaaacgtgaccttctattccacttaaacacaccactgtgggagttgtttgcttggactgatgagaagagggtaattttctccatctctaaatcctcctgaactcactgaaaaactcattaattcccgcagaacataaattattgcttttgagctggaagttttctcttcattaggaagcttactgccattttgatggagcttgaagcccccattttgatggacttctagtctgtctttcctgttatggtcatttattaattttcactaatccatatattctttagacaaggagagtcaagaaactacttgtcatagatgaagctctgagttacttttacccatcaggtagctgtttagtcaataataaacagcaccaaaacaggattagcagagctcttaaaaacagccttaaatacacactgagtttagaaaaatgtaagaaaatcattgttttaatctacaaattcatatgcagttgcagagatgcaaaagagatcagagtaagttaaagtaggaaaggttttataaaagtattgatggctgtgtcctcatctgcatttttgtttttatgatagggctgatattttcaacaacgaaacacccaatgttcagaccttacctcagtctaagagctggctccacagttggtagcaatggccctgttaggcagactgtccccctctttgggaatggaaagaagccctgcctggatgcatggagcagatggatactgacaccaaggacattcagattttctttcctatacctattttcataaaatttggaaagaaaaactatctgcagtatttttttaaaacgacttctgctattcttacttagagaaatccagtgatagcacctcatgtcttcagaggagcaagaagttcaaggagttaaatgtcacattcatactcaggtaatagagaagaataaaacacatcaggtttgcttcatctatcctaagtggtgcttaggggttcagaaaaaatgtttcaagtacaggaaattaatgagcaatatttacaatgtattttaataaaagggatttttctagttaactctgagttaagcacgaactcctttcttttgttaattgttggaaataccattaagatgtatttgtctgtttttctgcattggcaa

SEQ ID NO: 9802 - protein, 1584 aa, Homo sapiens
MAVNFLKFLVRSYVCGFAGPEYADVVFLVDSSDRLGSKSFPFVKMFITKMISSLPIEADKYRVALAQYSDKLHSEFHLSTFKGRSPMLNHLRKNFGFIGGSLQIGKALQEAHRTYFSAPANGRDKKQFPPILVVLASSESEDNVEEASKALRKDGVKIISVGVQKASEENLKAMATSQFHFNLRTVRDLSMFSQNMTHIIKDVIKYKEGAVDDIFVEACQGPSMADVVFLLDMSINGSEENFDYLKGFLEESVSALDIKENCMRVGLVAYSNETKVINSLSMGINKSEVLQHIQNLSPRTGKAYTGAAIKKLRKEVFSARNGSRKNQGVPQIAVLVTHRDSEDNVTKAAVNLRREGVTIFTLGIEGASDTQLEKIASHPAEQYVSKLKTFADLAAHNQTFLKKLRNQITHTVSVFSERTETLKSGCVDTEEADIYLLIDGSGSTQATDFHEMKTFLSEVVGMFNIAPHKVRVGAVQYADSWDLEFEINKYSNKQDLGKAIENIRQMGGNTNTGAALNFTLSLLQKAKKQRGNKVPCHLVVLTNGMSKDSILEPANRLREEHIRVYAIGIKEANQTQLREIAGEEKRVYYVHDFDALKDIRNQVVQEICTEEACKEMKADIMFLVDSSGSIGPENFSKMKTFMKNLVSKSQIGPDRVQIGVVQFSDINKEEFQLNRFMSQSDISNAIDQMAHIGQTTLTGSALSFVSQYFSPTKGARPNIRKFLILITDGEAQDIVKEPAVVLRQEGVIIYSVGVFGSNVTQLEEISGRPEMVFYVENFDILQRIEDDLVFGICSPREECKRIEVLDVVFVIDSSGSIDYDEYNIMKDFMIGLVKKADVGKNQVRFGALKYADDPEVLFYLDDFGTKLEVISVLQNDQAMGGSTYTAEALGFSDHMFTEARGSRLNKGVPQVLIVITDGESHDADKLNATAKALRDKGILVLAVGIDGANPVELLAMAGSSDKYFFVETFGGLKGIFSDVTASVCNSSKVDCEIDKVDLVFLMDGSTSIQPNDFKKMKEFLASVVQDFDVSLNRVRIGAAQFSDTYHPEFPLGTFIGEKEISFQIENIKQIFGNTHIGAALREVEHYFRPDMGSRINTGTPQVLLVLTDGQSQDEVAQAAEALRHRGIDIYSVGIGDVDDQQLIQITGTAEKKLTVHNFDELKKVNKRIVRNICTTAGESSVRKRPLFAIWLVSEVEEQCLKERKYLTDFWLLGNTAYRAAKSCGTDCFVDVVVGFDVSTQEKGQTLLEGQPWMETYLQDILRAISSLNGVSCEVGTETQVSVAFQVTNAMEKYSPKFEIYSENILNSLKDITVKGPSLLNANLLDSLWDTFQNKSAARGKVVLLFSDGLDDDVEKLEQKSDELRKEGLNALITVALDGPADSSDLADLPYIEFGKGFEYRTQLSIGMRELGSRLSKQLVNVAERTCCCLFCKCIGGDGTMGDPGPPGKRLHVKRVVDFFKKQGSERMERKGPPGFKGSEGYLGEEGIAGERGAPGPVGEQGTKGCYGTKGPKGNRGLNGQEGEVGENGIDGLNGEQGDNGLPGRKGEKGDEGSQGSPGKRGTPGDRGAKGLRGDPVSARAANWS

SEQ ID NO: 9803 - DNA, 8192 bp, Homo sapiens; identical to SEQ ID NO: 9801

SEQ ID NO: 9804 - protein, 1584 aa, Homo sapiens; identical to SEQ ID NO: 9802

SEQ ID NO: 9805 - DNA, 4106 bp, Homo sapiens
ggatgatgatgttgagaaacttgaacaaaaatctgatgaacttagaaaagaaggcctgaatgccctcataactgttgctctggatggacctgctgattcaagtgacttggctgatcttccctatattgaatttgggaaaggatttgagtacaggacacagctctctattggcatgagagaacttggaagccggctgtcaaagcagctggtcaatgttgctgaaaggacatgctgctgtttgttctgcaagtgcattggaggagatggcacaatgggagatcctggaccaccagggaaaaggggacctccaggttttaaaggcagtgaaggctacctgggagaggagggaatcgctggagaaagaggagcccctggaccagtgggagagcaaggtactaagggatgctatggcaccaaaggtcctaagggaaacagaggactaaatggacaggagggagaagttggggaaaatggaattgacggattaaacggagaacagggtgataatggtcttcctggaagaaaaggagaaaagggagatgagggatctcagggaagcccagggaagagagggactcctggtgaccgtggagcaaagggcctgcgaggggatcccgtaagtgcacgggctgcaaactggagttagggcttgattcccatccgtacttctgatagggagtctcgatttcaagggagctcctggagttgacagtagcatagaaggacccacaggcttgaaaggagaacgtggaagacaaggcagaagaggctggccaggcccccccgggacaccaggctccagaagaaagacagcagctcatggcagaaggggacatacaggcccacagggaacagcaggcatcccaggaccagatggacttgaaggctccctgggacttaagggccctcagggcccaagaggagaggctggtgtgaaaggagaaaaaggaggtgtgggaagtaaaggtccccaggggcctccaggacccggaggagaggcagggaatcaaggccgtttgggaagccaaggaaataaaggagaacctggagatctgggagaaaaaggagctgttggctttcctggtcctcgtggcttgcagggcaatgatggcagtccaggttatggtagtgtcggacgcaagggagcaaagggacaagaaggattccctggagaaagtggacctaagggtgagattggggaccctggtggtccaggagagactgggctgaagggagctagaggcaaaatgatatctgctgggcttccaggagagatgggatcccctggggaaccaggacctcctggacgtaagggtgtgaaaggagccaaaggcttggcttcattttctacatgtgagctcattcagtatgtgcgagaccgcagtcctggcaggcatgattgacgacactggcacatttcaagtaatagtggttccctccggggccgactacataccagcattagagagactccagcggtgcactttctgctatgatgtgtgcaagccagatgcttcttgtgaccaagccagaccaccccctgtgcagtcttacatggatgctgctttccttctggatgcctcccggaacatgggaagtgctgaatttgaagacataagagccttccttggagcactattagatcactttgaaatcaccccagagccggagacttctgtcactggagaccgggtggccctattgagccatgctccccccgacttcctacccaacactcagaagagtccagttagagctgagttcaatcttaccacctacagaagtaagcgcctcatgaagaggcatgtgcacgagtcagttaaacaactaaatggagatgcttttattggtcatgccttacagtggactctggacaatgtatttttaagtacacccaatctgagaagaaacaaagtcatatttgtgatatctgctggggaaaccagccacttagatggggaaatcttaaagaaggaatccttgcgagccaaatgtcagggatatgccttatttgtgttttcccttggccctatttgggatgacaaggaactggaggatctcgccagccaccctttggatcaccacctggtccagcttggccgaattcataaacctgaccacagttatggtgtgaagtttgtgaagtcctttataaactcaatcaggcgtgcaatcaacaaatatccaccaataaacttaaaaataaagtgcaacagacttaactctatagatccaaagcagcccccacgaccattccgaagctttgttcctggaccacttaaagctaccctcaaagaagatgtattacagaaggcaaaattctttcaagataaaaaatatctttcaagagtagcaagaagtggcagagatgatgctattcaaaattttatgagaagcacctcccatacctttaagaatggaaggatgatagaaagtgctcccaaacaacatgattaaaaaaatgcttgaacaacttagccttaggaagcatggtaagactctggacttaaatagtaactaaatctgctgccagaactcaagcaacagtttgtaggttatcaggtgacttgaccccctgcattcattggtattaagatatatcttgttcatttatttgaccactcctgacaattccagcactctacgactgatatgtcgaagaactgtttcattagaagacagaagaatgaaagaagtgttttgaaaagtctaatggagatataatttgaaggtaaaatttatatgatgtatgcatatgtgtacatgggtcaatgttaattcttttatctctgtccagttcattttctgcaaacccatcctcctttcctaatttagtaatgtctaatgctcatctatttagtcaaagttattttttaatgttttaagctactccaaaatttatcctagaaatggatgctgtttatatgtcgtatttttttaaaacgtgaccttctattccacttaaacacaccactgtgggagttgtttgcttggactgatgagaagagggtaattttctccatctctaaatcctcctgaactcactgaaaaactcattaattcccgcagaacataaattattgcttttgagctggaagttttctcttcattaggaagcttactgccattttgatggagcttgaagcccccattttgatggacttctagtctgtctttcctgttatggtcatttattaattttcactaatccatatattctttagacaaggagagtcaagaaactacttgtcatagatgaagctctgagttacttttacccatcaggtagctgtttagtcaataataaacagcaccaaaacaggattagcagagctcttaaaaacagccttaaatacacactgagtttagaaaaatgtaagaaaatcattgttttaatctacaaattcatatgcagttgcagagatgcaaaagagatcagagtaagttaaagtaggaaaggttttataaaagtattgatggctgtgtcctcatctgcatttttgtttttatgatagggctgatattttcaacaacgaaacacccaatgttcagaccttacctcagtctaagagctggctccacagttggtagcaatggccctgttaggcagactgtccccctctttgggaatggaaagaagccctgcctggatgcatggagcagatggatactgacaccaaggacattcagattttctttcctatacctattttcataaaatttggaaagaaaaactatctgcagtatttttttaaaacgacttctgctattcttacttagagaaatccagtgatagcacctcatgtcttcagaggagcaagaagttcaaggagttaaatgtcacattcatactcaggtaatagagaagaataaaacacatcaggtttgcttcatctatcctaagtggtgcttaggggttcagaaaaaatgtttcaagtacaggaaattaatgagcaatatttacaatgtattttaataaaagggatttttctagttaactctgagttaagcacgaactcctttcttttgttaattgttggaaataccattaagatgtatttgtctgtttttctgcattggcaagtaaagaacataaaacaaatatt

SEQ ID NO: 9806 - protein, 362 aa, Homo sapiens
MCETAVLAGMIDDTGTFQVIVVPSGADYIPALERLQRCTFCYDVCKPDASCDQARPPPVQSYMDAAFLLDASRNMGSAEFEDIRAFLGALLDHFEITPEPETSVTGDRVALLSHAPPDFLPNTQKSPVRAEFNLTTYRSKRLMKRHVHESVKQLNGDAFIGHALQWTLDNVFLSTPNLRRNKVIFVISAGETSHLDGEILKKESLRAKCQGYALFVFSLGPIWDDKELEDLASHPLDHHLVQLGRIHKPDHSYGVKFVKSFINSIRRAINKYPPINLKIKCNRLNSIDPKQPPRPFRSFVPGPLKATLKEDVLQKAKFFQDKKYLSRVARSGRDDAIQNFMRSTSHTFKNGRMIESAPKQHD

SEQ ID NO: 9807 - DNA, 5016 bp, Homo sapiens
gaggtcagaccggttgctttcccgggagttcggcgtttgctggggctgcagcagctgaagtgtagtgttttcttgggactggcggtctgcacttctctcccgggttccatctccccccgcccggtggtgaggccctcgaggagggctcggacgggtgtagcgatccgcgctagaggaagacgaggcccgggaacgcatgtcccccagggcaggttagggggctggaggggtcaaatcccggggtacttgtggagactctttagcgtggcttcttctctctgctgagaccccgagagctttcccagttctcctcccaggaccaccggggttcctgaagatcgggacttttctgcgcccctccaccaacagcccatctcctgtctatgaagaaagacccttcgtagaaacaacttccccgctgctgacgcgttttcccgtcccgtccccgaagtagtctactatgacctcgttgtgagcctctgaacgattttgacactttcccgaggcctagggtattatatcctaaccttactaaagaccacagaggtgcttgccattatgggaaatcagcttgctggcattgctccctcccagatcctttctgtagagagttatttttcagatattcatgactttgaatatgataaaagcctggggagtactcggttttttaaagttgctcgagccaagcaccgagaaggcctggtcgttgtgaaggtttttgcaattcaggatcccacattgcctttaaccagctataaacaagagctggaggaactgaaaatcaggcttaattctgcacagaattgtctacctttccagaaagcatcagaaaaagcatctgagaaagcagctatgctctttaggcagtatgtgcgagacaatctctatgatcgcatcagtacccgtccattcttgaataacattgagaagcgctggattgctttccagatcctgacagctgtggaccaagcacacaaatctggagttcgtcatggggacatcaagactgagaatgtgatggtcaccagttggaattgggttcttctaactgattttgccagttttaagcccacttatcttccagaagacaacccggcagatttcaattatttctttgacacatcacggaggagaacttgctatattgctcctgaacgttttgttgatggtgggatgtttgccactgagttagaatatatgagagatccttcaactccgcttgtagacttaaatagcaatcagagaacaagaggagagttgaagagagcaatggacatcttttcagcaggttgtgtgatagctgagctttttacagaaggtgtaccattatttgatctctctcaacttttggcttatagaaatggacattttttccctgaacaagtgctaaataaaattgaagatcacagtatcagagaattggtaactcagatgattcaccgtgagccagataaacgtttagaggcagaagattacttaaaacagcagcgtggcaatgcctttcctgaaatattttacacttttcttcagccctacatggcccagtttgccaaggaaacgtttctttctgcagatgagcgtattctggttatacggaaggatttgggcaacattattcacaatctctgtggacatgatctgccagaaaaagccgaaggagagcctaaggaaaatgggctggttatcttggtatctgttataacatcctgcctacagacccttaaatactgtgattccaaactagctgctttggaactgattcttcatttggctccaagattaagtgttgaaatccttttggatcgtattactccatatcttttgcatttcagcaatgactctgttcctagggtgagggctgaagccttgaggacgttgaccaaagttcttgctctcgtcaaagaggttcctcgtaatgatatcaatatttatccggaatacattctgccaggcatagcccacttagcccaagatgatgctactatcgttagactagcctatgctgaaaacatagctctgctggcagaaacagctctgagattcctggaattagtacagttaaaaaatcttaatatggaaaatgaccccaataatgaagaaatagatgaggttacacatccaaatggaaattatgacacagagctccaagccttacatgaaatggtccagcagaaagttgttactttgctaagtgaccctgaaaatattgtaaaacaaaccttgatggaaaatggaataacacggctgtgtgtattctttggacgtcagaaagccaacgatgttttgttgtcccacatgattactttcctaaatgataagaatgattggcatctacgtggagcattttttgatagtatagttggtgttgctgcctatgttggctggcaaagctcctcaattctcaagcctctgctgcaacaaggtcttagtgatgctgaggaatttgtcattgtgaaagctctttatgcccttacttgtatgtgccagttaggactgctacaaaaaccccatgtttacgaatttgccagtgatattgcccccttcctgtgtcatcccaatttatggatacgttatggtgccgtgggatttatcacagtggtagctcgtcaaataagtacagctgatgtctactgtaaactgatgccttatcttgacccatatattacccaaccaataatacagattgaaagaaaacttgttctgctcagtgttttaaaggaaccagtaagtcgttctatatttgattatgctttgaggtctaaagatattactagcttgttcagacatcttcacatgcgtcagaagaaacgaaatggttctcttcccgactgccctccgccagaggatcctgccatagcacagcttctgaagaagttgctctcacagggaatgacagaggaagaggaagacaaacttctggcactgaaagacttcatgatgaaatctaataaagcaaaggccaatatagtggaccagagccatcttcatgatagtagtcagaaaggtgtaattgacttggcagctttaggcataactgggagacaagttgatcttgttaaaaccaaacaagaaccagatgacaaacgggccagaaaacatgtaaaacaagactcaaatgtaaatgaagaatggaaaagcatgtttgggtcactggacccaccaaacatgccacaggccctacctaaagggagtgatcaggaggtgattcagactgggaaacctcctcgttccgagtcctctgctggcatttgtgtccctttgtcaacttcttcacaggttccagaagtgacaactgtccaaaataaaaaaccagtaataccggttttaagtagtacaatcttaccatccacctatcagattcgaattacaacttgtaaaactgaacttcagcaactcatccagcaaaagcgggagcagtgcaatgctgagagaatagctaagcagatgatggaaaatgctgaatgggagagtaaaccaccaccacctggatggcgtcctaaagggctgttagttgcccatcttcatgagcataaatctgctgtgaatcgaattagagtctctgatgaacactcactttttgcaacatgttcaaatgatggcacagtgaaaatctggaacagtcaaaagatggaggggaagaccaccactaccagatctattcttacatacagccgaattggaggacgagtcaagacgctcacattctgccaaggctcccactatttagccatagcatctgataatggtgctgtccagcttcttggaattgaggcttctaagctgcccaagtctcctaaaatccatcctctacaaagcagaattctagatcagaaggaggacggttgtgttgtggatatgcatcacttcaactctggagcacagtctgttcttgcctatgccactgtgaatggctctctggttggctgggaccttaggtcttcaagcaatgcgtggactttaaagcatgatttaaagtcgggcctcatcacttcctttgctgtggacatccaccaatgctggctctgcattggtacaagcagtggtaccatggcttgttgggacatgaggttccagttgccaatttcaagtcactgtcatccttccagggctcgaatcagacgcctctcaatgcaccctctgtatcagtcctgggtgattgcagctgttcagggcaacaacgaagtgtccatgtgggacatggagactggtgacagaagatttactctctgggccagcagtgcaccaccactttctgaattacagccttctcctcatagcgtccatggtatctactgtagtcctgcagatggaaatcctatcctactaacagctggctcagatatgaaaataaggttttgggacttggcttacccagaaaggtcctatgttgttgcaggaagtactagttccccatctgtgtcctactacaggaaaataattgaaggcactgaagttgtccaggaaattcagaataagcagaaagtaggaccaagtgatgacacccctcgaaggggcccagagtccctgcccgtgggacatcatgacatcatcactgatgtcgccacattccagaccacacagggcttcatcgtaactgcttctagagatgggattgtgaaggtgtggaaataaaacctactgatttgtataaattttaatagttataaatataatactataactcgagaaaaggcatttctagagaacagattcatttgcttaattttcaaaattatgtctccatattactgtttcatgactgactgactaaatgacacccaaaatggttaagatgtacttgactagtttacttatgcatctctttgcaagaatcagccagccaacaatgtctgggatttttattgtatatgttatagaggtgagaaatgtaaaatatgaaaatgaatatgtttattttgtattgaaaaagatggttgaaaagatggttgtaagctattatagtataaacacatttttgctattaaaaatgctattcaaagcagttaaactgta

SEQ ID NO: 9808 - protein, 1358 aa, Homo sapiens; identical to SEQ ID NO: 854

SEQ ID NO: 9809 - DNA, 3301 bp, Homo sapiens
gaggtcagaccggttgctttcccgggagttcggcgtttgctggggctgcagcagctgaagtgtagtgttttcttgggactggcggtctgcacttctctcccgggttccatctccccccgcccggtggtgaggccctcgaggagggctcggacgggtgtagcgatccgcgctagaggaagacgaggcccgggaacgcatgtcccccagggcaggttagggggctggaggggtcaaatcccggggtacttgtggagactctttagcgtggcttcttctctctgctgagaccccgagagctttcccagttctcctcccaggaccaccggggttcctgaagatcgggacttttctgcgcccctccaccaacagcccatctcctgtctatgaagaaagacccttcgtagaaacaacttccccgctgctgacgcgttttcccgtcccgtccccgaagtagtctactatgacctcgttgtgagcctctgaacgattttgacactttcccgaggcctagggtattatatcctaaccttactaaagaccacagaggtgcttgccattatgggaaatcagcttgctggcattgctccctcccagatcctttctgtagagagttatttttcagatattcatgactttgaatatgataaaagcctggggagtactcggttttttaaagttgctcgagccaagcaccgagaaggcctggtcgttgtgaaggtttttgcaattcaggatcccacattgcctttaaccagctataaacaagagctggaggaactgaaaatcaggcttaattctgcacagaattgtctacctttccagaaagcatcagaaaaagcatctgagaaagcagctatgctctttaggcagtatgtgcgagacaatctctatgatcgcatcagtacccgtccattcttgaataacattgagaagcgctggattgctttccagatcctgacagctgtggaccaagcacacaaatctggagttcgtcatggggacatcaagactgagaatgtgatggtcaccagttggaattgggttcttctaactgattttgccagttttaagcccacttatcttccagaagacaacccggcagatttcaattatttctttgacacatcacggaggagaacttgctatattgctcctgaacgttttgttgatggtgggatgtttgccactgagttagaatatatgagagatccttcaactccgcttgtagacttaaatagcaatcagagaacaagaggagagttgaagagagcaatggacatcttttcagcaggttgtgtgatagctgagctttttacagaaggtgtaccattatttgatctctctcaacttttggcttatagaaatggacattttttccctgaacaagtgctaaataaaattgaagatcacagtatcagagaattggtaactcagatgattcaccgtgagccagataaacgtttagaggcagaagattacttaaaacagcagcgtggcaatgcctttcctgaaatattttacacttttcttcagccctacatggcccagtttgccaaggaaacgtttctttctgcagatgagcgtattctggttatacggaaggatttgggcaacattattcacaatctctgtggacatgatctgccagaaaaagccgaaggagagcctaaggaaaatgggctggttatcttggtatctgttataacatcctgcctacagacccttaaatactgtgattccaaactagctgctttggaactgattcttcatttggctccaagattaagtgttgaaatccttttggatcgtattactccatatcttttgcatttcagcaatgactctgttcctagggtgagggctgaagccttgaggacgttgaccaaagttcttgctctcgtcaaagaggttcctcgtaatgatatcaatatttatccggaatacattctgccaggcatagcccacttagcccaagatgatgctactatcgttagactagcctatgctgaaaacatagctctgctggcagaaacagctctgagattcctggaattagtacagttaaaaaatcttaatatggaaaatgaccccaataatgaagaaatagatgaggttacacatccaaatggaaattatgacacagagctccaagccttacatgaaatggtccagcagaaagttgttactttgctaagtgaccctgaaaatattgtaaaacaaaccttgatggaaaatggaataacacggctgtgtgtattctttggacgtcagaaagccaacgatgttttgttgtcccacatgattactttcctaaatgataagaatgattggcatctacgtggagcattttttgatagtatagttggtgttgctgcctatgttggctggcaaagctcctcaattctcaagcctctgctgcaacaaggtcttagtgatgctgaggaatttgtcattgtgaaagctctttatgcccttacttgtatgtgccagttaggactgctacaaaaaccccatgtttacgaatttgccagtgatattgcccccttcctgtgtcatcccaatttatggatacgttatggtgccgtgggatttatcacagtggtagctcgtcaaataagtacagctgatgtctactgtaaactgatgccttatcttgacccatatattacccaaccaataatacagattgaaagaaaacttgttctgctcagtgttttaaaggaaccagtaagtcgttctatatttgattatgctttgaggtctaaagatattactagcttgttcagacatcttcacatgcgtcagaagaaacgaaatggttctcttcccgactgccctccgccagaggatcctgccatagcacagcttctgaagaagttgctctcacagggaatgacagaggaagaggaagacaaacttctggcactgaaagacttcatgatgaaatctaataaagcaaaggccaatatagtggaccagagccatcttcatgatagtagtcagaaaggtgtaattgacttggcagctttaggcataactgggagacaagttgatcttgttaaaaccaaacaagaaccagatgacaaacgggccagaaaacatgtaaaacaagactcaaatgtaaatgaagaatggaaaagcatgtttgggtcactggacccaccaaacatgccacaggccctacctaaagggagtgatcaggaggtgattcagactgggaaacctcctcgttccgagtcctctgctggcatttgtgtccctttgtcaacttcttcacaggttccagaagtgacaactgtcc

SEQ ID NO: 9810 - protein, 913 aa, Homo sapiens
MGNQLAGIAPSQILSVESYFSDIHDFEYDKSLGSTRFFKVARAKHREGLVVVKVFAIQDPTLPLTSYKQELEELKIRLNSAQNCLPFQKASEKASEKAAMLFRQYVRDNLYDRISTRPFLNNIEKRWIAFQILTAVDQAHKSGVRHGDIKTENVMVTSWNWVLLTDFASFKPTYLPEDNPADFNYFFDTSRRRTCYIAPERFVDGGMFATELEYMRDPSTPLVDLNSNQRTRGELKRAMDIFSAGCVIAELFTEGVPLFDLSQLLAYRNGHFFPEQVLNKIEDHSIRELVTQMIHREPDKRLEAEDYLKQQRGNAFPEIFYTFLQPYMAQFAKETFLSADERILVIRKDLGNIIHNLCGHDLPEKAEGEPKENGLVILVSVITSCLQTLKYCDSKLAALELILHLAPRLSVEILLDRITPYLLHFSNDSVPRVRAEALRTLTKVLALVKEVPRNDINIYPEYILPGIAHLAQDDATIVRLAYAENIALLAETALRFLELVQLKNLNMENDPNNEEIDEVTHPNGNYDTELQALHEMVQQKVVTLLSDPENIVKQTLMENGITRLCVFFGRQKANDVLLSHMITFLNDKNDWHLRGAFFDSIVGVAAYVGWQSSSILKPLLQQGLSDAEEFVIVKALYALTCMCQLGLLQKPHVYEFASDIAPFLCHPNLWIRYGAVGFITVVARQISTADVYCKLMPYLDPYITQPIIQIERKLVLLSVLKEPVSRSIFDYALRSKDITSLFRHLHMRQKKRNGSLPDCPPPEDPAIAQLLKKLLSQGMTEEEEDKLLALKDFMMKSNKAKANIVDQSHLHDSSQKGVIDLAALGITGRQVDLVKTKQEPDDKRARKHVKQDSNVNEEWKSMFGSLDPPNMPQALPKGSDQEVIQTGKPPRSESSAGICVPLSTSSQVPEVTT

SEQ ID NO: 9811 - DNA, 2675 bp, Homo sapiens
gaggtcagaccggttgctttcccgggagttcggcgtttgctggggctgcagcagctgaagtgtagtgttttcttgggactggcggtctgcacttctctcccgggttccatctccccccgcccggtggtgaggccctcgaggagggctcggacgggtgtagcgatccgcgctagaggaagacgaggcccgggaacgcatgtcccccagggcaggttagggggctggaggggtcaaatcccggggtacttgtggagactctttagcgtggcttcttctctctgctgagaccccgagagctttcccagttctcctcccaggaccaccggggttcctgaagatcgggacttttctgcgcccctccaccaacagcccatctcctgtctatgaagaaagacccttcgtagaaacaacttccccgctgctgacgcgttttcccgtcccgtccccgaagtagtctactatgacctcgttgtgagcctctgaacgattttgacactttcccgaggcctagggtattatatcctaaccttactaaagaccacagaggtgcttgccattatgggaaatcagcttgctggcattgctccctcccagatcctttctgtagagagttatttttcagatattcatgactttgaatatgataaaagcctggggagtactcggttttttaaagttgctcgagccaagcaccgagaaggcctggtcgttgtgaaggtttttgcaattcaggatcccacattgcctttaaccagctataaacaagagctggaggaactgaaaatcaggcttaattctgcacagaattgtctacctttccagaaagcatcagaaaaagcatctgagaaagcagctatgctctttaggcagtatgtgcgagacaatctctatgatcgcatcagtacccgtccattcttgaataacattgagaagcgctggattgctttccagatcctgacagctgtggaccaagcacacaaatctggagttcgtcatggggacatcaagactgagaatgtgatggtcaccagttggaattgggttcttctaactgattttgccagttttaagcccacttatcttccagaagacaacccggcagatttcaattatttctttgacacatcacggaggagaacttgctatattgctcctgaacgttttgttgatggtgggatgtttgccactgagttagaatatatgagagatccttcaactccgcttgtagacttaaatagcaatcagagaacaagaggagagttgaagagagcaatggacatcttttcagcaggttgtgtgatagctgagctttttacagaaggtgtaccattatttgatctctctcaacttttggcttatagaaatggacattttttccctgaacaagtgctaaataaaattgaagatcacagtatcagagaattggtaactcagatgattcaccgtgagccagataaacgtttagaggcagaagattacttaaaacagcagcgtggcaatgcctttcctgaaatattttacacttttcttcagccctacatggcccagtttgccaaggaaacgtttctttctgcagatgagcgtattctggttatacggaaggatttgggcaacattattcacaatctctgtggacatgatctgccagaaaaagccgaaggagagcctaaggaaaatgggctggttatcttggtatctgttataacatcctgcctacagacccttaaatactgtgattccaaactagctgctttggaactgattcttcatttggctccaagattaagtgttgaaatccttttggatcgtattactccatatcttttgcatttcagcaatgactctgttcctagggtgagggctgaagccttgaggacgttgaccaaagttcttgctctcgtcaaagaggttcctcgtaatgatatcaatatttatccggaatacattctgccaggcatagcccacttagcccaagatgatgctactatcgttagactagcctatgctgaaaacatagctctgctggcagaaacagctctgagattcctggaattagtacagttaaaaaatcttaatatggaaaatgaccccaataatgaagaaatagatgaggttacacatccaaatggaaattatgacacagagctccaagccttacatgaaatggtccagcagaaagttgttactttgctaagtgaccctgaaaatattgtaaaacaaaccttgatggaaaatggaataacacggctgtgtgtattctttggacgtcagaaagccaacgatgttttgttgtcccacatgattactttcctaaatgataagaatgattggcatctacgtggagcattttttgatagtatagttggtgttgctgcctatgttggctggcaaagctcctcaattctcaagcctctgctgcaacaaggtcttagtgatgctgaggaatttgtcattgtgaaagctctttatgcccttacttgtatgtgccagttaggactgctacaaaaaccccatgtttacgaatttgccagtgatattgcccccttcctgtgtcatcccaatttatggatacgttatggtgccgtgggatttatcacagtggtagctcgtcaaataagtacagctgatgtctactgtaaactgatgccttatcttgacccatatattacccaacc

SEQ ID NO: 9812 - protein, 704 aa, Homo sapiens
MGNQLAGIAPSQILSVESYFSDIHDFEYDKSLGSTRFFKVARAKHREGLVVVKVFAIQDPTLPLTSYKQELEELKIRLNSAQNCLPFQKASEKASEKAAMLFRQYVRDNLYDRISTRPFLNNIEKRWIAFQILTAVDQAHKSGVRHGDIKTENVMVTSWNWVLLTDFASFKPTYLPEDNPADFNYFFDTSRRRTCYIAPERFVDGGMFATELEYMRDPSTPLVDLNSNQRTRGELKRAMDIFSAGCVIAELFTEGVPLFDLSQLLAYRNGHFFPEQVLNKIEDHSIRELVTQMIHREPDKRLEAEDYLKQQRGNAFPEIFYTFLQPYMAQFAKETFLSADERILVIRKDLGNIIHNLCGHDLPEKAEGEPKENGLVILVSVITSCLQTLKYCDSKLAALELILHLAPRLSVEILLDRITPYLLHFSNDSVPRVRAEALRTLTKVLALVKEVPRNDINIYPEYILPGIAHLAQDDATIVRLAYAENIALLAETALRFLELVQLKNLNMENDPNNEEIDEVTHPNGNYDTELQALHEMVQQKVVTLLSDPENIVKQTLMENGITRLCVFFGRQKANDVLLSHMITFLNDKNDWHLRGAFFDSIVGVAAYVGWQSSSILKPLLQQGLSDAEEFVIVKALYALTCMCQLGLLQKPHVYEFASDIAPFLCHPNLWIRYGAVGFITVVARQISTADVYCKLMPYLDPYIT

SEQ ID NO: 9813 - DNA, 381 bp, Homo sapiens
aaaaaccccacacacagttccttcatctttgccttacttgctgaagattagaagtcccagggaatccaaccttattttatctttgaaaatatcctgaagtgccaaataaaccaacagtctgaagcgggggaagactctagccccagcaatacctgcgactactaatgaaaaagacttgacggactgaaactgcccgagatttctcacataatgtcatcattacgtggatgtgcttcagtgctctgaaataatggcactttaatctcaagtccacctgccaccatctgaaaaggggggaaaaaagccaaagatataaaatactgaagaaaggtgagggtactgcttcattacccatacaatacagttttatttcagtgctac

SEQ ID NO: 9814 - protein, 37 aa, Homo sapiens
KSQGIQPYFIFENILKCQINQQSEAGEDSSPSNTCDY

SEQ ID NO: 9815 - DNA, 714 bp, Homo sapiens
gtaggagggaagttgtcgagctacaaacaaatctttaggcatctgaggaattgctaagtttctaatttcatatggttgctgacaaggaggtgcagacaaggaccctcttgctttcctcactatggatagtctgttgcctccatctagattctcttatttcaaaaaatatcctctccatgcaattaggagatatttatcgacgctgagaaaccaaagagccgaagaacagattctcttgcagcaagtgtttcacaaagccaaatccccacatatgtagaagattaacagcattaatgagatgaagatgctgaaggaggaaagccgagaaggagtcagaaaacacaggccagctaatttaatctacaagaatttgggatgacctgtaccaatgtctcgctctcttgaacagagattttttttttcctgattgagaaataccattcaagggctgatctgacaagtcttgcctgtttaacagtgaatctgcttaaaatgaggagagtggtctttgggcccagggggcatgtactgtagctacattttaattacagagtagaatcaaattttgttttggaagctgttctaaagtttcctttcaatggcttaagaaaatgtttctagttggaacgggatcactggaattttttttctttgctgctctgtttcttaatgaatgctaacctcaaagttgcactgttaaataaatatttgaat

SEQ ID NO: 9816 - protein, 51 aa, Homo sapiens
MDSLLPPSRFSYFKKYPLHAIRRYLSTLRNQRAEEQILLQQVFHKAKSPHM

SEQ ID NO: 9817 - DNA, 4967 bp, Homo sapiens
caaagctgggttcgcggctggcccaggagtgcggggcgcgactgggcggccggcggcggggaggggcggagcgcaggagtcggaggcgggagcagaccagcacggcctcgcggagccggcccggcggaccgtgacgggtcccctcacctcctcttctctcccctccccgcccgccctctctccctcccttcctccctcccgctcgcttcttctcacgccgggagcaggctcccgcctcgcaccgctgccccgcgagcagctcctcttctcccgaggcgcgcggggcgcccccgcgagccccgcggctgagaccccgcagcctggaggagggctgtccggggctttggtgtggccgtggctgacactaaagactttgtagccatcaacccgagtgcagtttcgatggaaaatgaaggttgcacgttttcaaaaaatacctaatggtgaaaatgagacaatgattcctgtattgacatcaaaaaaagcaagtgaattaccagtcagtgaagttgcaagcattctccaagctgatcttcagaatggtctaaacaaatgtgaagttagtcataggcgagcctttcatggctggaatgagtttgatattagtgaagatgagccactgtggaagaagtatatttctcagtttaaaaatccccttattatgctgcttctggcttctgcagtcatcagtgttttaatgcatcagtttgatgatgccgtcagtatcactgtggcaatacttatcgttgttacagttgcctttgttcaggaatatcgttcagaaaaatctcttgaagaattgagtaaacttgtgccaccagaatgccattgtgtgcgtgaaggaaaattggagcatacacttgcccgagacttggttccaggtgatacagtttgcctttctgttggggatagagttcctgctgacttacgcttgtttgaggctgtggatctttccattgatgagtccagcttgacaggtgagacaacgccttgttctaaggtgacagctcctcagccagctgcaactaatggagatcttgcatcgagaagtaacattgcctttatgggaacactggtcagatgtggcaaagcaaagggtgttgtcattggaacaggagaaaattctgaatttggggaggtttttaaaatgatgcaagcagaagaggcaccaaaaacccctctgcagaagagcatggacctcttaggaaaacaactttccttttactcctttggtataataggaatcatcatgttggttggctggttactgggaaaagatatcctggaaatgtttactattagtgtaagtttggctgtagcagcaattcctgaaggtctccccattgtggtcacagtgacgctagctcttggtgttatgagaatggtgaagaaaagggccattgtgaaaaagctgcctattgttgaaactctgggctgctgtaatgtgatttgttcagataaaactggaacactgacgaagaatgaaatgactgttactcacatatttacttcagatggtctgcatgctgaggttactggagttggctataatcaatttggggaagtgattgttgatggtgatgttgttcatggattctataacccagctgttagcagaattgttgaggcgggctgtgtgtgcaatgatgctgtaattagaaacaatactctaatggggaagccaacagaaggggccttaattgctcttgcaatgaagatgggtcttgatggacttcaacaagactacatcagaaaagctgaatacccttttagctctgagcaaaagtggatggctgttaagtgtgtacaccgaacacagcaggacagaccagagatttgttttatgaaaggtgcttacgaacaagtaattaagtactgtactacataccagagcaaagggcagaccttgacacttactcagcagcagagagatgtgtaccaacaagagaaggcacgcatgggctcagcgggactcagagttcttgctttggcttctggtcctgaactgggacagctgacatttcttggcttggtgggaatcattgatccacctagaactggtgtgaaagaagctgttacaacactcattgcctcaggagtatcaataaaaatgattactggagattcacaggagactgcagttgcaatcgccagtcgtctgggattgtattccaaaacttcccagtcagtctcaggagaagaaatagatgcaatggatgttcagcagctttcacaaatagtaccaaaggttgcagtattttacagagctagcccaaggcacaagatgaaaattattaagtcgctacagaagaacggttcagttgtagccatgacaggagatggagtaaatgatgcagttgctctgaaggctgcagacattggagttgcgatgggccagactggtacagatgtttgcaaagaggcagcagacatgatcctagtggatgatgattttcaaaccataatgtctgcaatcgaagagggtaaagggatttataataacattaaaaatttcgttagattccagctgagcacgagtatagcagcattaactttaatctcattggctacattaatgaactttcctaatcctctcaatgccatgcagattttgtggatcaatattattatggatggacccccagctcagagccttggagtagaaccagtggataaagatgtcattcgtaaacctcctcgcaactggaaagacagcattttgactaaaaacttgatacttaaaatacttgtttcatcaataatcattgtttgtgggactttgtttgtcttctggcgtgagctacgagacaatgtgattacacctcgagacacaacaatgaccttcacatgctttgtgttttttgacatgttcaatgcactaagttccagatcccagaccaagtctgtgtttgagattggactctgcagtaatagaatgttttgctatgcagttcttggatccatcatgggacaattactagttatttactttcctccgcttcagaaggtttttcagactgagagcctaagcatactggatctgttgtttcttttgggtctcacctcatcagtgtgcatagtggcagaaattataaagaaggttgaaaggagcagggaaaagatccagaagcatgttagttcgacatcatcatcttttcttgaagtatgatgcatattgcattattttatttgcaaactaggaattgcagtctgaggatcatttagaagggcaagttcaagaggatatgaagatttgagaactttttaactattcattgactaaaaatgaacattaatgttaaagacttaagactttaacctgctggcagtcccaaatgaaattatgcaactttgatatcatattccttgatttaaattggcttttgtgattgagtgaaactttataaagcatatggtcagttatttaattaaaaaggcaaaacctgaaccaccttctgcacttaaagaagtctaacagtacaaatacactatctatcttagatagatatatttttttttatttttaaatattgtactatttatggtggtggggctttcttactaatacacaaataaatttaatcatttcaaaggcattctatttggtttagaagttgattcccaggagtgccatatttcagctactgtatttcctttttcttgtaatgtaagcagctcagataccatgtgctatcatttttgtatcaagttttttgcacaggatgtgaccactgtcagatcactgttcttttctttctttttgtgattgaaaagcctatactacaatttgaagtaaatttttgtttttcttagtaagtgtaaatggttgctttatttttattttaaaaaggtatgtctttggtttggcagaattcatgcagggctatcaagtggtgttctagggtaacagtgtccataattaacgcttagtcatagagtcaaaaacatttaagactgattgggttgaagtttataataaattatattaacatgtcttcctttttgaggtaaagatatatactttgtcaaatatcattttgtcatcctctaaatataaatccaaatacctcagctaagtaattctattttattatttttactgttatgtatgtttttaatcatatttcttaggaagtataggctactggacttagaataaaaagtccccaaacccaaacaaatggtttatgaaccagagtatatgtggaagattctttgctggtcttgctctgtgtgcatctgaagcttctttggcctagattttagcacaaacctgagtatatctcttctactttcatcatgtgttctgtaccttctttttgtttcattgggcatgctagggaaataggtggattttgtgtgtaatgccatcagtttttatgaaagcttgatgaggtataggtcatttgttttgagtatgtgggccagaaatttaaaattagaaatttgtttttctgttgagtatataaacaaaaattggtcccaattctaacaggtttaatccttcttgaagccaataagttttatcttttataatctgtcaggatgaaccactccttagcttttatccaatattaaactgcaagtgttagcactgaaatattgtcattgatagggaaaatatctattctttgagtcattgttactgaggcagttgagtgtaaggagctggctgcagtttattctacttaaccctttaaggctgaattgtcaaatgtacattgttccatgtcgttagatggaacatggaagccattgtctaatcaactctatcattagtgacttgatgtctcataccttaattttgtaatgatttttattctctgttacaaagacttgaaatacgtattaaatgcacgttaatgttttgctttgcattttaggttcagattatgacttgattgaaataaatgtgcctatacattcatttgctttgtactataaaaataaaaatgatttcttaagtt

SEQ ID NO: 9818 - protein, 919 aa, Homo sapiens; identical to SEQ ID NO: 862

SEQ ID NO: 9819 - DNA, 5058 bp, Homo sapiens
caaagctgggttcgcggctggcccaggagtgcggggcgcgactgggcggccggcggcggggaggggcggagcgcaggagtcggaggcgggagcagaccagcacggcctcgcggagccggcccggcggaccgtgacgggtcccctcacctcctcttctctcccctccccgcccgccctctctccctcccttcctccctcccgctcgcttcttctcacgccgggagcaggctcccgcctcgcaccgctgccccgcgagcagctcctcttctcccgaggcgcgcggggcgcccccgcgagccccgcggctgagaccccgcagcctggaggagggctgtccggggctttggtgtggccgtggctgacactaaagactttgtagccatcaacccgagtgcagtttcgatggaaaatgaaggttgcacgttttcaaaaaatacctaatggtgaaaatgagacaatgattcctgtattgacatcaaaaaaagcaagtgaattaccagtcagtgaagttgcaagcattctccaagctgatcttcagaatggtctaaacaaatgtgaagttagtcataggcgagcctttcatggctggaatgagtttgatattagtgaagatgagccactgtggaagaagtatatttctcagtttaaaaatccccttattatgctgcttctggcttctgcagtcatcagtgttttaatgcatcagtttgatgatgccgtcagtatcactgtggcaatacttatcgttgttacagttgcctttgttcaggaatatcgttcagaaaaatctcttgaagaattgagtaaacttgtgccaccagaatgccattgtgtgcgtgaaggaaaattggagcatacacttgcccgagacttggttccaggtgatacagtttgcctttctgttggggatagagttcctgctgacttacgcttgtttgaggctgtggatctttccattgatgagtccagcttgacaggtgagacaacgccttgttctaaggtgacagctcctcagccagctgcaactaatggagatcttgcatcgagaagtaacattgcctttatgggaacactggtcagatgtggcaaagcaaagggtgttgtcattggaacaggagaaaattctgaatttggggaggtttttaaaatgatgcaagcagaagaggcaccaaaaacccctctgcagaagagcatggacctcttaggaaaacaactttccttttactcctttggtataataggaatcatcatgttggttggctggttactgggaaaagatatcctggaaatgtttactattagtgtaagtttggctgtagcagcaattcctgaaggtctccccattgtggtcacagtgacgctagctcttggtgttatgagaatggtgaagaaaagggccattgtgaaaaagctgcctattgttgaaactctgggctgctgtaatgtgatttgttcagataaaactggaacactgacgaagaatgaaatgactgttactcacatatttacttcagatggtctgcatgctgaggttactggagttggctataatcaatttggggaagtgattgttgatggtgatgttgttcatggattctataacccagctgttagcagaattgttgaggcgggctgtgtgtgcaatgatgctgtaattagaaacaatactctaatggggaagccaacagaaggggccttaattgctcttgcaatgaagatgggtcttgatggacttcaacaagactacatcagaaaagctgaatacccttttagctctgagcaaaagtggatggctgttaagtgtgtacaccgaacacagcaggacagaccagagatttgttttatgaaaggtgcttacgaacaagtaattaagtactgtactacataccagagcaaagggcagaccttgacacttactcagcagcagagagatgtgtaccaacaagagaaggcacgcatgggctcagcgggactcagagttcttgctttggcttctggtcctgaactgggacagctgacatttcttggcttggtgggaatcattgatccacctagaactggtgtgaaagaagctgttacaacactcattgcctcaggagtatcaataaaaatgattactggagattcacaggagactgcagttgcaatcgccagtcgtctgggattgtattccaaaacttcccagtcagtctcaggagaagaaatagatgcaatggatgttcagcagctttcacaaatagtaccaaaggttgcagtattttacagagctagcccaaggcacaagatgaaaattattaagtcgctacagaagaacggttcagttgtagccatgacaggagatggagtaaatgatgcagttgctctgaaggctgcagacattggagttgcgatgggccagactggtacagatgtttgcaaagaggcagcagacatgatcctagtggatgatgattttcaaaccataatgtctgcaatcgaagagggtaaagggatttataataacattaaaaatttcgttagattccagctgagcacgagtatagcagcattaactttaatctcattggctacattaatgaactttcctaatcctctcaatgccatgcagattttgtggatcaatattattatggatggacccccagctcagagccttggagtagaaccagtggataaagatgtcattcgtaaacctcctcgcaactggaaagacagcattttgactaaaaacttgatacttaaaatacttgtttcatcaataatcattgtttgtgggactttgtttgtcttctggcgtgagctacgagacaatgtgattacacctcgagacacaacaatgaccttcacatgctttgtgttttttgacatgttcaatgcactaagttccagatcccagaccaagtctgtgtttgagattggactctgcagtaatagaatgttttgctatgcagttcttggatccatcatgggacaattactagttatttactttcctccgcttcagaaggtttttcagactgagagcctaagcatactggatctgttgtttcttttgggtctcacctcatcagtgtgcatagtggcagaaattataaagaaggttgaaaggagcagggaaaagatccagaagcatgttagttcgacatcatcatcttttcttgaagtatgatgcatattgcattattttatttgcaaactaggaattgcagtctgaggatcatttagaagggcaagttcaagaggatatgaagatttgagaactttttaactattcattgactaaaaatgaacattaatgttaaagacttaagactttaacctgctggcagtcccaaatgaaattatgcaactttgatatcatattccttgatttaaattggcttttgtgattgagtgaaactttataaagcatatggtcagttatttaattaaaaaggcaaaacctgaaccaccttctgcacttaaagaagtctaacagtacaaatacactatctatcttagatagatatatttttttttatttttaaatattgtactatttatggtggtggggctttcttactaatacacaaataaatttaatcatttcaaaggcattctatttggtttagaagttgattcccaggagtgccatatttcagctactgtatttcctttttcttgtaatgtaagcagctcagataccatgtgctatcatttttgtatcaagttttttgcacaggatgtgaccactgtcagatcactgttcttttctttctttttgtgattgaaaagcctatactacaatttgaagtaaatttttgtttttcttagtaagtgtaaatggttgctttatttttattttaaaaaggtatgtctttggtttggcagaattcatgcagggctatcaagtggtgttctagggtaacagtgtccataattaacgcttagtcatagagtcaaaaacatttaagactgattgggttgaagtttataataaattatattaacatgtcttcctttttgaggtaaagatatatactttgtcaaatatcattttgtcatcctctaaatataaatccaaatacctcagctaagtaattctattttattatttttactgttatgtatgtttttaatcatatttcttaggaagtataggctactggacttagaataaaaagtccccaaacccaaacaaatggtttatgaaccagagtatatgtggaagattctttgctggtcttgctctgtgtgcatctgaagcttctttggcctagattttagcacaaacctgagtatatctcttctactttcatcatgtgttctgtaccttctttttgtttcattgggcatgctagggaaataggtggattttgtgtgtaatgccatcagtttttatgaaagcttgatgaggtataggtcatttgttttgagtatgtgggccagaaatttaaaattagaaatttgtttttctgttgagtatataaacaaaaattggtcccaattctaacaggtttaatccttcttgaagccaataagttttatcttttataatctgtcaggatgaaccactccttagcttttatccaatattaaactgcaagtgttagcactgaaatattgtcattgatagggaaaatatctattctttgagtcattgttactgaggcagttgagtgtaaggagctggctgcagtttattctacttaaccctttaaggctgaattgtcaaatgtacattgttccatgtcgttagatggaacatggaagccattgtctaatcaactctatcattagtgacttgatgtctcataccttaattttgtaatgatttttattctctgttacaaagacttgaaatacgtattaaatgcacgttaatgttttgctttgcattttaggttcagattatgacttgattgaaataaatgtgcctatacattcatttgctttgtactataaaaataaaaatgatttcttaagttaatgacatcccagtggggactattagcattaaaattatccatatggatgctgaagatacagaaattaaaattatccatatggatgctggag

SEQ ID NO: 9820 - protein, 919 aa, Homo sapiens; identical to SEQ ID NO: 862

SEQ ID NO: 9821 - DNA, 3652 bp, Homo sapiens
cgcgactgggcggccggcggcggggaggggcggagcgcaggagtcggaggcgggagcagaccagcacggcctcgcggagccggcccggcggaccgtgacgggtcccctcacctcctcttctctcccctccccgcccgccctctctccctcccttcctccctcccgctcgcttcttctcacgccgggagcaggctcccgcctcgcaccgctgccccgcgagcagctcctcttctcccgaggcgcgcggggcgcccccgcgagccccgcggctgagaccccgcagcctggaggagggctgtccggggctttggatgctgctgctaggggtggtgggagcagccgtgggacgcgtggccgggagcgggggtgacagcctgggattccgggggcttctcttccttgtcctcctcctctcctctctattcccagtgtggccgtggctgacactaaagactttgtagccatcaacccgagtgcagtttcgatggaaaatgaaggttgcacgttttcaaaaaatacctaatggtgaaaatgagacaatgattcctgtattgacatcaaaaaaagcaagtgaattaccagtcagtgaagttgcaagcattctccaagctgatcttcagaatggtctaaacaaatgtgaagttagtcataggcgagcctttcatggctggaatgagtttgatattagtgaagatgagccactgtggaagaagtatatttctcagtttaaaaatccccttattatgctgcttctggcttctgcagtcatcagtgttttaatgcatcagtttgatgatgccgtcagtatcactgtggcaatacttatcgttgttacagttgcctttgttcaggaatatcgttcagaaaaatctcttgaagaattgagtaaacttgtgccaccagaatgccattgtgtgcgtgaaggaaaattggagcatacacttgcccgagacttggttccaggtgatacagtttgcctttctgttggggatagagttcctgctgacttacgcttgtttgaggctgtggatctttccattgatgagtccagcttgacaggtgagacaacgccttgttctaaggtgacagctcctcagccagctgcaactaatggagatcttgcatcgagaagtaacattgcctttatgggaacactggtcagatgtggcaaagcaaagggtgttgtcattggaacaggagaaaattctgaatttggggaggtttttaaaatgatgcaagcagaagaggcaccaaaaacccctctgcagaagagcatggacctcttaggaaaacaactttccttttactcctttggtataataggaatcatcatgttggttggctggttactgggaaaagatatcctggaaatgtttactattagtgtaagtttggctgtagcagcaattcctgaaggtctccccattgtggtcacagtgacgctagctcttggtgttatgagaatggtgaagaaaagggccattgtgaaaaagctgcctattgttgaaactctgggctgctgtaatgtgatttgttcagataaaactggaacactgacgaagaatgaaatgactgttactcacatatttacttcagatggtctgcatgctgaggttactggagttggctataatcaatttggggaagtgattgttgatggtgatgttgttcatggattctataacccagctgttagcagaattgttgaggcgggctgtgtgtgcaatgatgctgtaattagaaacaatactctaatggggaagccaacagaaggggccttaattgctcttgcaatgaagatgggtcttgatggacttcaacaagactacatcagaaaagctgaatacccttttagctctgagcaaaagtggatggctgttaagtgtgtacaccgaacacagcaggacagaccagagatttgttttatgaaaggtgcttacgaacaagtaattaagtactgtactacataccagagcaaagggcagaccttgacacttactcagcagcagagagatgtgtaccaacaagagaaggcacgcatgggctcagcgggactcagagttcttgctttggcttctggtcctgaactgggacagctgacatttcttggcttggtgggaatcattgatccacctagaactggtgtgaaagaagctgttacaacactcattgcctcaggagtatcaataaaaatgattactggagattcacaggagactgcagttgcaatcgccagtcgtctgggattgtattccaaaacttcccagtcagtctcaggagaagaaatagatgcaatggatgttcagcagctttcacaaatagtaccaaaggttgcagtattttacagagctagcccaaggcacaagatgaaaattattaagtcgctacagaagaacggttcagttgtagccatgacaggagatggagtaaatgatgcagttgctctgaaggctgcagacattggagttgcgatgggccagactggtacagatgtttgcaaagaggcagcagacatgatcctagtggatgatgattttcaaaccataatgtctgcaatcgaagagggtaaagggatttataataacattaaaaatttcgttagattccagctgagcacgagtatagcagcattaactttaatctcattggctacattaatgaactttcctaatcctctcaatgccatgcagattttgtggatcaatattattatggatggacccccagctcagagccttggagtagaaccagtggataaagatgtcattcgtaaacctcctcgcaactggaaagacagcattttgactaaaaacttgatacttaaaatacttgtttcatcaataatcattgtttgtgggactttgtttgtcttctggcgtgagctacgagacaatgtgattacacctcgagacacaacaatgaccttcacatgctttgtgttttttgacatgttcaatgcactaagttccagatcccagaccaagtctgtgtttgagattggactctgcagtaatagaatgttttgctatgcagttcttggatccatcatgggacaattactagttatttactttcctccgcttcagaaggtttttcagactgagagcctaagcatactgggtctggctctgggagaggagtggacagcagctggttgagatacatccccatctggagacaggactgccactgacagaagatgtgagctgtgtctaagtccagtcttgtgcccagccgtgtctgcgccttcactctttggaactctgcatacaacatcttagcaccatcttcctgcagctcttccttacctaaataaagaaacagcccaagggcagtatttctaaaagcactgtaacagcttttcattttctccacatatactacaaattctataaagaaagaaattaatttaaaaaaactaagatgtttttctcttctggcttcataaatgccttgctgtataaattgaaatattgatactgaactgtctttttaatgatgacctaactttattcaacccatcggaatttactttttccctgaaataagatcttttccactggtctactacctgaccataaacatgtctgcatttgaattctctaaaccctaaatctgtgtctatgaaaaatacaaatgactattaaatatt

SEQ ID NO: 9822 - protein, 888 aa, Homo sapiens; identical to SEQ ID NO: 856

SEQ ID NO: 9823 - DNA, 4712 bp, Homo sapiens
cttcctccctcccgctcgcttcttctcacgccgggagcaggctcccgcctcgcaccgctgccccgcgagcagctcctcttctcccgaggcgcgcggggcgcccccgcgagccccgcggctgagaccccgcagcctggaggagggctgtccggggctttgggttgcacgttttcaaaaaatacctaatggtgaaaatgagacaatgattcctgtattgacatcaaaaaaagcaagtgaattaccagtcagtgaagttgcaagcattctccaagctgatcttcagaatggtctaaacaaatgtgaagttagtcataggcgagcctttcatggctggaatgagtttgatattagtgaagatgagccactgtggaagaagtatatttctcagtttaaaaatccccttattatgctgcttctggcttctgcagtcatcagtgttttaatgcatcagtttgatgatgccgtcagtatcactgtggcaatacttatcgttgttacagttgcctttgttcaggaatatcgttcagaaaaatctcttgaagaattgagtaaacttgtgccaccagaatgccattgtgtgcgtgaaggaaaattggagcatacacttgcccgagacttggttccaggtgatacagtttgcctttctgttggggatagagttcctgctgacttacgcttgtttgaggctgtggatctttccattgatgagtccagcttgacaggtgagacaacgccttgttctaaggtgacagctcctcagccagctgcaactaatggagatcttgcatcgagaagtaacattgcctttatgggaacactggtcagatgtggcaaagcaaagggtgttgtcattggaacaggagaaaattctgaatttggggaggtttttaaaatgatgcaagcagaagaggcaccaaaaacccctctgcagaagagcatggacctcttaggaaaacaactttccttttactcctttggtataataggaatcatcatgttggttggctggttactgggaaaagatatcctggaaatgtttactattagtgtaagtttggctgtagcagcaattcctgaaggtctccccattgtggtcacagtgacgctagctcttggtgttatgagaatggtgaagaaaagggccattgtgaaaaagctgcctattgttgaaactctgggctgctgtaatgtgatttgttcagataaaactggaacactgacgaagaatgaaatgactgttactcacatatttacttcagatggtctgcatgctgaggttactggagttggctataatcaatttggggaagtgattgttgatggtgatgttgttcatggattctataacccagctgttagcagaattgttgaggcgggctgtgtgtgcaatgatgctgtaattagaaacaatactctaatggggaagccaacagaaggggccttaattgctcttgcaatgaagatgggtcttgatggacttcaacaagactacatcagaaaagctgaatacccttttagctctgagcaaaagtggatggctgttaagtgtgtacaccgaacacagcaggacagaccagagatttgttttatgaaaggtgcttacgaacaagtaattaagtactgtactacataccagagcaaagggcagaccttgacacttactcagcagcagagagatgtgtaccaacaagagaaggcacgcatgggctcagcgggactcagagttcttgctttggcttctggtcctgaactgggacagctgacatttcttggcttggtgggaatcattgatccacctagaactggtgtgaaagaagctgttacaacactcattgcctcaggagtatcaataaaaatgattactggagattcacaggagactgcagttgcaatcgccagtcgtctgggattgtattccaaaacttcccagtcagtctcaggagaagaaatagatgcaatggatgttcagcagctttcacaaatagtaccaaaggttgcagtattttacagagctagcccaaggcacaagatgaaaattattaagtcgctacagaagaacggttcagttgtagccatgacaggagatggagtaaatgatgcagttgctctgaaggctgcagacattggagttgcgatgggccagactggtacagatgtttgcaaagaggcagcagacatgatcctagtggatgatgattttcaaaccataatgtctgcaatcgaagagggtaaagggatttataataacattaaaaatttcgttagattccagctgagcacgagtatagcagcattaactttaatctcattggctacattaatgaactttcctaatcctctcaatgccatgcagattttgtggatcaatattattatggatggacccccagctcagagccttggagtagaaccagtggataaagatgtcattcgtaaacctcctcgcaactggaaagacagcattttgactaaaaacttgatacttaaaatacttgtttcatcaataatcattgtttgtgggactttgtttgtcttctggcgtgagctacgagacaatgtgattacacctcgagacacaacaatgaccttcacatgctttgtgttttttgacatgttcaatgcactaagttccagatcccagaccaagtctgtgtttgagattggactctgcagtaatagaatgttttgctatgcagttcttggatccatcatgggacaattactagttatttactttcctccgcttcagaaggtttttcagactgagagcctaagcatactggatctgttgtttcttttgggtctcacctcatcagtgtgcatagtggcagaaattataaagaaggttgaaaggagcagggaaaagatccagaagcatgttagttcgacatcatcatcttttcttgaagtatgatgcatattgcattattttatttgcaaactaggaattgcagtctgaggatcatttagaagggcaagttcaagaggatatgaagatttgagaactttttaactattcattgactaaaaatgaacattaatgttaaagacttaagactttaacctgctggcagtcccaaatgaaattatgcaactttgatatcatattccttgatttaaattggcttttgtgattgagtgaaactttataaagcatatggtcagttatttaattaaaaaggcaaaacctgaaccaccttctgcacttaaagaagtctaacagtacaaatacactatctatcttagatagatatatttttttttatttttaaatattgtactatttatggtggtggggctttcttactaatacacaaataaatttaatcatttcaaaggcattctatttggtttagaagttgattcccaggagtgccatatttcagctactgtatttcctttttcttgtaatgtaagcagctcagataccatgtgctatcatttttgtatcaagttttttgcacaggatgtgaccactgtcagatcactgttcttttctttctttttgtgattgaaaagcctatactacaatttgaagtaaatttttgtttttcttagtaagtgtaaatggttgctttatttttattttaaaaaggtatgtctttggtttggcagaattcatgcagggctatcaagtggtgttctagggtaacagtgtccataattaacgcttagtcatagagtcaaaaacatttaagactgattgggttgaagtttataataaattatattaacatgtcttcctttttgaggtaaagatatatactttgtcaaatatcattttgtcatcctctaaatataaatccaaatacctcagctaagtaattctattttattatttttactgttatgtatgtttttaatcatatttcttaggaagtataggctactggacttagaataaaaagtccccaaacccaaacaaatggtttatgaaccagagtatatgtggaagattctttgctggtcttgctctgtgtgcatctgaagcttctttggcctagattttagcacaaacctgagtatatctcttctactttcatcatgtgttctgtaccttctttttgtttcattgggcatgctagggaaataggtggattttgtgtgtaatgccatcagtttttatgaaagcttgatgaggtataggtcatttgttttgagtatgtgggccagaaatttaaaattagaaatttgtttttctgttgagtatataaacaaaaattggtcccaattctaacaggtttaatccttcttgaagccaataagttttatcttttataatctgtcaggatgaaccactccttagcttttatccaatattaaactgcaagtgttagcactgaaatattgtcattgatagggaaaatatctattctttgagtcattgttactgaggcagttgagtgtaaggagctggctgcagtttattctacttaaccctttaaggctgaattgtcaaatgtacattgttccatgtcgttagatggaacatggaagccattgtctaatcaactctatcattagtgacttgatgtctcataccttaattttgtaatgatttttattctctgttacaaagacttgaaatacgtattaaatgcacgttaatgttttgctttgcattttaggttcagattatgacttgattgaaataaatgtgcctatacattcatttgctttgtactataaaaataaaaatgatttcttaagtt

SEQ ID NO: 9824 - protein, 903 aa, Homo sapiens
MIPVLTSKKASELPVSEVASILQADLQNGLNKCEVSHRRAFHGWNEFDISEDEPLWKKYISQFKNPLIMLLLASAVISVLMHQFDDAVSITVAILIVVTVAFVQEYRSEKSLEELSKLVPPECHCVREGKLEHTLARDLVPGDTVCLSVGDRVPADLRLFEAVDLSIDESSLTGETTPCSKVTAPQPAATNGDLASRSNIAFMGTLVRCGKAKGVVIGTGENSEFGEVFKMMQAEEAPKTPLQKSMDLLGKQLSFYSFGIIGIIMLVGWLLGKDILEMFTISVSLAVAAIPEGLPIVVTVTLALGVMRMVKKRAIVKKLPIVETLGCCNVICSDKTGTLTKNEMTVTHIFTSDGLHAEVTGVGYNQFGEVIVDGDVVHGFYNPAVSRIVEAGCVCNDAVIRNNTLMGKPTEGALIALAMKMGLDGLQQDYIRKAEYPFSSEQKWMAVKCVHRTQQDRPEICFMKGAYEQVIKYCTTYQSKGQTLTLTQQQRDVYQQEKARMGSAGLRVLALASGPELGQLTFLGLVGIIDPPRTGVKEAVTTLIASGVSIKMITGDSQETAVAIASRLGLYSKTSQSVSGEEIDAMDVQQLSQIVPKVAVFYRASPRHKMKIIKSLQKNGSVVAMTGDGVNDAVALKAADIGVAMGQTGTDVCKEAADMILVDDDFQTIMSAIEEGKGIYNNIKNFVRFQLSTSIAALTLISLATLMNFPNPLNAMQILWINIIMDGPPAQSLGVEPVDKDVIRKPPRNWKDSILTKNLILKILVSSIIIVCGTLFVFWRELRDNVITPRDTTMTFTCFVFFDMFNALSSRSQTKSVFEIGLCSNRMFCYAVLGSIMGQLLVIYFPPLQKVFQTESLSILDLLFLLGLTSSVCIVAEIIKKVERSREKIQKHVSSTSSSFLEV

SEQ ID NO: 9825 - DNA, 3469 bp, Homo sapiens
cttcctccctcccgctcgcttcttctcacgccgggagcaggctcccgcctcgcaccgctgccccgcgagcagctcctcttctcccgaggcgcgcggggcgcccccgcgagccccgcggctgagaccccgcagcctggaggagggctgtccggggctttgggttgcacgttttcaaaaaatacctaatggtgaaaatgagacaatgattcctgtattgacatcaaaaaaagcaagtgaattaccagtcagtgaagttgcaagcattctccaagctgatcttcagaatggtctaaacaaatgtgaagttagtcataggcgagcctttcatggctggaatgagtttgatattagtgaagatgagccactgtggaagaagtatatttctcagtttaaaaatccccttattatgctgcttctggcttctgcagtcatcagtgttttaatgcatcagtttgatgatgccgtcagtatcactgtggcaatacttatcgttgttacagttgcctttgttcaggaatatcgttcagaaaaatctcttgaagaattgagtaaacttgtgccaccagaatgccattgtgtgcgtgaaggaaaattggagcatacacttgcccgagacttggttccaggtgatacagtttgcctttctgttggggatagagttcctgctgacttacgcttgtttgaggctgtggatctttccattgatgagtccagcttgacaggtgagacaacgccttgttctaaggtgacagctcctcagccagctgcaactaatggagatcttgcatcgagaagtaacattgcctttatgggaacactggtcagatgtggcaaagcaaagggtgttgtcattggaacaggagaaaattctgaatttggggaggtttttaaaatgatgcaagcagaagaggcaccaaaaacccctctgcagaagagcatggacctcttaggaaaacaactttccttttactcctttggtataataggaatcatcatgttggttggctggttactgggaaaagatatcctggaaatgtttactattagtgtaagtttggctgtagcagcaattcctgaaggtctccccattgtggtcacagtgacgctagctcttggtgttatgagaatggtgaagaaaagggccattgtgaaaaagctgcctattgttgaaactctgggctgctgtaatgtgatttgttcagataaaactggaacactgacgaagaatgaaatgactgttactcacatatttacttcagatggtctgcatgctgaggttactggagttggctataatcaatttggggaagtgattgttgatggtgatgttgttcatggattctataacccagctgttagcagaattgttgaggcgggctgtgtgtgcaatgatgctgtaattagaaacaatactctaatggggaagccaacagaaggggccttaattgctcttgcaatgaagatgggtcttgatggacttcaacaagactacatcagaaaagctgaatacccttttagctctgagcaaaagtggatggctgttaagtgtgtacaccgaacacagcaggacagaccagagatttgttttatgaaaggtgcttacgaacaagtaattaagtactgtactacataccagagcaaagggcagaccttgacacttactcagcagcagagagatgtgtaccaacaagagaaggcacgcatgggctcagcgggactcagagttcttgctttggcttctggtcctgaactgggacagctgacatttcttggcttggtgggaatcattgatccacctagaactggtgtgaaagaagctgttacaacactcattgcctcaggagtatcaataaaaatgattactggagattcacaggagactgcagttgcaatcgccagtcgtctgggattgtattccaaaacttcccagtcagtctcaggagaagaaatagatgcaatggatgttcagcagctttcacaaatagtaccaaaggttgcagtattttacagagctagcccaaggcacaagatgaaaattattaagtcgctacagaagaacggttcagttgtagccatgacaggagatggagtaaatgatgcagttgctctgaaggctgcagacattggagttgcgatgggccagactggtacagatgtttgcaaagaggcagcagacatgatcctagtggatgatgattttcaaaccataatgtctgcaatcgaagagggtaaagggatttataataacattaaaaatttcgttagattccagctgagcacgagtatagcagcattaactttaatctcattggctacattaatgaactttcctaatcctctcaatgccatgcagattttgtggatcaatattattatggatggacccccagctcagagccttggagtagaaccagtggataaagatgtcattcgtaaacctcctcgcaactggaaagacagcattttgactaaaaacttgatacttaaaatacttgtttcatcaataatcattgtttgtgggactttgtttgtcttctggcgtgagctacgagacaatgtgattacacctcgagacacaacaatgaccttcacatgctttgtgttttttgacatgttcaatgcactaagttccagatcccagaccaagtctgtgtttgagattggactctgcagtaatagaatgttttgctatgcagttcttggatccatcatgggacaattactagttatttactttcctccgcttcagaaggtttttcagactgagagcctaagcatactggatctgttgtttcttttgggtctcacctcatcagtgtgcatagtggcagaaattataaagaaggttgaaaggagcagggaaaagatccagaagcatgttagttcgacatcatcatcttttcttgaagtctggctctgggagaggagtggacagcagctggttgagatacatccccatctggagacaggactgccactgacagaagatgtgagctgtgtctaagtccagtcttgtgcccagccgtgtctgcgccttcactctttggaactctgcatacaacatcttagcaccatcttcctgcagctcttccttacctaaataaagaaacagcccaagggcagtatttctaaaagcactgtaacagcttttcattttctccacatatactacaaattctataaagaaagaaattaatttaaaaaaactaagatgtttttctcttctggcttcataaatgccttgctgtataaattgaaatattgatactgaactgtctttttaatgatgacctaactttattcaacccatcggaatttactttttccctgaaataagatcttttccactggtctactacctgaccataaacatgtctgcatttgaattctctaaaccctaaatctgtgtctatgaaaaatacaaatgactattaaatattattctctttactgttctctttcaccgaaa

SEQ ID NO: 9826 - protein, 933 aa, Homo sapiens
MIPVLTSKKASELPVSEVASILQADLQNGLNKCEVSHRRAFHGWNEFDISEDEPLWKKYISQFKNPLIMLLLASAVISVLMHQFDDAVSITVAILIVVTVAFVQEYRSEKSLEELSKLVPPECHCVREGKLEHTLARDLVPGDTVCLSVGDRVPADLRLFEAVDLSIDESSLTGETTPCSKVTAPQPAATNGDLASRSNIAFMGTLVRCGKAKGVVIGTGENSEFGEVFKMMQAEEAPKTPLQKSMDLLGKQLSFYSFGIIGIIMLVGWLLGKDILEMFTISVSLAVAAIPEGLPIVVTVTLALGVMRMVKKRAIVKKLPIVETLGCCNVICSDKTGTLTKNEMTVTHIFTSDGLHAEVTGVGYNQFGEVIVDGDVVHGFYNPAVSRIVEAGCVCNDAVIRNNTLMGKPTEGALIALAMKMGLDGLQQDYIRKAEYPFSSEQKWMAVKCVHRTQQDRPEICFMKGAYEQVIKYCTTYQSKGQTLTLTQQQRDVYQQEKARMGSAGLRVLALASGPELGQLTFLGLVGIIDPPRTGVKEAVTTLIASGVSIKMITGDSQETAVAIASRLGLYSKTSQSVSGEEIDAMDVQQLSQIVPKVAVFYRASPRHKMKIIKSLQKNGSVVAMTGDGVNDAVALKAADIGVAMGQTGTDVCKEAADMILVDDDFQTIMSAIEEGKGIYNNIKNFVRFQLSTSIAALTLISLATLMNFPNPLNAMQILWINIIMDGPPAQSLGVEPVDKDVIRKPPRNWKDSILTKNLILKILVSSIIIVCGTLFVFWRELRDNVITPRDTTMTFTCFVFFDMFNALSSRSQTKSVFEIGLCSNRMFCYAVLGSIMGQLLVIYFPPLQKVFQTESLSILDLLFLLGLTSSVCIVAEIIKKVERSREKIQKHVSSTSSSFLEVWLWERSGQQLVEIHPHLETGLPLTEDVSCV

SEQ ID NO: 9827 - DNA, 3649 bp, Homo sapiens
gggaactccttcctcagcctctcgtcagcgccgcttctcctggtttctcttgcagatgctgctgctaggggtggtgggagcagccgtgggacgcgtggccgggagcgggggtgacagcctgggattccgggggcttctcttccttgtcctcctcctctcctctctattcccagtgtggccgtggctgacactaaagactttgtagccatcaacccgagtgcagtttcgatggaaaatgaaggttgcacgttttcaaaaaatacctaatggtgaaaatgagacaatgattcctgtattgacatcaaaaaaagcaagtgaattaccagtcagtgaagttgcaagcattctccaagctgatcttcagaatggtctaaacaaatgtgaagttagtcataggcgagcctttcatggctggaatgagtttgatattagtgaagatgagccactgtggaagaagtatatttctcagtttaaaaatccccttattatgctgcttctggcttctgcagtcatcagtgttttaatgcatcagtttgatgatgccgtcagtatcactgtggcaatacttatcgttgttacagttgcctttgttcaggaatatcgttcagaaaaatctcttgaagaattgagtaaacttgtgccaccagaatgccattgtgtgcgtgaaggaaaattggagcatacacttgcccgagacttggttccaggtgatacagtttgcctttctgttggggatagagttcctgctgacttacgcttgtttgaggctgtggatctttccattgatgagtccagcttgacaggtgagacaacgccttgttctaaggtgacagctcctcagccagctgcaactaatggagatcttgcatcgagaagtaacattgcctttatgggaacactggtcagatgtggcaaagcaaagggtgttgtcattggaacaggagaaaattctgaatttggggaggtttttaaaatgatgcaagcagaagaggcaccaaaaacccctctgcagaagagcatggacctcttaggaaaacaactttccttttactcctttggtataataggaatcatcatgttggttggctggttactgggaaaagatatcctggaaatgtttactattagtgtaagtttggctgtagcagcaattcctgaaggtctccccattgtggtcacagtgacgctagctcttggtgttatgagaatggtgaagaaaagggccattgtgaaaaagctgcctattgttgaaactctgggctgctgtaatgtgatttgttcagataaaactggaacactgacgaagaatgaaatgactgttactcacatatttacttcagatggtctgcatgctgaggttactggagttggctataatcaatttggggaagtgattgttgatggtgatgttgttcatggattctataacccagctgttagcagaattgttgaggcgggctgtgtgtgcaatgatgctgtaattagaaacaatactctaatggggaagccaacagaaggggccttaattgctcttgcaatgaagatgggtcttgatggacttcaacaagactacatcagaaaagctgaatacccttttagctctgagcaaaagtggatggctgttaagtgtgtacaccgaacacagcaggacagaccagagatttgttttatgaaaggtgcttacgaacaagtaattaagtactgtactacataccagagcaaagggcagaccttgacacttactcagcagcagagagatgtgtaccaacaagagaaggcacgcatgggctcagcgggactcagagttcttgctttggcttctggtcctgaactgggacagctgacatttcttggcttggtgggaatcattgatccacctagaactggtgtgaaagaagctgttacaacactcattgcctcaggagtatcaataaaaatgattactggagattcacaggagactgcagttgcaatcgccagtcgtctgggattgtattccaaaacttcccagtcagtctcaggagaagaaatagatgcaatggatgttcagcagctttcacaaatagtaccaaaggttgcagtattttacagagctagcccaaggcacaagatgaaaattattaagtcgctacagaagaacggttcagttgtagccatgacaggagatggagtaaatgatgcagttgctctgaaggctgcagacattggagttgcgatgggccagactggtacagatgtttgcaaagaggcagcagacatgatcctagtggatgatgattttcaaaccataatgtctgcaatcgaagagggtaaagggatttataataacattaaaaatttcgttagattccagctgagcacgagtatagcagcattaactttaatctcattggctacattaatgaactttcctaatcctctcaatgccatgcagattttgtggatcaatattattatggatggacccccagctcagagccttggagtagaaccagtggataaagatgtcattcgtaaacctcctcgcaactggaaagacagcattttgactaaaaacttgatacttaaaatacttgtttcatcaataatcattgtttgtgggactttgtttgtcttctggcgtgagctacgagacaatgtgattacacctcgagacacaacaatgaccttcacatgctttgtgttttttgacatgttcaatgcactaagttccagatcccagaccaagtctgtgtttgagattggactctgcagtaatagaatgttttgctatgcagttcttggatccatcatgggacaattactagttatttactttcctccgcttcagaaggtttttcagactgagagcctaagcatactggatctgttgtttcttttgggtctcacctcatcagtgtgcatagtggcagaaattataaagaaggttgaaaggagcagggaaaagatccagaagcatgttagttcgacatcatcatcttttcttgaagtatgatgcatattgcattattttatttgcaaactaggaattgcagtctgaggatcatttagaagggcaagttcaagaggatatgaagatttgagaactttttaactattcattgactaaaaatgaacattaatgttaaagacttaagactttaacctgctggcagtcccaaatgaaattatgcaactttgatatcatattccttgatttaaattggcttttgtgattgagtgaaactttataaagcatatggtcagttatttaattaaaaaggcaaaacctgaaccaccttctgcacttaaagaagtctaacagtacaaatacactatctatcttagatagatatatttttttttatttttaaatattgtactatttatggtggtggggctttcttactaatacacaaataaatttaatcatttcaaaggcattctatttggtttagaagttgattcccaggagtgccatatttcagctactgtatttcctttttcttgtaatgtaagcagctcagataccatgtgctatcatttttgtatcaagttttttgcacaggatgtgaccactgtcagatcactgttcttttctttctttttgtgattgaaaagcctatactacaatttgaagtaaatttttgtttttcttagtaagtgtaaa

SEQ ID NO: 9828 - protein, 919 aa, Homo sapiens; identical to SEQ ID NO: 862

SEQ ID NO: 9829 - DNA, 4793 bp, Homo sapiens
gggaactccttcctcagcctctcgtcagcgccgcttctcctggtttctcttgcagatgctgctgctaggggtggtgggagcagccgtgggacgcgtggccgggagcgggggtgacagcctgggattccgggggcttctcttccttgtcctcctcctctcctctctattcccagtgtggccgtggctgacactaaagactttgtagccatcaacccgagtgcagtttcgatggaaaatgaaggttgcacgttttcaaaaaatacctaatggtgaaaatgagacaatgattcctgtattgacatcaaaaaaagcaagtgaattaccagtcagtgaagttgcaagcattctccaagctgatcttcagaatggtctaaacaaatgtgaagttagtcataggcgagcctttcatggctggaatgagtttgatattagtgaagatgagccactgtggaagaagtatatttctcagtttaaaaatccccttattatgctgcttctggcttctgcagtcatcagtgttttaatgcatcagtttgatgatgccgtcagtatcactgtggcaatacttatcgttgttacagttgcctttgttcaggaatatcgttcagaaaaatctcttgaagaattgagtaaacttgtgccaccagaatgccattgtgtgcgtgaaggaaaattggagcatacacttgcccgagacttggttccaggtgatacagtttgcctttctgttggggatagagttcctgctgacttacgcttgtttgaggctgtggatctttccattgatgagtccagcttgacaggtgagacaacgccttgttctaaggtgacagctcctcagccagctgcaactaatggagatcttgcatcgagaagtaacattgcctttatgggaacactggtcagatgtggcaaagcaaagggtgttgtcattggaacaggagaaaattctgaatttggggaggtttttaaaatgatgcaagcagaagaggcaccaaaaacccctctgcagaagagcatggacctcttaggaaaacaactttccttttactcctttggtataataggaatcatcatgttggttggctggttactgggaaaagatatcctggaaatgtttactattagtgtaagtttggctgtagcagcaattcctgaaggtctccccattgtggtcacagtgacgctagctcttggtgttatgagaatggtgaagaaaagggccattgtgaaaaagctgcctattgttgaaactctgggctgctgtaatgtgatttgttcagataaaactggaacactgacgaagaatgaaatgactgttactcacatatttacttcagatggtctgcatgctgaggttactggagttggctataatcaatttggggaagtgattgttgatggtgatgttgttcatggattctataacccagctgttagcagaattgttgaggcgggctgtgtgtgcaatgatgctgtaattagaaacaatactctaatggggaagccaacagaaggggccttaattgctcttgcaatgaagatgggtcttgatggacttcaacaagactacatcagaaaagctgaatacccttttagctctgagcaaaagtggatggctgttaagtgtgtacaccgaacacagcaggacagaccagagatttgttttatgaaaggtgcttacgaacaagtaattaagtactgtactacataccagagcaaagggcagaccttgacacttactcagcagcagagagatgtgtaccaacaagagaaggcacgcatgggctcagcgggactcagagttcttgctttggcttctggtcctgaactgggacagctgacatttcttggcttggtgggaatcattgatccacctagaactggtgtgaaagaagctgttacaacactcattgcctcaggagtatcaataaaaatgattactggagattcacaggagactgcagttgcaatcgccagtcgtctgggattgtattccaaaacttcccagtcagtctcaggagaagaaatagatgcaatggatgttcagcagctttcacaaatagtaccaaaggttgcagtattttacagagctagcccaaggcacaagatgaaaattattaagtcgctacagaagaacggttcagttgtagccatgacaggagatggagtaaatgatgcagttgctctgaaggctgcagacattggagttgcgatgggccagactggtacagatgtttgcaaagaggcagcagacatgatcctagtggatgatgattttcaaaccataatgtctgcaatcgaagagggtaaagggatttataataacattaaaaatttcgttagattccagctgagcacgagtatagcagcattaactttaatctcattggctacattaatgaactttcctaatcctctcaatgccatgcagattttgtggatcaatattattatggatggacccccagctcagagccttggagtagaaccagtggataaagatgtcattcgtaaacctcctcgcaactggaaagacagcattttgactaaaaacttgatacttaaaatacttgtttcatcaataatcattgtttgtgggactttgtttgtcttctggcgtgagctacgagacaatgtgattacacctcgagacacaacaatgaccttcacatgctttgtgttttttgacatgttcaatgcactaagttccagatcccagaccaagtctgtgtttgagattggactctgcagtaatagaatgttttgctatgcagttcttggatccatcatgggacaattactagttatttactttcctccgcttcagaaggtttttcagactgagagcctaagcatactggatctgttgtttcttttgggtctcacctcatcagtgtgcatagtggcagaaattataaagaaggttgaaaggagcagggaaaagatccagaagcatgttagttcgacatcatcatcttttcttgaagtatgatgcatattgcattattttatttgcaaactaggaattgcagtctgaggatcatttagaagggcaagttcaagaggatatgaagatttgagaactttttaactattcattgactaaaaatgaacattaatgttaaagacttaagactttaacctgctggcagtcccaaatgaaattatgcaactttgatatcatattccttgatttaaattggcttttgtgattgagtgaaactttataaagcatatggtcagttatttaattaaaaaggcaaaacctgaaccaccttctgcacttaaagaagtctaacagtacaaatacactatctatcttagatagatatatttttttttatttttaaatattgtactatttatggtggtggggctttcttactaatacacaaataaatttaatcatttcaaaggcattctatttggtttagaagttgattcccaggagtgccatatttcagctactgtatttcctttttcttgtaatgtaagcagctcagataccatgtgctatcatttttgtatcaagttttttgcacaggatgtgaccactgtcagatcactgttcttttctttctttttgtgattgaaaagcctatactacaatttgaagtaaatttttgtttttcttagtaagtgtaaatggttgctttatttttattttaaaaaggtatgtctttggtttggcagaattcatgcagggctatcaagtggtgttctagggtaacagtgtccataattaacgcttagtcatagagtcaaaaacatttaagactgattgggttgaagtttataataaattatattaacatgtcttcctttttgaggtaaagatatatactttgtcaaatatcattttgtcatcctctaaatataaatccaaatacctcagctaagtaattctattttattatttttactgttatgtatgtttttaatcatatttcttaggaagtataggctactggacttagaataaaaagtccccaaacccaaacaaatggtttatgaaccagagtatatgtggaagattctttgctggtcttgctctgtgtgcatctgaagcttctttggcctagattttagcacaaacctgagtatatctcttctactttcatcatgtgttctgtaccttctttttgtttcattgggcatgctagggaaataggtggattttgtgtgtaatgccatcagtttttatgaaagcttgatgaggtataggtcatttgttttgagtatgtgggccagaaatttaaaattagaaatttgtttttctgttgagtatataaacaaaaattggtcccaattctaacaggtttaatccttcttgaagccaataagttttatcttttataatctgtcaggatgaaccactccttagcttttatccaatattaaactgcaagtgttagcactgaaatattgtcattgatagggaaaatatctattctttgagtcattgttactgaggcagttgagtgtaaggagctggctgcagtttattctacttaaccctttaaggctgaattgtcaaatgtacattgttccatgtcgttagatggaacatggaagccattgtctaatcaactctatcattagtgacttgatgtctcataccttaattttgtaatgatttttattctctgttacaaagacttgaaatacgtattaaatgcacgttaatgttttgctttgcattttaggttcagattatgacttgattgaaataaatgtgcctatacattcatttgctttgtactataaaaataaaaatgatttcttaagtt

SEQ ID NO: 9830 - protein, 919 aa, Homo sapiens; identical to SEQ ID NO: 862

SEQ ID NO: 9831 - DNA, 4884 bp, Homo sapiens
gggaactccttcctcagcctctcgtcagcgccgcttctcctggtttctcttgcagatgctgctgctaggggtggtgggagcagccgtgggacgcgtggccgggagcgggggtgacagcctgggattccgggggcttctcttccttgtcctcctcctctcctctctattcccagtgtggccgtggctgacactaaagactttgtagccatcaacccgagtgcagtttcgatggaaaatgaaggttgcacgttttcaaaaaatacctaatggtgaaaatgagacaatgattcctgtattgacatcaaaaaaagcaagtgaattaccagtcagtgaagttgcaagcattctccaagctgatcttcagaatggtctaaacaaatgtgaagttagtcataggcgagcctttcatggctggaatgagtttgatattagtgaagatgagccactgtggaagaagtatatttctcagtttaaaaatccccttattatgctgcttctggcttctgcagtcatcagtgttttaatgcatcagtttgatgatgccgtcagtatcactgtggcaatacttatcgttgttacagttgcctttgttcaggaatatcgttcagaaaaatctcttgaagaattgagtaaacttgtgccaccagaatgccattgtgtgcgtgaaggaaaattggagcatacacttgcccgagacttggttccaggtgatacagtttgcctttctgttggggatagagttcctgctgacttacgcttgtttgaggctgtggatctttccattgatgagtccagcttgacaggtgagacaacgccttgttctaaggtgacagctcctcagccagctgcaactaatggagatcttgcatcgagaagtaacattgcctttatgggaacactggtcagatgtggcaaagcaaagggtgttgtcattggaacaggagaaaattctgaatttggggaggtttttaaaatgatgcaagcagaagaggcaccaaaaacccctctgcagaagagcatggacctcttaggaaaacaactttccttttactcctttggtataataggaatcatcatgttggttggctggttactgggaaaagatatcctggaaatgtttactattagtgtaagtttggctgtagcagcaattcctgaaggtctccccattgtggtcacagtgacgctagctcttggtgttatgagaatggtgaagaaaagggccattgtgaaaaagctgcctattgttgaaactctgggctgctgtaatgtgatttgttcagataaaactggaacactgacgaagaatgaaatgactgttactcacatatttacttcagatggtctgcatgctgaggttactggagttggctataatcaatttggggaagtgattgttgatggtgatgttgttcatggattctataacccagctgttagcagaattgttgaggcgggctgtgtgtgcaatgatgctgtaattagaaacaatactctaatggggaagccaacagaaggggccttaattgctcttgcaatgaagatgggtcttgatggacttcaacaagactacatcagaaaagctgaatacccttttagctctgagcaaaagtggatggctgttaagtgtgtacaccgaacacagcaggacagaccagagatttgttttatgaaaggtgcttacgaacaagtaattaagtactgtactacataccagagcaaagggcagaccttgacacttactcagcagcagagagatgtgtaccaacaagagaaggcacgcatgggctcagcgggactcagagttcttgctttggcttctggtcctgaactgggacagctgacatttcttggcttggtgggaatcattgatccacctagaactggtgtgaaagaagctgttacaacactcattgcctcaggagtatcaataaaaatgattactggagattcacaggagactgcagttgcaatcgccagtcgtctgggattgtattccaaaacttcccagtcagtctcaggagaagaaatagatgcaatggatgttcagcagctttcacaaatagtaccaaaggttgcagtattttacagagctagcccaaggcacaagatgaaaattattaagtcgctacagaagaacggttcagttgtagccatgacaggagatggagtaaatgatgcagttgctctgaaggctgcagacattggagttgcgatgggccagactggtacagatgtttgcaaagaggcagcagacatgatcctagtggatgatgattttcaaaccataatgtctgcaatcgaagagggtaaagggatttataataacattaaaaatttcgttagattccagctgagcacgagtatagcagcattaactttaatctcattggctacattaatgaactttcctaatcctctcaatgccatgcagattttgtggatcaatattattatggatggacccccagctcagagccttggagtagaaccagtggataaagatgtcattcgtaaacctcctcgcaactggaaagacagcattttgactaaaaacttgatacttaaaatacttgtttcatcaataatcattgtttgtgggactttgtttgtcttctggcgtgagctacgagacaatgtgattacacctcgagacacaacaatgaccttcacatgctttgtgttttttgacatgttcaatgcactaagttccagatcccagaccaagtctgtgtttgagattggactctgcagtaatagaatgttttgctatgcagttcttggatccatcatgggacaattactagttatttactttcctccgcttcagaaggtttttcagactgagagcctaagcatactggatctgttgtttcttttgggtctcacctcatcagtgtgcatagtggcagaaattataaagaaggttgaaaggagcagggaaaagatccagaagcatgttagttcgacatcatcatcttttcttgaagtatgatgcatattgcattattttatttgcaaactaggaattgcagtctgaggatcatttagaagggcaagttcaagaggatatgaagatttgagaactttttaactattcattgactaaaaatgaacattaatgttaaagacttaagactttaacctgctggcagtcccaaatgaaattatgcaactttgatatcatattccttgatttaaattggcttttgtgattgagtgaaactttataaagcatatggtcagttatttaattaaaaaggcaaaacctgaaccaccttctgcacttaaagaagtctaacagtacaaatacactatctatcttagatagatatatttttttttatttttaaatattgtactatttatggtggtggggctttcttactaatacacaaataaatttaatcatttcaaaggcattctatttggtttagaagttgattcccaggagtgccatatttcagctactgtatttcctttttcttgtaatgtaagcagctcagataccatgtgctatcatttttgtatcaagttttttgcacaggatgtgaccactgtcagatcactgttcttttctttctttttgtgattgaaaagcctatactacaatttgaagtaaatttttgtttttcttagtaagtgtaaatggttgctttatttttattttaaaaaggtatgtctttggtttggcagaattcatgcagggctatcaagtggtgttctagggtaacagtgtccataattaacgcttagtcatagagtcaaaaacatttaagactgattgggttgaagtttataataaattatattaacatgtcttcctttttgaggtaaagatatatactttgtcaaatatcattttgtcatcctctaaatataaatccaaatacctcagctaagtaattctattttattatttttactgttatgtatgtttttaatcatatttcttaggaagtataggctactggacttagaataaaaagtccccaaacccaaacaaatggtttatgaaccagagtatatgtggaagattctttgctggtcttgctctgtgtgcatctgaagcttctttggcctagattttagcacaaacctgagtatatctcttctactttcatcatgtgttctgtaccttctttttgtttcattgggcatgctagggaaataggtggattttgtgtgtaatgccatcagtttttatgaaagcttgatgaggtataggtcatttgttttgagtatgtgggccagaaatttaaaattagaaatttgtttttctgttgagtatataaacaaaaattggtcccaattctaacaggtttaatccttcttgaagccaataagttttatcttttataatctgtcaggatgaaccactccttagcttttatccaatattaaactgcaagtgttagcactgaaatattgtcattgatagggaaaatatctattctttgagtcattgttactgaggcagttgagtgtaaggagctggctgcagtttattctacttaaccctttaaggctgaattgtcaaatgtacattgttccatgtcgttagatggaacatggaagccattgtctaatcaactctatcattagtgacttgatgtctcataccttaattttgtaatgatttttattctctgttacaaagacttgaaatacgtattaaatgcacgttaatgttttgctttgcattttaggttcagattatgacttgattgaaataaatgtgcctatacattcatttgctttgtactataaaaataaaaatgatttcttaagttaatgacatcccagtggggactattagcattaaaattatccatatggatgctgaagatacagaaattaaaattatccatatggatgctggag

SEQ ID NO: 9832 - protein, 919 aa, Homo sapiens; identical to SEQ ID NO: 862

SEQ ID NO: 9833 - DNA, 3396 bp, Homo sapiens
gggaactccttcctcagcctctcgtcagcgccgcttctcctggtttctcttgcagatgctgctgctaggggtggtgggagcagccgtgggacgcgtggccgggagcgggggtgacagcctgggattccgggggcttctcttccttgtcctcctcctctcctctctattcccagtgtggccgtggctgacactaaagactttgtagccatcaacccgagtgcagtttcgatggaaaatgaaggttgcacgttttcaaaaaatacctaatggtgaaaatgagacaatgattcctgtattgacatcaaaaaaagcaagtgaattaccagtcagtgaagttgcaagcattctccaagctgatcttcagaatggtctaaacaaatgtgaagttagtcataggcgagcctttcatggctggaatgagtttgatattagtgaagatgagccactgtggaagaagtatatttctcagtttaaaaatccccttattatgctgcttctggcttctgcagtcatcagtgttttaatgcatcagtttgatgatgccgtcagtatcactgtggcaatacttatcgttgttacagttgcctttgttcaggaatatcgttcagaaaaatctcttgaagaattgagtaaacttgtgccaccagaatgccattgtgtgcgtgaaggaaaattggagcatacacttgcccgagacttggttccaggtgatacagtttgcctttctgttggggatagagttcctgctgacttacgcttgtttgaggctgtggatctttccattgatgagtccagcttgacaggtgagacaacgccttgttctaaggtgacagctcctcagccagctgcaactaatggagatcttgcatcgagaagtaacattgcctttatgggaacactggtcagatgtggcaaagcaaagggtgttgtcattggaacaggagaaaattctgaatttggggaggtttttaaaatgatgcaagcagaagaggcaccaaaaacccctctgcagaagagcatggacctcttaggaaaacaactttccttttactcctttggtataataggaatcatcatgttggttggctggttactgggaaaagatatcctggaaatgtttactattagtgtaagtttggctgtagcagcaattcctgaaggtctccccattgtggtcacagtgacgctagctcttggtgttatgagaatggtgaagaaaagggccattgtgaaaaagctgcctattgttgaaactctgggctgctgtaatgtgatttgttcagataaaactggaacactgacgaagaatgaaatgactgttactcacatatttacttcagatggtctgcatgctgaggttactggagttggctataatcaatttggggaagtgattgttgatggtgatgttgttcatggattctataacccagctgttagcagaattgttgaggcgggctgtgtgtgcaatgatgctgtaattagaaacaatactctaatggggaagccaacagaaggggccttaattgctcttgcaatgaagatgggtcttgatggacttcaacaagactacatcagaaaagctgaatacccttttagctctgagcaaaagtggatggctgttaagtgtgtacaccgaacacagcaggacagaccagagatttgttttatgaaaggtgcttacgaacaagtaattaagtactgtactacataccagagcaaagggcagaccttgacacttactcagcagcagagagatgtgtaccaacaagagaaggcacgcatgggctcagcgggactcagagttcttgctttggcttctggtcctgaactgggacagctgacatttcttggcttggtgggaatcattgatccacctagaactggtgtgaaagaagctgttacaacactcattgcctcaggagtatcaataaaaatgattactggagattcacaggagactgcagttgcaatcgccagtcgtctgggattgtattccaaaacttcccagtcagtctcaggagaagaaatagatgcaatggatgttcagcagctttcacaaatagtaccaaaggttgcagtattttacagagctagcccaaggcacaagatgaaaattattaagtcgctacagaagaacggttcagttgtagccatgacaggagatggagtaaatgatgcagttgctctgaaggctgcagacattggagttgcgatgggccagactggtacagatgtttgcaaagaggcagcagacatgatcctagtggatgatgattttcaaaccataatgtctgcaatcgaagagggtaaagggatttataataacattaaaaatttcgttagattccagctgagcacgagtatagcagcattaactttaatctcattggctacattaatgaactttcctaatcctctcaatgccatgcagattttgtggatcaatattattatggatggacccccagctcagagccttggagtagaaccagtggataaagatgtcattcgtaaacctcctcgcaactggaaagacagcattttgactaaaaacttgatacttaaaatacttgtttcatcaataatcattgtttgtgggactttgtttgtcttctggcgtgagctacgagacaatgtgattacacctcgagacacaacaatgaccttcacatgctttgtgttttttgacatgttcaatgcactaagttccagatcccagaccaagtctgtgtttgagattggactctgcagtaatagaatgttttgctatgcagttcttggatccatcatgggacaattactagttatttactttcctccgcttcagaaggtttttcagactgagagcctaagcatactgggtctggctctgggagaggagtggacagcagctggttgagatacatccccatctggagacaggactgccactgacagaagatgtgagctgtgtctaagtccagtcttgtgcccagccgtgtctgcgccttcactctttggaactctgcatacaacatcttagcaccatcttcctgcagctcttccttacctaaataaagaaacagcccaagggcagtatttctaaaagcactgtaacagcttttcattttctccacatatactacaaattctataaagaaagaaattaatttaaaaaaactaagatgtttttctcttctggcttcataaatgccttgctgtataaattgaaatattgatactgaactgtctttttaatgatgacctaactttattcaacccatcggaatttactttttccctgaaataagatcttttccactggtctactacctgaccataaacatgtctgcatttgaattctctaaaccctaaatctgtgtctatgaaaaatacaaatgactattaaatatt

SEQ ID NO: 9834 - protein, 888 aa, Homo sapiens; identical to SEQ ID NO: 856

SEQ ID NO: 9835 - DNA, 3425 bp, Homo sapiens
gggaactccttcctcagcctctcgtcagcgccgcttctcctggtttctcttgcagatgctgctgctaggggtggtgggagcagccgtgggacgcgtggccgggagcgggggtgacagcctgggattccgggggcttctcttccttgtcctcctcctctcctctctattcccagtgtggccgtggctgacactaaagactttgtagccatcaacccgagtgcagtttcgatggaaaatgaaggttgcacgttttcaaaaaatacctaatggtgaaaatgagacaatgattcctgtattgacatcaaaaaaagcaagtgaattaccagtcagtgaagttgcaagcattctccaagctgatcttcagaatggtctaaacaaatgtgaagttagtcataggcgagcctttcatggctggaatgagtttgatattagtgaagatgagccactgtggaagaagtatatttctcagtttaaaaatccccttattatgctgcttctggcttctgcagtcatcagtgttttaatgcatcagtttgatgatgccgtcagtatcactgtggcaatacttatcgttgttacagttgcctttgttcaggaatatcgttcagaaaaatctcttgaagaattgagtaaacttgtgccaccagaatgccattgtgtgcgtgaaggaaaattggagcatacacttgcccgagacttggttccaggtgatacagtttgcctttctgttggggatagagttcctgctgacttacgcttgtttgaggctgtggatctttccattgatgagtccagcttgacaggtgagacaacgccttgttctaaggtgacagctcctcagccagctgcaactaatggagatcttgcatcgagaagtaacattgcctttatgggaacactggtcagatgtggcaaagcaaagggtgttgtcattggaacaggagaaaattctgaatttggggaggtttttaaaatgatgcaagcagaagaggcaccaaaaacccctctgcagaagagcatggacctcttaggaaaacaactttccttttactcctttggtataataggaatcatcatgttggttggctggttactgggaaaagatatcctggaaatgtttactattagtgtaagtttggctgtagcagcaattcctgaaggtctccccattgtggtcacagtgacgctagctcttggtgttatgagaatggtgaagaaaagggccattgtgaaaaagctgcctattgttgaaactctgggctgctgtaatgtgatttgttcagataaaactggaacactgacgaagaatgaaatgactgttactcacatatttacttcagatggtctgcatgctgaggttactggagttggctataatcaatttggggaagtgattgttgatggtgatgttgttcatggattctataacccagctgttagcagaattgttgaggcgggctgtgtgtgcaatgatgctgtaattagaaacaatactctaatggggaagccaacagaaggggccttaattgctcttgcaatgaagatgggtcttgatggacttcaacaagactacatcagaaaagctgaatacccttttagctctgagcaaaagtggatggctgttaagtgtgtacaccgaacacagcaggacagaccagagatttgttttatgaaaggtgcttacgaacaagtaattaagtactgtactacataccagagcaaagggcagaccttgacacttactcagcagcagagagatgtgtaccaacaagagaaggcacgcatgggctcagcgggactcagagttcttgctttggcttctggtcctgaactgggacagctgacatttcttggcttggtgggaatcattgatccacctagaactggtgtgaaagaagctgttacaacactcattgcctcaggagtatcaataaaaatgattactggagattcacaggagactgcagttgcaatcgccagtcgtctgggattgtattccaaaacttcccagtcagtctcaggagaagaaatagatgcaatggatgttcagcagctttcacaaatagtaccaaaggttgcagtattttacagagctagcccaaggcacaagatgaaaattattaagtcgctacagaagaacggttcagttgtagccatgacaggagatggagtaaatgatgcagttgctctgaaggctgcagacattggagttgcgatgggccagactggtacagatgtttgcaaagaggcagcagacatgatcctagtggatgatgattttcaaaccataatgtctgcaatcgaagagggtaaagggatttataataacattaaaaatttcgttagattccagctgagcacgagtatagcagcattaactttaatctcattggctacattaatgaactttcctaatcctctcaatgccatgcagattttgtggatcaatattattatggatggacccccagctcagagccttggagtagaaccagtggataaagatgtcattcgtaaacctcctcgcaactggaaagacagcattttgactaaaaacttgatacttaaaatacttgtttcatcaataatcattgtttgtgggactttgtttgtcttctggcgtgagctacgagacaatgtgattacacctcgagacacaacaatgaccttcacatgctttgtgttttttgacatgttcaatgcactaagttccagatcccagaccaagtctgtgtttgagattggactctgcagtaatagaatgttttgctatgcagttcttggatccatcatgggacaattactagttatttactttcctccgcttcagaaggtttttcagactgagagcctaagcatactgggtctggctctgggagaggagtggacagcagctggttgagatacatccccatctggagacaggactgccactgacagaagatgtgagctgtgtctaagtccagtcttgtgcccagccgtgtctgcgccttcactctttggaactctgcatacaacatcttagcaccatcttcctgcagctcttccttacctaaataaagaaacagcccaagggcagtatttctaaaagcactgtaacagcttttcattttctccacatatactacaaattctataaagaaagaaattaatttaaaaaaactaagatgtttttctcttctggcttcataaatgccttgctgtataaattgaaatattgatactgaactgtctttttaatgatgacctaactttattcaacccatcggaatttactttttccctgaaataagatcttttccactggtctactacctgaccataaacatgtctgcatttgaattctctaaaccctaaatctgtgtctatgaaaaatacaaatgactattaaatattattctctttactgttctctttcaccgaaa

SEQ ID NO: 9836 - protein, 888 aa, Homo sapiens; identical to SEQ ID NO: 856

SEQ ID NO: 9837 - DNA, 339 bp, Homo sapiens
aagacaactggctactctttcaacgcaccatgacaacaagtcagactttaagagctattcacaaactaggagaaaaacaagaagtaaaagagaccagacaagcaaaggatgcacagcaacttaaagcctgaagacagaagatacacagttgactctttaacaacatgagtttcaactgtaaaggtctacttatactcagatttgcttctgtcacccgagacagcaagaccaacccctccttttcttcagcctactcaaagcgaagacaatgaggatgaagacctttatagtgatccacttctgcttaatgaattataaatatattttctcctcctcata

SEQ ID NO: 9838 - protein, 33 aa, Homo sapiens
MTTSQTLRAIHKLGEKQEVKETRQAKDAQQLKA

SEQ ID NO: 9839 - DNA, 985 bp, Homo sapiens
tttgtggatcaatattattatggatggacccccagctcagagccttggagtagaaccagtggataaagatgtcattcgtaaacctcctcgcaactggaaagacagcattttgactaaaaacttgatacttaaaatacttgtttcatcaataatcattgtttgtgggactttgtttgtcttctggcgtgagctacgagacaatgtgattacacctcgagacacaacaatgaccttcacatgctttgtgttttttgacatgttcaatgcactaagttccagatcccagaccaagtctgtgtttgagattggactctgcagtaatagaatgttttgctatgcagttcttggatccatcatgggacaattactagttatttactttcctccgcttcagaaggtttttcagactgagagcctaagcatactggatctgttgtttcttttgggtctcacctcatcagtgtgcatagtggcagaaattataaagaaggttgaaaggagcagggaaaagatccagaagcatgttagttcgacatcatcatcttttcttgaagtatgatgcatattgcattattttatttgcaaactaggaattgcagtctgaggatcatttagaagggcaagttcaagaggatatgaagatttgagaactttttaactattcattgactaaaaatgaacattaatgttaaagacttaagactttaacctgctggcagtcccaaatgaaattatgcaactttgatatcatattccttgatttaaattggcttttgtgattgagtgaaactttataaagcatatggtcagttatttaattaaaaaggcaaaacctgaaccaccttctgcacttaaagaagtctaacagtacaaatacactatctatcttagatagatatatttttttttatttttaaatattgtactatttatggtggtggggctttcttactaatacacaaataaatttaatcatttcaaaggc

SEQ ID NO: 9840 - protein, 179 aa, Homo sapiens [sequence omitted]

SEQ ID NO: 9841 - DNA, 1213 bp, Homo sapiens
tttgtggatcaatattattatggatggacccccagctcagagccttggagtagaaccagtggataaagatgtcattcgtaaacctcctcgcaactggaaagacagcattttgactaaaaacttgatacttaaaatacttgtttcatcaataatcattgtttgtgggactttgtttgtcttctggcgtgagctacgagacaatgtgattacacctcgagacacaacaatgaccttcacatgctttgtgttttttgacatgttcaatgcactaagttccagatcccagaccaagtctgtgtttgagattggactctgcagtaatagaatgttttgctatgcagttcttggatccatcatgggacaattactagttatttactttcctccgcttcagaaggtttttcagactgagagcctaagcatactggatctgttgtttcttttgggtctcacctcatcagtgtgcatagtggcagaaattataaagaaggttgaaaggagcagggaaaagatccagaagcatgttagttcgacatcatcatcttttcttgaagtatgatgcatattgcattattttatttgcaaactaggaattgcagtctgaggatcatttagaagggcaagttcaagaggatatgaagatttgagaactttttaactattcattgactaaaaatgaacattaatgttaaagacttaagactttaacctgctggcagtcccaaatgaaattatgcaactttgatatcatattccttgatttaaattggcttttgtgattgagtgaaactttataaagcatatggtcagttatttaattaaaaaggcaaaacctgaaccaccttctgcacttaaagaagtctaacagtacaaatacactatctatcttagatagatatatttttttttatttttaaatattgtactatttatggtggtggggctttcttactaatacacaaataaatttaatcatttcaaaggcattctatttggtttagaagttgattcccaggagtgccatatttcagctactgtatttcctttttcttgtaatgtaagcagctcagataccatgtgctatcatttttgtatcaagttttttgcacaggatgtgaccactgtcagatcactgttcttttctttctttttgtgattgaaaagcctatactacaatttgaagtaaatttttgtttttcttagtaagtgtaaa

SEQ ID NO: 9842 - protein, 179 aa, Homo sapiens [sequence omitted]

SEQ ID NO: 9843 - DNA, 2357 bp, Homo sapiens
tttgtggatcaatattattatggatggacccccagctcagagccttggagtagaaccagtggataaagatgtcattcgtaaacctcctcgcaactggaaagacagcattttgactaaaaacttgatacttaaaatacttgtttcatcaataatcattgtttgtgggactttgtttgtcttctggcgtgagctacgagacaatgtgattacacctcgagacacaacaatgaccttcacatgctttgtgttttttgacatgttcaatgcactaagttccagatcccagaccaagtctgtgtttgagattggactctgcagtaatagaatgttttgctatgcagttcttggatccatcatgggacaattactagttatttactttcctccgcttcagaaggtttttcagactgagagcctaagcatactggatctgttgtttcttttgggtctcacctcatcagtgtgcatagtggcagaaattataaagaaggttgaaaggagcagggaaaagatccagaagcatgttagttcgacatcatcatcttttcttgaagtatgatgcatattgcattattttatttgcaaactaggaattgcagtctgaggatcatttagaagggcaagttcaagaggatatgaagatttgagaactttttaactattcattgactaaaaatgaacattaatgttaaagacttaagactttaacctgctggcagtcccaaatgaaattatgcaactttgatatcatattccttgatttaaattggcttttgtgattgagtgaaactttataaagcatatggtcagttatttaattaaaaaggcaaaacctgaaccaccttctgcacttaaagaagtctaacagtacaaatacactatctatcttagatagatatatttttttttatttttaaatattgtactatttatggtggtggggctttcttactaatacacaaataaatttaatcatttcaaaggcattctatttggtttagaagttgattcccaggagtgccatatttcagctactgtatttcctttttcttgtaatgtaagcagctcagataccatgtgctatcatttttgtatcaagttttttgcacaggatgtgaccactgtcagatcactgttcttttctttctttttgtgattgaaaagcctatactacaatttgaagtaaatttttgtttttcttagtaagtgtaaatggttgctttatttttattttaaaaaggtatgtctttggtttggcagaattcatgcagggctatcaagtggtgttctagggtaacagtgtccataattaacgcttagtcatagagtcaaaaacatttaagactgattgggttgaagtttataataaattatattaacatgtcttcctttttgaggtaaagatatatactttgtcaaatatcattttgtcatcctctaaatataaatccaaatacctcagctaagtaattctattttattatttttactgttatgtatgtttttaatcatatttcttaggaagtataggctactggacttagaataaaaagtccccaaacccaaacaaatggtttatgaaccagagtatatgtggaagattctttgctggtcttgctctgtgtgcatctgaagcttctttggcctagattttagcacaaacctgagtatatctcttctactttcatcatgtgttctgtaccttctttttgtttcattgggcatgctagggaaataggtggattttgtgtgtaatgccatcagtttttatgaaagcttgatgaggtataggtcatttgttttgagtatgtgggccagaaatttaaaattagaaatttgtttttctgttgagtatataaacaaaaattggtcccaattctaacaggtttaatccttcttgaagccaataagttttatcttttataatctgtcaggatgaaccactccttagcttttatccaatattaaactgcaagtgttagcactgaaatattgtcattgatagggaaaatatctattctttgagtcattgttactgaggcagttgagtgtaaggagctggctgcagtttattctacttaaccctttaaggctgaattgtcaaatgtacattgttccatgtcgttagatggaacatggaagccattgtctaatcaactctatcattagtgacttgatgtctcataccttaattttgtaatgatttttattctctgttacaaagacttgaaatacgtattaaatgcacgttaatgttttgctttgcattttaggttcagattatgacttgattgaaataaatgtgcctatacattcatttgctttgtactataaaaataaaaatgatttcttaagtt

SEQ ID NO: 9844 - protein, 179 aa, Homo sapiens [sequence omitted]

SEQ ID NO: 9845 - DNA, 2448 bp, Homo sapiens
tttgtggatcaatattattatggatggacccccagctcagagccttggagtagaaccagtggataaagatgtcattcgtaaacctcctcgcaactggaaagacagcattttgactaaaaacttgatacttaaaatacttgtttcatcaataatcattgtttgtgggactttgtttgtcttctggcgtgagctacgagacaatgtgattacacctcgagacacaacaatgaccttcacatgctttgtgttttttgacatgttcaatgcactaagttccagatcccagaccaagtctgtgtttgagattggactctgcagtaatagaatgttttgctatgcagttcttggatccatcatgggacaattactagttatttactttcctccgcttcagaaggtttttcagactgagagcctaagcatactggatctgttgtttcttttgggtctcacctcatcagtgtgcatagtggcagaaattataaagaaggttgaaaggagcagggaaaagatccagaagcatgttagttcgacatcatcatcttttcttgaagtatgatgcatattgcattattttatttgcaaactaggaattgcagtctgaggatcatttagaagggcaagttcaagaggatatgaagatttgagaactttttaactattcattgactaaaaatgaacattaatgttaaagacttaagactttaacctgctggcagtcccaaatgaaattatgcaactttgatatcatattccttgatttaaattggcttttgtgattgagtgaaactttataaagcatatggtcagttatttaattaaaaaggcaaaacctgaaccaccttctgcacttaaagaagtctaacagtacaaatacactatctatcttagatagatatatttttttttatttttaaatattgtactatttatggtggtggggctttcttactaatacacaaataaatttaatcatttcaaaggcattctatttggtttagaagttgattcccaggagtgccatatttcagctactgtatttcctttttcttgtaatgtaagcagctcagataccatgtgctatcatttttgtatcaagttttttgcacaggatgtgaccactgtcagatcactgttcttttctttctttttgtgattgaaaagcctatactacaatttgaagtaaatttttgtttttcttagtaagtgtaaatggttgctttatttttattttaaaaaggtatgtctttggtttggcagaattcatgcagggctatcaagtggtgttctagggtaacagtgtccataattaacgcttagtcatagagtcaaaaacatttaagactgattgggttgaagtttataataaattatattaacatgtcttcctttttgaggtaaagatatatactttgtcaaatatcattttgtcatcctctaaatataaatccaaatacctcagctaagtaattctattttattatttttactgttatgtatgtttttaatcatatttcttaggaagtataggctactggacttagaataaaaagtccccaaacccaaacaaatggtttatgaaccagagtatatgtggaagattctttgctggtcttgctctgtgtgcatctgaagcttctttggcctagattttagcacaaacctgagtatatctcttctactttcatcatgtgttctgtaccttctttttgtttcattgggcatgctagggaaataggtggattttgtgtgtaatgccatcagtttttatgaaagcttgatgaggtataggtcatttgttttgagtatgtgggccagaaatttaaaattagaaatttgtttttctgttgagtatataaacaaaaattggtcccaattctaacaggtttaatccttcttgaagccaataagttttatcttttataatctgtcaggatgaaccactccttagcttttatccaatattaaactgcaagtgttagcactgaaatattgtcattgatagggaaaatatctattctttgagtcattgttactgaggcagttgagtgtaaggagctggctgcagtttattctacttaaccctttaaggctgaattgtcaaatgtacattgttccatgtcgttagatggaacatggaagccattgtctaatcaactctatcattagtgacttgatgtctcataccttaattttgtaatgatttttattctctgttacaaagacttgaaatacgtattaaatgcacgttaatgttttgctttgcattttaggttcagattatgacttgattgaaataaatgtgcctatacattcatttgctttgtactataaaaataaaaatgatttcttaagttaatgacatcccagtggggactattagcattaaaattatccatatggatgctgaagatacagaaattaaaattatccatatggatgctggag

SEQ ID NO: 9846 - protein, 179 aa, Homo sapiens [sequence omitted]

SEQ ID NO: 9847 - DNA, 740 bp, Homo sapiens
atggattggacatcttggtaattgaccatccaggaggtacttgagggagagatgaagataaaaaggagatagattgtgttttgtttgtctctccactcagatgtaaactctgtggggggaggggcttgtctattttatttgctgttgcagccccagtgccttcaatactttgaatgaggatatatggacgcatacaaaatatggtgggactttacatgtttcaagactgtacagtggaagcctggtgcacggactatgccagcaactgctagcatcgacctctgtagaaagtctcctgagcatatgtcctgaggctaagcaactttatgaatatctattcaatgccacaaggtcatatgcccccgctgaaatattcctaccaaaaggtagatcaaattcaaaaaaaaaaaggcagaagaaacagaataccagctgttctaagaacagagggagaaccactgcacacaccaagtgttggtatgagggaaacaaccggtttgggttgttaatggttgaaaacttagaggaacatagtgaggcctccaacattgaataaaactcagtttgcatcaaactagatgtatttaatataatccttacttaaaattcttccgttaccacccttgaaacaattagctttttctttaggactgacctgttaggggataaacatcacaataatctgaattccaagttattttgtattttgtttttaataaatacaacctgatttaagaagc

SEQ ID NO: 9848 - protein, 42 aa, Homo sapiens
MDAYKIWWDFTCFKTVQWKPGARTMPATASIDLCRKSPEHMS

SEQ ID NO: 9849 - DNA, 2678 bp, Homo sapiens
gttcgccgacccaagtaggcggagaaagcagaggaggaccggcgggccaagctttcctagcctgacagcagccatttcggaacgtacgtcccagccctctttagctacttagcgcctctgggcccgagaacacctgctccttggctcagtctggcgccaccggcatcacggaactgtacttcccagagacgtcacaccgggagacttccgattcccgctcttgagattggactctcacgtgcaggagccagtcctcgctgggctctagcgggcttctgatggaggagctactcctctgggaggacagaaattagcagcagcctctgtcaccatccaaagattacaacccatgaaaccattgaatttgtgccttgtatcagaaagcaaaggagaatgaaaaagcacagctaacattgcttgaggatctaggcgattaattctttagactgtcatcatgggtatccgaggactaatgagttttgtggaagatcatagtaatgagttcttcactgatttgaagttgcgggacacaaaaattgtcattgatggttatgctcttttccaccgtctttgcttcagttcaaacttggatctccggtatggaggggactatgattcttttgcagatgttgtacaaaaattctttgaatcactgtttgcttgtaatatatgcccatatgttgtattagatggaggatgtgacatttcagataaaaagcttacaactttaaaggatagagctagagagaagatccagatggcccattccctttctgttggtgggagtgggtacgtatgtcccttactcatccgggaagtattcatacaggttttgatcaagctgcgggtgtgttttgtccagtgcttttcagaagcagatcgggacattatgacacttgctaaccattggaattgccctgtgttatcatcagatagtgacttttgcatttttgacctgaaaactgggttttgcccattgaatagctttcagtggagaaatatgaacactattaagggcacacaaaactatatccctgccaaatgcttttcccttgatgcattctgccatcacttcagcaatatgaataaagctctactacctctctttgcggtgctatgtggaaatgaccatgttaatctacccatcatggagacattcttaagtaaagcgcgtcttcctcttggagctaccagttctaaagggaggagacaccaccgaatcctgggacttctgaattggttgtctcattttgccaaccctaccgaagcactagataatgttctgaaatacctcccaaaaaaggatcgagaaaatgttaaggaacttctctgctgttccatggaagaataccaacagtcccaggtgaagctacaggacttcttccagtgtggtacttatgtctgtccagatgccttgaatcttggtttaccagaatgggtattagtggctttagctaaaggccagctatctcctttcatcagtgatgctttggtcctaagacggaccattcttcccacacaggtggaaaacatgcagcaaccaaatgcccacagaatatctcagcccatcaggcaaatcatctatgggcttcttttaaatgcctcaccacatctggacaagacatcctggaatgcattgcctcctcagcctctagctttcagtgaagtggaaaggattaataaaaatatcagaacctcaatcattgatgcagtagaactggccaaggatcattctgacttaagcagattgactgagctctccttgaggaggcggcagatgcttctgttagaaaccctgaaggtgaaacagaccattctggagccaatccctacttcactgaagttgcccattgctgtcagttgctactggttgcagcacaccgagaccaaagcaaagctacatcatctacaatccttactgctcacaatgctagtggggcccttgattgccataatcaacagccctggtaaggaagagctgcaggaagatggtgctaagatgttgtatgcagagttccaaagagtgaaggcgcagacacggctgggcacaagactggacttagacacagctcacatcttctgtcagtggcagtcctgtctccagatggggatgtatctcaaccagctgctgtccactcctctcccagagccagacctaactcgactgtacagtggaagcctggtgcacggactatgccagcaactgctagcatcgacctctgtagaaagtctcctgagcatatgtcctgaggctaagcaactttatgaatatctattcaatgccacaaggtcatatgcccccgctgaaatattcctaccaaaaggtagatcaaattcaaaaaaaaaaaggcagaagaaacagaataccagctgttctaagaacagagggagaaccactgcacacaccaagtgttggtatgagggaaacaaccggtttgggttgttaatggttgaaaacttagaggaacatagtgaggcctccaacattgaataaaactcagtttgcatcaaactagatgtatttaatataatccttacttaaaattcttccgttaccacccttgaaacaattagctttttctttaggactgacctgttaggggataaacatcacaataatctgaattccaagttattttgtattttgtttttaataaatacaacctgatttaagaagc

SEQ ID NO: 9850 - protein, 679 aa, Homo sapiens; identical to SEQ ID NO: 864

SEQ ID NO: 9851 - DNA, 2509 bp, Homo sapiens
gttcgccgacccaagtaggcggagaaagcagaggaggaccggcgggccaagctttcctagcctgacagcagccatttcggaacgtacgtcccagccctctttagctacttagcgcctctgggcccgagaacacctgctccttggctcagtctggcgccaccggcatcacggaactgtacttcccagagacgtcacaccgggagacttccgattcccgctcttgagattggactctcacgtgcaggagccagtcctcgctgggctctagcgggcttctgatggaggagctactcctctgggaggacagaaattagcagcagcctctgtcaccatccaaagattacaacccatgaaaccattgaatttgtgccttgtatcagaaagcaaaggagaatgaaaaagcacagctaacattgcttgaggatctaggcgattaattctttagactgtcatcatgggtatccgaggactaatgagttttgtggaagatcatagtaatgagttcttcactgatttgaagttgcgggacacaaaaattgtcattgatggttatgctcttttccaccgtctttgcttcagttcaaacttggatctccggtatggaggggactatgattcttttgcagatgttgtacaaaaattctttgaatcactgtttgcttgtaatatatgcccatatgttgtattagatggaggatgtgacatttcagataaaaagcttacaactttaaaggatagagctagagagaagatccagatggcccattccctttctgttggtgggagtgggtacgtatgtcccttactcatccgggaagtattcatacaggttttgatcaagctgcgggtgtgttttgtccagtgcttttcagaagcagatcgggacattatgacacttgctaaccattggaattgccctgtgttatcatcagatagtgacttttgcatttttgacctgaaaactgggttttgcccattgaatagctttcagtggagaaatatgaacactattaagggcacacaaaactatatccctgccaaatgcttttcccttgatgcattctgccatcacttcagcaatatgaataaagctctactacctctctttgcggtgctatgtggaaatgaccatgttaatctacccatcatggagacattcttaagtaaagcgcgtcttcctcttggagctaccagttctaaagggaggagacaccaccgaatcctgggacttctgaattggttgtctcattttgccaaccctaccgaagcactagataatgttctgaaatacctcccaaaaaaggatcgagaaaatgttaaggaacttctctgctgttccatggaagaataccaacagtcccaggtgaagctacaggacttcttccagtgtggtacttatgtctgtccagatgccttgaatcttggtttaccagaatgggtattagtggctttagctaaaggccagctatctcctttcatcagtgatgctttggtcctaagacggaccattcttcccacacaggtggaaaacatgcagcaaccaaatgcccacagaatatctcagcccatcaggcaaatcatctatgggcttcttttaaatgcctcaccacatctggacaagacatcctggaatgcattgcctcctcagcctctagctttcagtgaagtggaaaggattaataaaaatatcagaacctcaatcattgatgcagtagaactggccaaggatcattctgacttaagcagattgactgagctctccttgaggaggcggcagatgcttctgttagaaaccctgaaggtgaaacagaccattctggagccaatccctacttcactgaagttgcccattgctgtcagttgctactggttgcagcacaccgagaccaaagcaaagctacatcatctacaatccttactgctcacaatgctagtggggcccttgattgccataatcaacagccctggtaaggaagagctgcaggaagatggtgctaagatgttgtatgcagagttccaaagagtgaaggcgcagacacggctgggcacaagactggacttagacacagctcacatcttctgtcagtggcagtcctgtctccagatggggatgtatctcaaccagctgctgtccactcctctcccagagccagacctaactcgactgtacagtggaagcctggtgcacggactatgccagcaactgctagcatcgacctctgtagaaagtctcctgagcatatgtcctgaggctaagcaactttatgaatatctattcaatgccacaaggtcatatgcccccgctgaaatattcctaccaaaaggtagatcaaattcaaaaaaaaaaaggcagaagaaacagaataccagctgttctaagaacagagggagaaccactgcacacaccaagtgttggtatgagggaaacaaccggtttgggttgttaatggttgaaaacttagaggaacatagtgaggcctccaacattgaataaaactcagtttgcatc

SEQ ID NO: 9852 - protein, 679 aa, Homo sapiens; identical to SEQ ID NO: 864

SEQ ID NO: 9853 - DNA, 923 bp, Homo sapiens
gagaggaaactcttctttaatccacctctgcatgtgatcatctgcatttgactccttgaactatggcagccagctggagccatgaagtaagccaccctaacatgagtggcagaaacatggagagacagggtttcaccataatggccaggctgctctccacctcctgggctcaagcgatccacccacctcagcctcccaaaatgttgggattgcagatatgagccatagttcccctccatcaggttaacgtttattgaggggcactgagactggagtacatccggaggtaagatgtccaggaaagcgaggagatcgcagccatggcgtcctagagattcggaacccagcccgggcagcttgaaaccattaccttccccctcgcaggggagcctggctagccccaaggaggacagttcgctttacctttccctgtcgtggtcggagcggcgcccggggctgcccaagtcttgcgggtaatcgggcaggcctcaaactaggggcaaccacacccaccgagcgccagacaccgcgggccacggctgtttggaaccgtggccagggagacggcgcggggcatactgggaagtcggggcgaggcggcaccaaggcggaagtgttcgccgacccaagtaggcggagaaagcagaggaggaccggcgggccaagctttcctagcctgacagcagccatttcggaacgtacgtcccagccctctttagctacttagcgcctctgggcccgagaacacctgctccttggctcagtctggcgccaccggcatcacggaactgtacttcccagagacgtcacaccgggagacttccgattcccgctcttgagattggactctcacgtgcaggagccagtcctcgctgggctctagcgggcttctgatggaggagctactcctctgggaggacaga

SEQ ID NO: 9854 - protein, 52 aa, Homo sapiens
MAASWSHEVSHPNMSGRNMERQGFTIMARLLSTSWAQAIHPPQPPKMLGLQI

SEQ ID NO: 9855 - DNA, 2189 bp, Homo sapiens
ggttccaaacagccgtggcccgcggtgtctggcgctcggtgggtgtggttgcccctagtttgaggcctgcccgattacccgcaagacttgggcagccccgggcgccgctccgaccacgacagggaaaggtaaagcgaactgtcctccttggggctagccaggctcccctgcgagggggaaggtaatggtttcaagctgcccgggctgggttccgaatctctaggacgccatggctgcgatctcctcgctttcctggacatcttacctccggatgtactccagtctcagtgcccctcaataaacgttaacctgctttgccaaaatgtaaatgtttaaaaaggtgaagaagcaaggaattgttcgttttaccttaaggttaagatttactttaaaggtagatttgtgctgtagcagaaactggtgacaaattgccttcctcttattacctgggaagataactactggttttcaacttgtgataaatactccttccgttgtcttttgcccccagccagatctgtttcaccgagaacgggtagtttgcacaaggtagtaactttctccaagttcccatctagctttcttaactaaccttttttctctcctttgggcggcagttgatctgctggacacttacttgccttaacaaggtttgttaaacacctagtatatgccaggaggtatgccagggattggggatgcagaaataaagaagatgtgttcgcagtgcccaagttcactcaaacctcgagggggagcgtgttgtcaagtgaacagatagttctagaatctagacaatgcgacacattcttgggtaggtttatggttgcgcagaggagactaatggaatggatgacctaaaagtggactgggatgggggtggcagggctgagtctgtgagggtgggcgggagggaacctagtcccagagtcttctgcagcctggaccagactacttaagcactgctgggtttagactgtcctttaaaataagagccgctagaagtgaacttctcattctgtccgtccctaattctgtccttctctaaaaggaaccttaatctcatctttaaaataaggagaattactgagtgacctgaaggacccttttcagctggaaagtctgaactgaccaacactggatgaatttgaccatttcttaggagactggaatgttaagtttctataaatgaatgaaccagttctctcttgtttggagcaatgctgaaattccaagaggcagctaagtgtgtgagtggatcaacagccatttccacttatccaaagaccttgattgcaagaagatacgtgcttcaacaaaaacttggcagtggaagttttggaactgtctatctggtttcagacaagaaagccaaacgaggagaggaattaaaggtacttaaggaaatatctgttggagaactaaatccaaatgaaactgtacaggccaatttggaagcccaactcctctccaagctggaccacccagccattgtcaagttccatgcaagttttgtggagcaagataatttctgcattatcacggagtactgtgagggccgagatctggacgataaaattcaggaatataaacaagctggaaaaatctttccagaaaatcaaataatagaatggtttatccagctgctgctgggagttgactacatgcatgagaggaggatacttcatcgagacttaaagtcaaagaatgtatttctgaaaaataatctccttaaaattggagattttggagtttctcgacttctaatgggatcctgtgacctggccacaactttaactggaactccccattatatgagtcctgaggctctgaaacaccaaggctatgacacaaagtcggacatctggtgagtgggctagtgggctagactcttcatctgcttccctaaaagaatggtacattttgtctttcagctcatttacttactgcatacattcactttatccctttgacatgaatatttctgtgaccagagtaaaagaaggtcttttgcatttagaactcaatatatttcattaaactagtttcaaaaattctttttattcagtgataattggttggttttggatttttggttcctgaatcacaagggaaagttcttaatgtaccataagcattaaattttaatacatttctgttaacctattaaataaagtatttgtaaccct

SEQ ID NO: 9856 - protein, 216 aa, Homo sapiens [sequence omitted]

SEQ ID NO: 9857 - DNA, 2754 bp, Homo sapiens
ggttccaaacagccgtggcccgcggtgtctggcgctcggtgggtgtggttgcccctagtttgaggcctgcccgattacccgcaagacttgggcagccccgggcgccgctccgaccacgacagggaaaggaactgaccaacactggatgaatttgaccatttcttaggagactggaatgttaagtttctataaatgaatgaaccagttctctcttgtttggagcaatgctgaaattccaagaggcagctaagtgtgtgagtggatcaacagccatttccacttatccaaagaccttgattgcaagaagatacgtgcttcaacaaaaacttggcagtggaagttttggaactgtctatctggtttcagacaagaaagccaaacgaggagaggaattaaaggtacttaaggaaatatctgttggagaactaaatccaaatgaaactgtacaggccaatttggaagcccaactcctctccaagctggaccacccagccattgtcaagttccatgcaagttttgtggagcaagataatttctgcattatcacggagtactgtgagggccgagatctggacgataaaattcaggaatataaacaagctggaaaaatctttccagaaaatcaaataatagaatggtttatccagctgctgctgggagttgactacatgcatgagaggaggatacttcatcgagacttaaagtcaaagaatgtatttctgaaaaataatctccttaaaattggagattttggagtttctcgacttctaatgggatcctgtgacctggccacaactttaactggaactccccattatatgagtcctgaggctctgaaacaccaaggctatgacacaaagtcggacatctggtcactggcatgcattttgtatgagatgtgctgcatgaatcatgcattcgctggctccaatttcttatccattgttttaaaaattgttgaaggtgacacaccttctctccctgagagatatccaaaagaactaaatgccatcatggaaagcatgttgaacaagaatccttcattaagaccatctgctatcgaaattttaaaaatcccttaccttgatgagcagctacagaacctaatgtgtagatattcagaaatgactctggaagacaaaaatttggattgtcagaaggaggctgctcatataattaatgccatgcaaaaaaggatccacctgcagactctgagggcactgtcagaagtacagaaaatgacgccaagagaaaggatgcggctgaggaagctccaggcggctgatgagaaagccaggaagctgaaaaagattgtggaagaaaaatatgaagaaaatagcaaacgaatgcaagaattgagatctcggaactttcagcagctgagtgttgatgtactccatgaaaaaacacatttaaaaggaatggaagaaaaggaggagcaacctgagggaagactttcttgttcaccccaggacgaggatgaagagaggtggcaaggcagggaagaggaatctgatgaaccaactttagagaacctgcctgagtctcagcctattccttccatggacctccacgaacttgaatcaattgtagaggatgccacatctgaccttggataccatgagatcccagaagacccacttgtggctgaagagtactacgctgatgcatttgattcctattgtgaagagagtgatgaggaggaagaagaaatagcgttagaaagaccagagaaagaaatcaggaatgagggatcccagcctgcttacagaacaaaccaacaggacagtgatatcgaagcgttggccaggtgtttggaaaatgtcctgggttgcacttctctagatcagccatgcagaagctggggacagaagtatttgaagaggtctataattacctcaagagagcaaggcatcagaatgctagcgaagcagagatccgcgagtgtttggaaaaagtggtgcctcaagccagcgactgttttgaagtggaccagctcctgtactttgaagagcagttgctgatcacgatgggaaaagaacctactctccagaaccatctctaggcaactatcaaaaagaagcagaagttcaagtggacaaatttatgtgaaaattcatttaacatataagctgaactctattatggggaatggatacaaaagcagagctcccatcttgactttcaattcctcatcagaagtactggcttctttagagagtagtaagcatggctgcctatgcttggagtcataagtgttatttggactataccctgagataagcttatagatcaagtttggctcccttgaaaagcatttctctcatgtgcgccctcagggcttccagcaggattgagtcaccctgacgatgaccggggagaagccgtgtgctcttcattattttcagctggaggacagagctcagtgcctgactgcctagggtctcatggactgtaggcagcctgccagtgaaggtcactggactctagcctacaacatgctgagctacagcccagaagccagacatgcctgtcttagctgacctgtttttggtccacttttgcccttccatgactaataaggaagatatgtgtgtatttcatacacacacaaggacctggattaaaaatccaaaaagtgattctcttctatgatttatttcaaactcatccatagataattcaagatttgtattcaaaataaacatagttttcacagttacaaaataaatcacctattttatcttttcctta

SEQ ID NO: 9858 - protein, 599 aa, Homo sapiens
MLKFQEAAKCVSGSTAISTYPKTLIARRYVLQQKLGSGSFGTVYLVSDKKAKRGEELKVLKEISVGELNPNETVQANLEAQLLSKLDHPAIVKFHASFVEQDNFCIITEYCEGRDLDDKIQEYKQAGKIFPENQIIEWFIQLLLGVDYMHERRILHRDLKSKNVFLKNNLLKIGDFGVSRLLMGSCDLATTLTGTPHYMSPEALKHQGYDTKSDIWSLACILYEMCCMNHAFAGSNFLSIVLKIVEGDTPSLPERYPKELNAIMESMLNKNPSLRPSAIEILKIPYLDEQLQNLMCRYSEMTLEDKNLDCQKEAAHIINAMQKRIHLQTLRALSEVQKMTPRERMRLRKLQAADEKARKLKKIVEEKYEENSKRMQELRSRNFQQLSVDVLHEKTHLKGMEEKEEQPEGRLSCSPQDEDEERWQGREEESDEPTLENLPESQPIPSMDLHELESIVEDATSDLGYHEIPEDPLVAEEYYADAFDSYCEESDEEEEEIALERPEKEIRNEGSQPAYRTNQQDSDIEALARCLENVLGCTSLDQPCRSWGQKYLKRSIITSREQGIRMLAKQRSASVWKKWCLKPATVLKWTSSCTLKSSC

SEQ ID NO: 9859 - DNA, 2061 bp, Homo sapiens
ccaaacagccgtggcccgcggtgtctggcgctcggtgggtgtggttgcccctagtttgaggcctgcccgattacccgcaagacttgggcagccccgggcgccgctccgaccacgacagggaaaggaaccttaatctcatctttaaaataaggagaattactgagtgacctgaaggacccttttcagctggaaagtctgaactgaccaacactggatgaatttgaccatttcttaggagactggaatgttaagtttctataaatgaatgaaccagttctctcttgtttggagcaatgctgaaattccaagaggcagctaagtgtgtgagtggatcaacagccatttccacttatccaaagaccttgattgcaagaagatacgtgcttcaacaaaaacttggcagtggaagttttggaactgtctatctggtttcagacaagaaagccaaacgaggagaggaattaaaggtacttaaggaaatatctgttggagaactaaatccaaatgaaactgtacaggccaatttggaagcccaactcctctccaagctggaccacccagccattgtcaagttccatgcaagttttgtggagcaagataatttctgcattatcacggagtactgtgagggccgagatctggacgataaaattcaggaatataaacaagctggaaaaatctttccagaaaatcaaataatagaatggtttatccagctgctgctgggagttgactacatgcatgagaggaggatacttcatcgagacttaaagtcaaagaatgtatttctgaaaaataatctccttaaaattggagattttggagtttctcgacttctaatgggatcctgtgacctggccacaactttaactggaactccccattatatgagtcctgaggctctgaaacaccaaggctatgacacaaagtcggacatctggtcactggcatgcattttgtatgagatgtgctgcatgaatcatgcattcgctggctccaatttcttatccattgttttaaaaattgttgaaggtgacacaccttctctccctgagagatatccaaaagaactaaatgccatcatggaaagcatgttgaacaagaatccttcattaagaccatctgctatcgaaattttaaaaatcccttaccttgatgagcagctacagaacctaatgtgtagatattcagaaatgactctggaagacaaaaatttggattgtcagaaggaggctgctcatataattaatgccatgcaaaaaaggatccacctgcagactctgagggcactgtcagaagtacagaaaatgacgccaagagaaaggatgcggctgaggaagctccaggcggctgatgagaaagccaggaagctgaaaaagattgtggaagaaaaatatgaagaaaatagcaaacgaatgcaagaattgagatctcggaactttcagcagctgagtgttgatgtactccatgaaaaaacacatttaaaaggaatggaagaaaaggaggagcaacctgagggaagactttcttgttcaccccaggacgaggatgaagagaggtggcaaggcagggaagaggaatctgatgaaccaactttagagaacctgcctgagtctcagcctattccttccatggacctccacgaacttgaatcaattgtagaggatgccacatctgaccttggataccatgcaactcacagctgactttcagagcagtgttttttccaaagctggaatagcctgagactctagggcctgggtctacaaggagcatgactccctaccccaccattcagatgtggagaatgcagtgaagtaggccttggctgcttacccacatcctgaccagctgtcacctcttcatttcctgttcagccactctttaagcaatcactgagcccaatgctcagagatagctcagacctgtaggtggttgtgctttgcttgcctgtaggagccccacatgccctttacagttctgggctgtctatgacttacgatatcacctcttctttttaaatgtccaagtggaaataaagtgatttgaactttgctaatt

SEQ ID NO: 9860 - protein, 470 aa, Homo sapiens; identical to SEQ ID NO: 868

SEQ ID NO: 9861 - DNA, 2920 bp, Homo sapiens
ccaaacagccgtggcccgcggtgtctggcgctcggtgggtgtggttgcccctagtttgaggcctgcccgattacccgcaagacttgggcagccccgggcgccgctccgaccacgacagggaaaggaaccttaatctcatctttaaaataaggagaattactgagtgacctgaaggacccttttcagctggaaagtctgaactgaccaacactggatgaatttgaccatttcttaggagactggaatgttaagtttctataaatgaatgaaccagttctctcttgtttggagcaatgctgaaattccaagaggcagctaagtgtgtgagtggatcaacagccatttccacttatccaaagaccttgattgcaagaagatacgtgcttcaacaaaaacttggcagtggaagttttggaactgtctatctggtttcagacaagaaagccaaacgaggagaggaattaaaggtacttaaggaaatatctgttggagaactaaatccaaatgaaactgtacaggccaatttggaagcccaactcctctccaagctggaccacccagccattgtcaagttccatgcaagttttgtggagcaagataatttctgcattatcacggagtactgtgagggccgagatctggacgataaaattcaggaatataaacaagctggaaaaatctttccagaaaatcaaataatagaatggtttatccagctgctgctgggagttgactacatgcatgagaggaggatacttcatcgagacttaaagtcaaagaatgtatttctgaaaaataatctccttaaaattggagattttggagtttctcgacttctaatgggatcctgtgacctggccacaactttaactggaactccccattatatgagtcctgaggctctgaaacaccaaggctatgacacaaagtcggacatctggtcactggcatgcattttgtatgagatgtgctgcatgaatcatgcattcgctggctccaatttcttatccattgttttaaaaattgttgaaggtgacacaccttctctccctgagagatatccaaaagaactaaatgccatcatggaaagcatgttgaacaagaatccttcattaagaccatctgctatcgaaattttaaaaatcccttaccttgatgagcagctacagaacctaatgtgtagatattcagaaatgactctggaagacaaaaatttggattgtcagaaggaggctgctcatataattaatgccatgcaaaaaaggatccacctgcagactctgagggcactgtcagaagtacagaaaatgacgccaagagaaaggatgcggctgaggaagctccaggcggctgatgagaaagccaggaagctgaaaaagattgtggaagaaaaatatgaagaaaatagcaaacgaatgcaagaattgagatctcggaactttcagcagctgagtgttgatgtactccatgaaaaaacacatttaaaaggaatggaagaaaaggaggagcaacctgagggaagactttcttgttcaccccaggacgaggatgaagagaggtggcaaggcagggaagaggaatctgatgaaccaactttagagaacctgcctgagtctcagcctattccttccatggacctccacgaacttgaatcaattgtagaggatgccacatctgaccttggataccatgagatcccagaagacccacttgtggctgaagagtactacgctgatgcatttgattcctattgtgaagagagtgatgaggaggaagaagaaatagcgttagaaagaccagagaaagaaatcaggaatgagggatcccagcctgcttacagaacaaaccaacaggacagtgatatcgaagcgttggccaggtgtttggaaaatgtcctgggttgcacttctctagacacaaagaccatcaccaccatggctgaagacatgtccccaggaccaccaattttcaacagtgtgatggccaggaccaagatgaaacgcatgagggaatcagccatgcagaagctggggacagaagtatttgaagaggtctataattacctcaagagagcaaggcatcagaatgctagcgaagcagagatccgcgagtgtttggaaaaagtggtgcctcaagccagcgactgttttgaagtggaccagctcctgtactttgaagagcagttgctgatcacgatgggaaaagaacctactctccagaaccatctctaggcaactatcaaaaagaagcagaagttcaagtggacaaatttatgtgaaaattcatttaacatataagctgaactctattatggggaatggatacaaaagcagagctcccatcttgactttcaattcctcatcagaagtactggcttctttagagagtagtaagcatggctgcctatgcttggagtcataagtgttatttggactataccctgagataagcttatagatcaagtttggctcccttgaaaagcatttctctcatgtgcgccctcagggcttccagcaggattgagtcaccctgacgatgaccggggagaagccgtgtgctcttcattattttcagctggaggacagagctcagtgcctgactgcctagggtctcatggactgtaggcagcctgccagtgaaggtcactggactctagcctacaacatgctgagctacagcccagaagccagacatgcctgtcttagctgacctgtttttggtccacttttgcccttccatgactaataaggaagatatgtgtgtatttcatacacacacaaggacctggattaaaaatccaaaaagtgattctcttctatgatttatttcaaactcatccatagataattcaagatttgtattcaaaataaacatagttttcacagttacaaaataaatcacctattttatcttttcctta

SEQ ID NO: 9862 - protein, 645 aa, Homo sapiens
MLKFQEAAKCVSGSTAISTYPKTLIARRYVLQQKLGSGSFGTVYLVSDKKAKRGEELKVLKEISVGELNPNETVQANLEAQLLSKLDHPAIVKFHASFVEQDNFCIITEYCEGRDLDDKIQEYKQAGKIFPENQIIEWFIQLLLGVDYMHERRILHRDLKSKNVFLKNNLLKIGDFGVSRLLMGSCDLATTLTGTPHYMSPEALKHQGYDTKSDIWSLACILYEMCCMNHAFAGSNFLSIVLKIVEGDTPSLPERYPKELNAIMESMLNKNPSLRPSAIEILKIPYLDEQLQNLMCRYSEMTLEDKNLDCQKEAAHIINAMQKRIHLQTLRALSEVQKMTPRERMRLRKLQAADEKARKLKKIVEEKYEENSKRMQELRSRNFQQLSVDVLHEKTHLKGMEEKEEQPEGRLSCSPQDEDEERWQGREEESDEPTLENLPESQPIPSMDLHELESIVEDATSDLGYHEIPEDPLVAEEYYADAFDSYCEESDEEEEEIALERPEKEIRNEGSQPAYRTNQQDSDIEALARCLENVLGCTSLDTKTITTMAEDMSPGPPIFNSVMARTKMKRMRESAMQKLGTEVFEEVYNYLKRARHQNASEAEIRECLEKVVPQASDCFEVDQLLYFEEQLLITMGKEPTLQNHL

SEQ ID NO: 9863 - DNA, 1012 bp, Homo sapiens
cagccgtggcccgcggtgtctggcgctcggtgggtgtggttgcccctagtttgaggcctgcccgattacccgcaagacttgggcagccccgggcgccgctccgaccacgacagggaaaggaactgaccaacactggatgaatttgaccatttcttaggagactggaatgttaagtttctataaatgaatgaaccagttctctcttgtttggagcaatgctgaaattccaagaggcagctaagtgtgtgagtggatcaacagccatttccacttatccaaagaccttgattgcaagaagatacgtgcttcaacaaaaacttggcagtggaagttttggaactgtctatctggtttcagacaagaaagccaaacgaggagaggaattaaaggtacttaaggaaatatctgttggagaactaaatccaaatgaaactgtacaggccaatttggaagcccaactcctctccaagctggaccacccagccattgtcaagttccatgcaagttttgtggagcaagataatttctgcattatcacggagtactgtgagggccgagatctggacgataaaattcaggaatataaacaagctggaaaaatctttccagaaaatcaaataatagaatggtttatccagctgctgctgggagttgactacatgcatgagaggaggatacttcatcgagacttaaagtcaaagaatgtatttctgaaaaataatctccttaaaattggagattttggagtttctcgacttctaatgggatcctgtgacctggccacaactttaactggaactccccattatatgagtcctgaggctctgaaacaccaaggctatgacacaaagtcggacatctggtcactggcatgcattttgtatgagatgtgctgcatgaatcatgcattcgctggctccaatttcttatccattgttttaaaaattgttgaaggtgacacaccttctctccctgagagatatccaaaagaactaaatgccatcatggaaag

SEQ ID NO: 9864 - protein, 264 aa, Homo sapiens
MLKFQEAAKCVSGSTAISTYPKTLIARRYVLQQKLGSGSFGTVYLVSDKKAKRGEELKVLKEISVGELNPNETVQANLEAQLLSKLDHPAIVKFHASFVEQDNFCIITEYCEGRDLDDKIQEYKQAGKIFPENQIIEWFIQLLLGVDYMHERRILHRDLKSKNVFLKNNLLKIGDFGVSRLLMGSCDLATTLTGTPHYMSPEALKHQGYDTKSDIWSLACILYEMCCMNHAFAGSNFLSIVLKIVEGDTPSLPERYPKELNAIM

SEQ ID NO: 9865 - DNA, 2891 bp, Homo sapiens
cagccgtggcccgcggtgtctggcgctcggtgggtgtggttgcccctagtttgaggcctgcccgattacccgcaagacttgggcagccccgggcgccgctccgaccacgacagggaaaggaactgaccaacactggatgaatttgaccatttcttaggagactggaatgttaagtttctataaatgaatgaaccagttctctcttgtttggagcaatgctgaaattccaagaggcagctaagtgtgtgagtggatcaacagccatttccacttatccaaagaccttgattgcaagaagatacgtgcttcaacaaaaacttggcagtggaagttttggaactgtctatctggtttcagacaagaaagccaaacgaggagaggaattaaaggtacttaaggaaatatctgttggagaactaaatccaaatgaaactgtacaggccaatttggaagcccaactcctctccaagctggaccacccagccattgtcaagttccatgcaagttttgtggagcaagataatttctgcattatcacggagtactgtgagggccgagatctggacgataaaattcaggaatataaacaagctggaaaaatctttccagaaaatcaaataatagaatggtttatccagctgctgctgggagttgactacatgcatgagaggaggatacttcatcgagacttaaagtcaaagaatgtatttctgaaaaataatctccttaaaattgctactggatcatctaatcatcatatagggtgtacttggggaaggaaggaaggaaggaataaaagtgtgcaactagttaggcaaattttggagtttctcgacttctaatgggatcctgtgacctggccacaactttaactggaactccccattatatgagtcctgaggctctgaaacaccaaggctatgacacaaagtcggacatctggtcactggcatgcattttgtatgagatgtgctgcatgaatcatgcattcgctggctccaatttcttatccattgttttaaaaattgttgaaggtgacacaccttctctccctgagagatatccaaaagaactaaatgccatcatggaaagcatgttgaacaagaatccttcattaagaccatctgctatcgaaattttaaaaatcccttaccttgatgagcagctacagaacctaatgtgtagatattcagaaatgactctggaagacaaaaatttggattgtcagaaggaggctgctcatataattaatgccatgcaaaaaaggatccacctgcagactctgagggcactgtcagaagtacagaaaatgacgccaagagaaaggatgcggctgaggaagctccaggcggctgatgagaaagccaggaagctgaaaaagattgtggaagaaaaatatgaagaaaatagcaaacgaatgcaagaattgagatctcggaactttcagcagctgagtgttgatgtactccatgaaaaaacacatttaaaaggaatggaagaaaaggaggagcaacctgagggaagactttcttgttcaccccaggacgaggatgaagagaggtggcaaggcagggaagaggaatctgatgaaccaactttagagaacctgcctgagtctcagcctattccttccatggacctccacgaacttgaatcaattgtagaggatgccacatctgaccttggataccatgagatcccagaagacccacttgtggctgaagagtactacgctgatgcatttgattcctattgtgaagagagtgatgaggaggaagaagaaatagcgttagaaagaccagagaaagaaatcaggaatgagggatcccagcctgcttacagaacaaaccaacaggacagtgatatcgaagcgttggccaggtgtttggaaaatgtcctgggttgcacttctctagacacaaagaccatcaccaccatggctgaagacatgtccccaggaccaccaattttcaacagtgtgatggccaggaccaagatgaaacgcatgagggaatcagccatgcagaagctggggacagaagtatttgaagaggtctataattacctcaagagagcaaggcatcagaatgctagcgaagcagagatccgcgagtgtttggaaaaagtggtgcctcaagccagcgactgttttgaagtggaccagctcctgtactttgaagagcagttgctgatcacgatgggaaaagaacctactctccagaaccatctctaggcaactatcaaaaagaagcagaagttcaagtggacaaatttatgtgaaaattcatttaacatataagctgaactctattatggggaatggatacaaaagcagagctcccatcttgactttcaattcctcatcagaagtactggcttctttagagagtagtaagcatggctgcctatgcttggagtcataagtgttatttggactataccctgagataagcttatagatcaagtttggctcccttgaaaagcatttctctcatgtgcgccctcagggcttccagcaggattgagtcaccctgacgatgaccggggagaagccgtgtgctcttcattattttcagctggaggacagagctcagtgcctgactgcctagggtctcatggactgtaggcagcctgccagtgaaggtcactggactctagcctacaacatgctgagctacagcccagaagccagacatgcctgtcttagctgacctgtttttggtccacttttgcccttccatgactaataaggaagatatgtgtgtatttcatacacacacaaggacctggattaaaaatccaaaaagtgattctcttctatgatttatttcaaactcatccatagataattcaagatttgtattcaaaataaacatagttttcacagttac

SEQ ID NO: 9866 - protein, 463 aa, Homo sapiens
MGSCDLATTLTGTPHYMSPEALKHQGYDTKSDIWSLACILYEMCCMNHAFAGSNFLSIVLKIVEGDTPSLPERYPKELNAIMESMLNKNPSLRPSAIEILKIPYLDEQLQNLMCRYSEMTLEDKNLDCQKEAAHIINAMQKRIHLQTLRALSEVQKMTPRERMRLRKLQAADEKARKLKKIVEEKYEENSKRMQELRSRNFQQLSVDVLHEKTHLKGMEEKEEQPEGRLSCSPQDEDEERWQGREEESDEPTLENLPESQPIPSMDLHELESIVEDATSDLGYHEIPEDPLVAEEYYADAFDSYCEESDEEEEEIALERPEKEIRNEGSQPAYRTNQQDSDIEALARCLENVLGCTSLDTKTITTMAEDMSPGPPIFNSVMARTKMKRMRESAMQKLGTEVFEEVYNYLKRARHQNASEAEIRECLEKVVPQASDCFEVDQLLYFEEQLLITMGKEPTLQNHL

SEQ ID NO: 9867 - DNA, 562 bp, Homo sapiens
gctcggtgggtgtggttgcccctagtttgaggcctgcccgattacccgcaagacttgggcagccccgggcgccgctccgaccacgacagggaaaggaactgaccaacactggatgaatttgaccatttcttaggagactggaatgttaagtttctataaatgaatgaaccagttctctcttgtttggagcaatgctgaaattccaagaggcagctaagtgtgtgagtggatcaacagccatttccacttatccaaagaccttgattgcaagaagatacgtgcttcaacaaaaacttggcagtggaagttttggaactgtctatctggtttcagacaagaaagccaaacgaggagaggaattaaaggtacttaaggaaatatctgttggagaactaaatccaaatgaaactgtacaggccaatttggaagcccaactcctctccaagctggaccacccagccattgtcaagttccatgcaagttttgtggagcaagataatttctgcattatcacggagtactgtgaggtgagactctccttttctcttggaagtctttataa

SEQ ID NO: 9868 - protein, 122 aa, Homo sapiens
MLKFQEAAKCVSGSTAISTYPKTLIARRYVLQQKLGSGSFGTVYLVSDKKAKRGEELKVLKEISVGELNPNETVQANLEAQLLSKLDHPAIVKFHASFVEQDNFCIITEYCEVRLSFSLGSL

SEQ ID NO: 9869 - DNA, 1838 bp, Homo sapiens
ggatgacctaaaagtggactgggatgggggtggcagggctgagtctgtgagggtgggcgggagggaacctagtcccagagtcttctgcagcctggaccagactacttaagcactgctgggtttagactgtcctttaaaataagagccgctagaagtgaacttctcattctgtccgtccctaattctgtccttctctaaaaggaaccttaatctcatctttaaaataaggagaattactgagtgacctgaaggacccttttcagctggaaagtctgaactgaccaacactggatgaatttgaccatttcttaggagactggaatgttaagtttctataaatgaatgaaccagttctctcttgtttggagcaatgctgaaattccaagaggcagctaagtgtgtgagtggatcaacagccatttccacttatccaaagaccttgattgcaagaagatacgtgcttcaacaaaaacttggcagtggaagttttggaactgtctatctggtttcagacaagaaagccaaacgaggagaggaattaaaggtacttaaggaaatatctgttggagaactaaatccaaatgaaactgtacaggccaatttggaagcccaactcctctccaagctggaccacccagccattgtcaagttccatgcaagttttgtggagcaagataatttctgcattatcacggagtactgtgagggccgagatctggacgataaaattcaggaatataaacaagctggaaaaatctttccagaaaatcaaataatagaatggtttatccagctgctgctgggagttgactacatgcatgagaggaggatacttcatcgagacttaaagtcaaagaatgtatttctgaaaaataatctccttaaaattggagattttggagtttctcgacttctaatgggatcctgtgacctggccacaactttaactggaactccccattatatgagtcctgaggctctgaaacaccaaggctatgacacaaagtcggacatctggtcactggcatgcattttgtatgagatgtgctgcatgaatcatgcattcgctggctccaatttcttatccattgttttaaaaattgttgaaggtgacacaccttctctccctgagagatatccaaaagaactaaatgccatcatggaaagcatgttgaacaagaatccttcattaagaccatctgctatcgaaattttaaaaatcccttaccttgatgagcagctacagaacctaatgtgtagatattcagaaatgactctggaagacaaaaatttggattgtcagaaggaggctgctcatataattaatgccatgcaaaaaaggatccacctgcagactctgagggcactgtcagaagtacagaaaatgacgccaagagaaaggatgcggctgaggaagctccaggcggctgatgagaaagccaggaagctgaaaaagattgtggaagaaaaatatgaagaaaatagcaaacgaatgcaagaattgagatctcggaactttcagcagctgagtgttgatgtactccatgaaaaaacacatttaaaaggaatggaagaaaaggaggagcaacctgagggaagactttcttgttcaccccaggacgaggatgaagagaggtggcaaggcagggaagaggaatctgatgaaccaactttagagaacctgcctgagtctcagcctattccttccatggacctccacgaacttgaatcaattgtagaggatgccacatctgaccttggataccatggagactgtaatctaatttcactagacgaatactggaaaaatgaaaaataaaggaatttctgaaataagg

SEQ ID NO: 9870 - protein, 482 aa, Homo sapiens
MLKFQEAAKCVSGSTAISTYPKTLIARRYVLQQKLGSGSFGTVYLVSDKKAKRGEELKVLKEISVGELNPNETVQANLEAQLLSKLDHPAIVKFHASFVEQDNFCIITEYCEGRDLDDKIQEYKQAGKIFPENQIIEWFIQLLLGVDYMHERRILHRDLKSKNVFLKNNLLKIGDFGVSRLLMGSCDLATTLTGTPHYMSPEALKHQGYDTKSDIWSLACILYEMCCMNHAFAGSNFLSIVLKIVEGDTPSLPERYPKELNAIMESMLNKNPSLRPSAIEILKIPYLDEQLQNLMCRYSEMTLEDKNLDCQKEAAHIINAMQKRIHLQTLRALSEVQKMTPRERMRLRKLQAADEKARKLKKIVEEKYEENSKRMQELRSRNFQQLSVDVLHEKTHLKGMEEKEEQPEGRLSCSPQDEDEERWQGREEESDEPTLENLPESQPIPSMDLHELESIVEDATSDLGYHGDCNLISLDEYWKNEK

SEQ ID NO: 9871 - DNA, 654 bp, Homo sapiens
tgatcatctgcatttgactccttgaactatggcagccagctggagccatgaagtaagccaccctaacatgagtggcagaaacatggagagacagggtttcaccataatggccaggctgctctccacctcctgggctcaagcgatccacccacctcagcctcccaaaatgttgggattgcagatatgagccatagttcccctccatcagtcttatagttaaatagacttcaaaagaatggaagtggctcagatccctctcaacttctaagagaccctgatctctcatcccattggcccttctaatagagctattggcattcacatcctattttcagcccaaatgtcagttcctggagtacaaaggcggtggctgcttcagatgcttcagactgaaactgctctttgccattctcatggacactggagagttaagtttggttaaattgatgcctttttcttttaaaaaagaaagaatacacatatacctttgtgtacacacaagctaggaaacatcaatctaatacatggatggcaagaaaaaccagatctggctcatgccagttacaatggtctgtgaagataaaaagatttcttcagatttatttctcagccaatttctgcttttcctagggagaaattaaaagtttgttaaat

SEQ ID NO: 9872 - protein, 52 aa, Homo sapiens; identical to SEQ ID NO: 9854

SEQ ID NO: 9873 - DNA, 625 bp, Homo sapiens
attagctgaaaaaatatgaaagattatgctcttcatttcagggccgagatctggacgataaaattcaggaatataaacaagctggaaaaatctttccagaaaatcaaataatagaatggtttatccagctgctgctgggagttgactacatgcatgagaggaggatacttcatcgagacttaaagtcaaagaatgtatttctgaaaaataatctccttaaaattggagattttggagtttctcgacttctaatgggatcctgtgacctggccacaactttaactggaactccccattatatgagtcctgaggctctgaaacaccaaggctatgacacaaagtcggacatctggtcactggcatgcattttgtatgagatgtgctgcatgaatcatgcattcgctggctccaatttcttatccattgttttaaaaattgttgaaggtgacacaccttctctccctgagagatatccaaaagaactaaatgccatcatggaaagcatgttgaacaagaatccttcattaagaccatctgctatcgaaattttaaaaatcccttaccttgatgagcagctacaggtatttaaaatgaaagggattctgggaaacaggtatgagcattt

SEQ ID NO: 9874 - protein, 157 aa, Homo sapiens
MHERRILHRDLKSKNVFLKNNLLKIGDFGVSRLLMGSCDLATTLTGTPHYMSPEALKHQGYDTKSDIWSLACILYEMCCMNHAFAGSNFLSIVLKIVEGDTPSLPERYPKELNAIMESMLNKNPSLRPSAIEILKIPYLDEQLQVFKMKGILGNRYE

SEQ ID NO: 9875 - DNA, 467 bp, Homo sapiens
agctacatgtaattttacataacccagggaaaactagcatgctttgttctcaggctccctgccatggtcaaaagcaccccaaatctgaaaagattcttggtaatttattccctttcatccctaaagaggagcctttaagatatgtcagggttgatctttttttcagaacctaatgtgtagatattcagaaatgactctggaagacaaaaatttggattgtcagaaggaggctgctcatataattaatgccatgcaaaaaaggatccacctgcagactctgagggcactgtcagaagtacagaaaatgacgccaagagaaaggatgcggctgaggaagctccaggcggctgatgagaaagccaggaagctgaaaaagattgtggaagaaaaatatgaagaaaatagcaaacgaatgcaagaattgagatctcggaactttcagcagctgagtgttgatgtactccatg

SEQ ID NO: 9876 - protein, 97 aa, Homo sapiens
MCRYSEMTLEDKNLDCQKEAAHIINAMQKRIHLQTLRALSEVQKMTPRERMRLRKLQAADEKARKLKKIVEEKYEENSKRMQELRSRNFQQLSVDVL

SEQ ID NO: 9877 - DNA, 1977 bp, Homo sapiens
caaaagagcaagtcagggaactagctttggttgggttcggtggtacacaaagcacaaggcctgggttggggttaggaggaaatgagacttgcggcgggtcggggctgaagatgtggcagcgccctgaacctggagaaaggctgaatccctttggtcaaggagagggagagagaggtaagggtctggtcttactttttaagcaggaagaagactacaaaccaccatctaccatctgccaggccctggaatttgaaccaccatcttctggagtgactcaaatgcagaggaagccaggcctgctgctaacgtttctgagaggcggcaagagtataaatggagatccacatatgtataaataaagagtgtgaatcaagctaacaaactgtttaataaaatatgatctaccctcttagcttgacaaatcaacttttcaaacacctggaagaacaagtttgcactcaggattctcagactcctcagagttctgcactgggatgtggaagggctgtgcaagccagcccttgggtccctgatccctgtctcctggcctgtgcccgtctcttctcagcctggctccaactcccattgagaggaagttcttgtacacatatgatactgcagcccttatgtctaatatttatccataccttctgcaaacagccactgtgtgaccacccttgggcttcccaggggtctgcaaactgacaatacagacaaagggaaccaaggcagaggctcacagactgtagaaatgggcttggggccatctgggcagagacttgtggaatcccagcacgatcactctgggtgctgtgtgaaatggatgaatagcaaggagctgcagccaagagcaaatcaacagaagcaccactcaaaatgcctcagtacccattacataaggattcttgtgattaattcttccccaaaatttagagccaagaaaaatccagctctcctactgagagttgtagattagagcttctgtttctaatctacaaacaaacaaatgtgtgcaatgtcttttcatgacaattccaactttatcataaggttgtctactaagaaactagtaggcaggtttctcttgttgtctagaccacctgaaagctcatagctgagtttgcacttatttgcagagtaaactgctcatttatcaatctggcatccaatcacaactttttagctaactgtatgttttcataaacacttttctcacacagtataaattttaaataaataacaatagcaattaagtagtaacaactcgagactggtatctgactagtggttctttcaccagtgtgtacactggaagttttgttttgttttttgatgtttgtacattgtaattgcaggacaggtagtaagaagatttcaaattcacattagctttgctaccactaaattatggtgactgttcctaatttgcaaacaaatgtatgcaatctctttttatgattatcccaactttatcataaggttgttatattttaagacatatgaaaagatataaagtataatacagtgaatacatatatatctaactcccagtttaagaaataaaacattagcaaatacagctgaagctccatgaattcccctcccaaatcatactcccttcccacccgcagagggaacctctattctgagcctggtgtttatcaccaccaagaattaaaaaaatacttttactatatatacacaagtatgtaccccttagaaatgagtagtagtactgttttgtatgtctttacactttaagtaaatggtataagttatttcttgtttttgctcaaaattgttgaaatttatgccctttgattctatagctgactttcactgtgagtcattccatcattatttctgtattcattctcctgctgaagtacatttcaggttgttgctattcctctgctgatccccctcccccaacacacatgcttttattaataaatctgctggaacattcttgcatac

SEQ ID NO: 9878 - protein, 82 aa, Homo sapiens
MWQRPEPGERLNPFGQGEGERGKGLVLLFKQEEDYKPPSTICQALEFEPPSSGVTQMQRKPGLLLTFLRGGKSINGDPHMYK

SEQ ID NO: 9879 - DNA, 2192 bp, Homo sapiens
agcaagatggcccttaccagatgctggcaccttgatatttgacttcccagcctccagaactgtgagaaacaaatttattttctttataaattactcagattgtggtgttctgttacagcaacacaaaatggactatgtgaagaaaaccatgttggaatcttgtgctgtcattgataagaaaggatctgagcattaggtcaatcaccaaaaaactgaaaaatcagtaacaatgatgacagactcttcaaataggatgatttaaattttaggaaattggaagaagactccaagaaacttaacaaggtcctccaatattttccccaaaatgatcttctctgatttgactatgcttgttcctccatatctccctgatccctagacttcttctgtcctctatccacattctctcccaaggtgggtcatctagtttcatgactttaaatcctcccttaaactgttggttctcaaatatgcacttgtcacttctctcctaaactccagactcatgtattcagctacctacttgacacttctgtgtggatgtctagtaggtaataatcttagaattattgtgccctgtcaaattcctgctcttccctctaaaatatcttaatactattcagtcttccccatttctgtttatctcagttccttttcaggtcaaaaacctgagttatctttgattcctctctttctctcacattctagtagtccagttcctttcataatcagatcaattagtaagccctatcagctccatttttaaaatgtaactaggatcccaacacttctcaccatttccactactactctgtctcccacctgattctttcaggagccactcgattcgtttcctgcttctaccctcactactctacagtctattgtcagctcagcagccacggtaagcctactttcacttccctgctcaaaactctattggactcttcatctcagagtaaaggtctttccagtggtatacaatatccaatcatatctctccagattgcctaccttcctcccctcactccctccattccggctgcactggctccttgctcttctttgaacgcattaggcacatcctgctccaggacatttgcacttgatgttccctctaactagaatgctctttctctggatattcatatgtttctctcctcatcaccttcaaatcttttccctcatgtcatcttctcagagagacatattctgaccaccctctttaaactgtagtctttaccaatattctgtactacttattcaccatctctgcttttgtattttcttcttagtatttgctactttccagcatgatctgcttttccctaatattttatgatttatcacccattagaatataaggtccatgaaaacacgaaaaatattttctttttttttttttgactgatcccactgcctagaacagtgcttggtgcatagtaattagtcaataaatatttgttggatgaatgagtagatgtcttgaaagtcaaataggaaggaatatggtgatgtcatacaattttattaaaaaatatatgcatccctagtattctaagaattagcacatagtaaagttatagcctaattttataaactctaaaatcacttttatggtttttagctgctgtttttcaagataaaactccaaacaagtacagttttcagtatttcttatgatatattcatcattatttcaaatgcattggctttatggggcctgcacaatcatctttagataaaaatgacctcttatatttctgggtgactagacacaagccttaattaatttttaaaaagggattctatgcagaagggacagtgtttctgcctgtcttctttcacactttgcacacccaggccatctggagtgaaaatgaagtctgcccagagctgctggaagccccagctgccctgctgcccatggagtcctctgaggacgactccagagtccctcaactccttggaggagataagcagccaacacagtgttgttcagcagatgccaccgtctgccatgccctggaatttgaaccaccatcttctggagtgactcaaatgcagaggaagccaggcctgctgctaacgtttctgagaggcggcaagagtataaatggagatccacatatgtataaataaagagtgtgaatcaagctaacaaactgtttaataaaatatgatctaccctc

SEQ ID NO: 9880 - protein, 81 aa, Homo sapiens
MQKGQCFCLSSFTLCTPRPSGVKMKSAQSCWKPQLPCCPWSPLRTTPESLNSLEEISSQHSVVQQMPPSAMPWNLNHHLLE

SEQ ID NO: 9881 - DNA, 793 bp, Homo sapiens
gcttctccatatggctaatttaggcttcctcacagcatcataatcttaggattgcaagaggggacattccaaaaagacaagcctcaatgtgcaagcctttacttttatcatgcttactaatgtgtcactggccaaagcaagtctcatggccaagctcagcgtcagtgtggggaggaactacacaagattgtgaatattgggaggtgtgacatattggtagtcatttagactagggacagaccaccttaatccaatcaagagaataattaaaagttacttccagggtatagcccagttccaacttaaaatctttcctccttaggtcctgaactcaatatttttacccacccaatcccacacccactccccttgaggcagttgaaaactctggctagtttctcagcctctctccattactgctttctgaatgttaattgcctcgaagggaaaagtggcaccaaattctggactcaaaatcttggatttaggcccctcagactgttgaagttctactgctccagaaaagagtaataacaggatggagatggagtttcatgacaaaaatgaaggtgaatatgatgtggaaaatacaaagatggaagcaacaagctaaggatgctggggcagaaagatggaacctgggttactcatgacatcttgaaactgctgcagccatcctagactggctgcctctagacttaatatgtttagaaagtaaatcccaattttattaaactgttatctgttatgtatatatgaacacattcttagctaataaactatcatgtctcct

SEQ ID NO: 9882 - protein, 40 aa, Homo sapiens
MCKPLLLSCLLMCHWPKQVSWPSSASVWGGTTQDCEYWEV

SEQ ID NO: 9883 - DNA, 881 bp, Homo sapiens
atgtgtaagaagtccatcaaattcagaaaagtaaaatacaaagcagtttataacgaagtattaaatttacatgataagtacaaaaggaaaaggcagaaaaaggagagttcactcccctcagtgccctcccggagccctttacctgaacgggagcctgagagaacggacgacaggagccgagtggaaagcagtgcccgcgccggagatcagcgccgagggcgggagccgacgtctagggaccacagagccgcgacgcggcgagccgcgcacgggccattccgccgccgcgaacgcagaaagcctcgaccgcgctccgagtccagccagctcgcctgtcacctcgatctctgctttaagtggcttccggtcgcctcctcccgacggcccgtcgcggaggcggagcctgggcggccggagttcggtggggtgggggggcgtgtcctttctcgcgtccgcagtgtccctgagggtccgcgtctacacgcggctgtgaggaaggaaggcgcgtgccgcgtgggacgggctccacctgcctgcggacagatggagggtcactttgttccgagaagacccagacacccgagggaggatgtgaaacggaacgacccgtttcgagtaataacaggatggagatggagtttcatgacaaaaatgaaggtgaatatgatgtggaaaatacaaagatggaagcaacaagctaaggatgctggggcagaaagatggaacctgggttactcatgacatcttgaaactgctgcagccatcctagactggctgcctctagacttaatatgtttagaaagtaaatcccaattttattaaactgttatctgttatgtatatatgaacacattcttagctaataaactatcatgtctcct

SEQ ID NO: 9884 - protein, 246 aa, Homo sapiens
MCKKSIKFRKVKYKAVYNEVLNLHDKYKRKRQKKESSLPSVPSRSPLPEREPERTDDRSRVESSARAGDQRRGREPTSRDHRAATRRAAHGPFRRRERRKPRPRSESSQLACHLDLCFKWLPVASSRRPVAEAEPGRPEFGGVGGRVLSRVRSVPEGPRLHAAVRKEGACRVGRAPPACGQMEGHFVPRRPRHPREDVKRNDPFRVITGWRWSFMTKMKVNMMWKIQRWKQQAKDAGAERWNLGYS

SEQ ID NO: 9885 - DNA, 3928 bp, Homo sapiens
gaactccggccgcccaggctccgcctccgcgacgggccgtcgggaggaggcgaccggaagccacttaaagcagagatcgaggtgacaggcgagctggctggactcggagcgcggtcgaggctttctgcgttcgcggcggcggaatggcccgtgcgcggctcgccgcgtcgcggctctgtggtccctagacgtcggctcccgccctcggcgctgatctccggcgcgggcactgctttccactcggctcctgtcgtccgttctctcaggctcccgttcaggatttttagactctgaggagcagttggagctaatccacattatggaaatggaaaccaccgaacctgagccagactgtgtagtgcagcctccctctcctcctgatgacttttcatgccaaatgagactctctgagaagatcactccattgaagacttgttttaagaaaaaggatcagaaaagattgggaactggaaccctgaggtctttgaggccaatattaaacactcttctagaatctggctcacttgatggggtttttagatctaggaaccagagtacagatgagaacagcttacatgaacctatgatgaagaaagccatggaaatcaattcatcatgcccaccagcagaaaataatatgtctgttctgattcctgataggacaaatgttggggaccagataccggaagcccatccttccactgaagctccagaacgagtggttccaatccaagatcacagctttccatcagaaaccctcagtgggacggtggcagattccacaccagctcacttccagactgatcttttgcacccagtttcaagtgatgttcctactagtcctgactgcttagacaaagtcatagattatgttccaggcattttccaagaaaacagttttacaatccaatacattctggacaccagtgataagctgagtactgagctctttcaggacaaaagtgaagaggcttcccttgacctcgtgtttgagctggtgaaccagttgcagtaccacactcaccaagagaacggaattgaaatttgcatggactttctgcaaggcacttgtatttatggcagggattgtttgaagcaccacactgtcttgccatatcattggcagatcaaaaggacaactactcaaaagtggcagagtgtattcaatgattctcaggagcacttggaaagattttactgtaacccagaaaatgatagaatgagaatgaagtatggaggacaagaattttgggcagatttgaatgccatgaacgtgtatgaaacaactgaatttgaccaactacgaaggctgtccacaccaccctctagcaatgtcaactctatttaccacacagtctggaaattcttctgtagggaccactttggatggagagagtatcccgagtctgtcattcgattgattgaagaagccaactctcggggtctgaaagaggttcgatttatgatgtggaataaccactacatcctccacaattcattcttcaggagagagataaaaaggagacccctcttccgctcctgttttatactgcttccatatttacagacacttggtggggttcccacacaagctcctccacctcttgaagcaacttcatcatcacaaattatctgcccagatggggtcacttcagcaaacttttaccctgaaacttgggtttatatgcatccatctcaggacttcatccaagtccctgtttctgcagaggataaaagttatcggatcatttacaatctttttcataagactgtgcctgagtttaaatacagaattttgcagatattgagagtccaaaaccagtttctttgggagaaatataaaaggaaaaaggaatatatgaacaggaaaatgtttggccgtgacaggataataaatgagagacatttatttcatggaacatcccaggatgtggtagatggaatctgcaaacacaactttgaccctcgagtctgtggaaagcatgctacaatgtttggacaaggcagttattttgcaaagaaggcaagctactctcataacttttctaagaagtcctccaaaggagtccacttcatgtttctggccaaagtgctgacgggcagatacacaatgggcagtcatggcatgagaaggcccccgccagtcaatcctggcagtgtcaccagtgacctttatgactcttgtgtggataatttctttgagcctcagatttttgtcatttttaatgatgaccagagttacccttattttgttatccaatatgaagaagtcagtaacactgtttccatttgaaaaatcttggtactgctaaattatttgatatgaactcaatccagcatttgtagcaggttttgaatgggtgggactgggtggggaacagcattggacattaatagggcacttttcagacccattttttaaagtgctagaaaatgctttttttaaaaaaaaaatacaagttttaaaatgaccacttactctttaattatttactaattgctagtgtactcagtgtggaaaagactacagattacacactcttttcattcacacttgtacatatagacagcaatgttattaggagcattaaattaaaaaactgaacagcctaatttaaatgtggcttgggcctggtagaagtttgaccaaatggaatggaggctgtgagcaatgtgaggattctatttatttatttacgtttgataaaacttactggaactagtactaccatgcgtattccctgtccaaagcatcactgctttggtatagtataagttcatgaaattctggtgggtagaaagaaatttttatttctatcagcagtactaaaatgtatcagccaaccagagaacatcagtgactttaacttctgcagagtttgccccagaattcagagttctatttagaggaagttaaaacaacaacaaaaaacaaccatttgaaaaatttttgtcaccagcaaaacttttcactaattagtgatatgaaatgtgatttttgtgttgttaaacttcagctttggaaaactcagtctctttcattatcatccattccaatttgaaggagttgggcagctaatttggttaaaggcagtcttgagggttagaagtattacttccttttcgggttccagacctagcttgtgactgaaagttttagaaaaaggaagtacatctatagccaaattgataaggttattactgtgttttgcacaaagtatattagcaaaagtatttgctggaattattggtagatggcagtcccactcctacacctgctttgtcagatacagctgggttccctggctgactctgtaccttacttacactacttacttaatagaaacacaaacttggaaattgtgccagtggtccagctggagcacaacgtttggtgaatatgctgtttcctcagttcagagaggtagcaactaggtaaactccttataaaaagcaaatacctggatttacaaaagtgaaagtagttgttcacaaaagaattcgccatggaattctttcagttaccaagctctcctggtaatgtttgtggttatatcatttacacaaaacttttcaggaacttctgtgttgtttaagcaagatgtatctgtactgatgtctcagtgaatcagtctgtttattaagcacttatcagggcttccacacacttatttattttgccctagttaatcctgttgtttgctgccattggcatgaaatggccaactgtggctgttacagttctttcattcaattataacttgtaaaccagtgactcctaatctttttcaagttaagacaccttaccattgcttatttggttttatgagacttgttcctttttttctccctaaggaaaaagaaagctttatgacatatttatttttttaataaaactaagcaaaaataaaacttatggtaattcttt

SEQ ID NO: 9886 - protein, 657 aa, Homo sapiens; identical to SEQ ID NO: 870

SEQ ID NO: 9887 - DNA, 1772 bp, Homo sapiens
agagccgggcggcgcctcagctgcactgcgcggagttggcgcggcccgggaccaggagctgagcaaaccgccgcggccaacaggaggcgtcactcggacccgggctcggcgccggggtgtcgcgcggcggcgggcgggcaggctttggagcggcagttttttcggaaagtgcttttggccgggagtgccgcagaaccccagcgtcacgaggatttttagactctgaggagcagttggagctaatccacattatggaaatggaaaccaccgaacctgagccagactgtgtagtgcagcctccctctcctcctgatgacttttcatgccaaatgagactctctgagaagatcactccattgaagacttgttttaagaaaaaggatcagaaaagattgggaactggaaccctgaggtctttgaggccaatattaaacactcttctagaatctggctcacttgatggggtttttagatctaggaaccagagtacagatgagaacagcttacatgaacctatgatgaagaaagccatggaaatcaattcatcatgcccaccagcagaaaataatatgtctgttctgattcctgataggacaaatgttggggaccagataccggaagcccatccttccactgaagctccagaacgagtggttccaatccaagatcacagctttccatcagaaaccctcagtgggacggtggcagattccacaccagctcacttccagactgatcttttgcacccagtttcaagtgatgttcctactagtcctgactgcttagacaaagtcatagattatgttccaggcattttccaagaaaacagttttacaatccaatacattctggacaccagtgataagctgagtactgagctctttcaggacaaaagtgaagaggcttcccttgacctcgtgtttgagctggtgaaccagttgcagtaccacactcaccaagagaacggaattgaaatttgcatggactttctgcaaggcacttgtatttatggcagggattgtttgaagcaccacactgtcttgccatatcattggcagatcaaaaggacaactactcaaaagtggcagagtgtattcaatgattctcaggagcacttggaaagattttactgtaacccagaaaatgatagaatgagaatgaagtatggaggacaagaattttgggcagatttgaatgccatgaacgtgtatgaaacaactgaatttgaccaactacgaaggctgtccacaccaccctctagcaatgtcaactctatttaccacacagtctggaaattcttctgtagggaccactttggatggagagagtatcccgagtctgtcattcgattgattgaagaagccaactctcggggtctgaaagaggttcgatttatgatgtggaataaccactacatcctccacaattcattcttcaggagagagataaaaaggagacccctcttccgctcctgttttatactgcttccatatttacagacacttggtggggttcccacacaagctcctccacctcttgaagcaacttcatcatcacaaattatctgcccagatggggtcacttcagcaaacttttaccctgaaacttgggtttatatgcatccatctcaggacttcatccaagtccctgtttctgcagaggataaaagttatcggatcatttacaatctttttcataagactgtgcctgagtttaaatacagaattttgcagatattgagagtccaaaaccagtttctttgggagaaatat

SEQ ID NO: 9888 - protein, 506 aa, Homo sapiens
MEMETTEPEPDCVVQPPSPPDDFSCQMRLSEKITPLKTCFKKKDQKRLGTGTLRSLRPILNTLLESGSLDGVFRSRNQSTDENSLHEPMMKKAMEINSSCPPAENNMSVLIPDRTNVGDQIPEAHPSTEAPERVVPIQDHSFPSETLSGTVADSTPAHFQTDLLHPVSSDVPTSPDCLDKVIDYVPGIFQENSFTIQYILDTSDKLSTELFQDKSEEASLDLVFELVNQLQYHTHQENGIEICMDFLQGTCIYGRDCLKHHTVLPYHWQIKRTTTQKWQSVFNDSQEHLERFYCNPENDRMRMKYGGQEFWADLNAMNVYETTEFDQLRRLSTPPSSNVNSIYHTVWKFFCRDHFGWREYPESVIRLIEEANSRGLKEVRFMMWNNHYILHNSFFRREIKRRPLFRSCFILLPYLQTLGGVPTQAPPPLEATSSSQIICPDGVTSANFYPETWVYMHPSQDFIQVPVSAEDKSYRIIYNLFHKTVPEFKYRILQILRVQNQFLWEK

SEQ ID NO: 9889 - DNA, 2045 bp, Homo sapiens
caccattcctttctcacctggcacaatctcagatttttagactctgaggagcagttggagctaatccacattatggaaatggaaaccaccgaacctgagccagactgtgtagtgcagcctccctctcctcctgatgacttttcatgccaaatgagactctctgagaagatcactccattgaagacttgttttaagaaaaaggatcagaaaagattgggaactggaaccctgaggtctttgaggccaatattaaacactcttctagaatctggctcacttgatggggtttttagatctaggaaccagagtacagatgagaacagcttacatgaacctatgatgaagaaagccatggaaatcaattcatcatgcccaccagcagaaaataatatgtctgttctgattcctgataggacaaatgttggggaccagataccggaagcccatccttccactgaagctccagaacgagtggttccaatccaagatcacagctttccatcagaaaccctcagtgggacggtggcagattccacaccagctcacttccagactgatcttttgcacccagtttcaagtgatgttcctactagtcctgactgcttagacaaagtcatagattatgttccaggcattttccaagaaaacagttttacaatccaatacattctggacaccagtgataagctgagtactgagctctttcaggacaaaagtgaagaggcttcccttgacctcgtgtttgagctggtgaaccagttgcagtaccacactcaccaagagaacggaattgaaatttgcatggactttctgcaaggcacttgtatttatggcagggattgtttgaagcaccacactgtcttgccatatcattggcagatcaaaaggacaactactcaaaagtggcagagtgtattcaatgattctcaggagcacttggaaagattttactgtaacccagaaaatgatagaatgagaatgaagtatggaggacaagaattttgggcagatttgaatgccatgaacgtgtatgaaacaactgaatttgaccaactacgaaggctgtccacaccaccctctagcaatgtcaactctatttaccacacagtctggaaattcttctgtagggaccactttggatggagagagtatcccgagtctgtcattcgattgattgaagaagccaactctcggggtctgaaagaggttcgatttatgatgtggaataaccactacatcctccacaattcattcttcaggagagagataaaaaggagacccctcttccgctcctgttttatactgcttccatatttacagacacttggtggggttcccacacaagctcctccacctcttgaagcaacttcatcatcacaaattatctgcccagatggggtcacttcagcaaacttttaccctgaaacttgggtttatatgcatccatctcaggacttcatccaagtccctgtttctgcagaggataaaagttatcggatcatttacaatctttttcataagactgtgcctgagtttaaatacagaattttgcagatattgagagtccaaaaccagtttctttgggagaaatataaaaggaaaaaggaatatatgaacaggaaaatgtttggccgtgacaggataataaatgagagacatttatttcatggaacatcccaggatgtggtagatggaatctgcaaacacaactttgaccctcgagtctgtggaaagcatgctacaatgtttggacaaggcagttattttgcaaagaaggcaagctactctcataacttttctaagaagtcctccaaaggagtccacttcatgtttctggccaaagtgctgacgggcagatacacaatgggcagtcatggcatgagaaggcccccgccagtcaatcctggcagtgtcaccagtgacctttatgactcttgtgtggataatttctttgagcctcagatttttgtcatttttaatgatgaccagagttacccttattttgttatccaatatgaagaagtcagtaacactgtttccatttg

SEQ ID NO: 9890 - protein, 656 aa, Homo sapiens
MEMETTEPEPDCVVQPPSPPDDFSCQMRLSEKITPLKTCFKKKDQKRLGTGTLRSLRPILNTLLESGSLDGVFRSRNQSTDENSLHEPMMKKAMEINSSCPPAENNMSVLIPDRTNVGDQIPEAHPSTEAPERVVPIQDHSFPSETLSGTVADSTPAHFQTDLLHPVSSDVPTSPDCLDKVIDYVPGIFQENSFTIQYILDTSDKLSTELFQDKSEEASLDLVFELVNQLQYHTHQENGIEICMDFLQGTCIYGRDCLKHHTVLPYHWQIKRTTTQKWQSVFNDSQEHLERFYCNPENDRMRMKYGGQEFWADLNAMNVYETTEFDQLRRLSTPPSSNVNSIYHTVWKFFCRDHFGWREYPESVIRLIEEANSRGLKEVRFMMWNNHYILHNSFFRREIKRRPLFRSCFILLPYLQTLGGVPTQAPPPLEATSSSQIICPDGVTSANFYPETWVYMHPSQDFIQVPVSAEDKSYRIIYNLFHKTVPEFKYRILQILRVQNQFLWEKYKRKKEYMNRKMFGRDRIINERHLFHGTSQDVVDGICKHNFDPRVCGKHATMFGQGSYFAKKASYSHNFSKKSSKGVHFMFLAKVLTGRYTMGSHGMRRPPPVNPGSVTSDLYDSCVDNFFEPQIFVIFNDDQSYPYFVIQYEEVSNTVS

SEQ ID NO: 9891 - DNA, 2716 bp, Homo sapiens
cacaaacaagctggagcagcccagaggacaagaattttgggcagatttgaatgccatgaacgtgtatgaaacaactgaatttgaccaactacgaaggctgtccacaccaccctctagcaatgtcaactctatttaccacacagtctggaaattcttctgtagggaccactttggatggagagagtatcccgagtctgtcattcgattgattgaagaagccaactctcggggtctgaaagaggttcgatttatgatgtggaataaccactacatcctccacaattcattcttcaggagagagataaaaaggagacccctcttccgctcctgttttatactgcttccatatttacagacacttggtggggttcccacacaagctcctccacctcttgaagcaacttcatcatcacaaattatctgcccagatggggtcacttcagcaaacttttaccctgaaacttgggtttatatgcatccatctcaggacttcatccaagtccctgtttctgcagaggataaaagttatcggatcatttacaatctttttcataagactgtgcctgagtttaaatacagaattttgcagatattgagagtccaaaaccagtttctttgggagaaatataaaaggaaaaaggaatatatgaacaggaaaatgtttggccgtgacaggataataaatgagagacatttatttcatggaacatcccaggatgtggtagatggaatctgcaaacacaactttgaccctcgagtctgtggaaagcatgctacaatgtttggacaaggcagttattttgcaaagaaggcaagctactctcataacttttctaagaagtcctccaaaggagtccacttcatgtttctggccaaagtgctgacgggcagatacacaatgggcagtcatggcatgagaaggcccccgccagtcaatcctggcagtgtcaccagtgacctttatgactcttgtgtggataatttctttgagcctcagatttttgtcatttttaatgatgaccagagttacccttattttgttatccaatatgaagaagtcagtaacactgtttccatttgaaaaatcttggtactgctaaattatttgatatgaactcaatccagcatttgtagcaggttttgaatgggtgggactgggtggggaacagcattggacattaatagggcacttttcagacccattttttaaagtgctagaaaatgctttttttaaaaaaaaaatacaagttttaaaatgaccacttactctttaattatttactaattgctagtgtactcagtgtggaaaagactacagattacacactcttttcattcacacttgtacatatagacagcaatgttattaggagcattaaattaaaaaactgaacagcctaatttaaatgtggcttgggcctggtagaagtttgaccaaatggaatggaggctgtgagcaatgtgaggattctatttatttatttacgtttgataaaacttactggaactagtactaccatgcgtattccctgtccaaagcatcactgctttggtatagtataagttcatgaaattctggtgggtagaaagaaatttttatttctatcagcagtactaaaatgtatcagccaaccagagaacatcagtgactttaacttctgcagagtttgccccagaattcagagttctatttagaggaagttaaaacaacaacaaaaaacaaccatttgaaaaatttttgtcaccagcaaaacttttcactaattagtgatatgaaatgtgatttttgtgttgttaaacttcagctttggaaaactcagtctctttcattatcatccattccaatttgaaggagttgggcagctaatttggttaaaggcagtcttgagggttagaagtattacttccttttcgggttccagacctagcttgtgactgaaagttttagaaaaaggaagtacatctatagccaaattgataaggttattactgtgttttgcacaaagtatattagcaaaagtatttgctggaattattggtagatggcagtcccactcctacacctgctttgtcagatacagctgggttccctggctgactctgtaccttacttacactacttacttaatagaaacacaaacttggaaattgtgccagtggtccagctggagcacaacgtttggtgaatatgctgtttcctcagttcagagaggtagcaactaggtaaactccttataaaaagcaaatacctggatttacaaaagtgaaagtagttgttcacaaaagaattcgccatggaattctttcagttaccaagctctcctggtaatgtttgtggttatatcatttacacaaaacttttcaggaacttctgtgttgtttaagcaagatgtatctgtactgatgtctcagtgaatcagtctgtttattaagcacttatcagggcttccacacacttatttattttgccctagttaatcctgttgtttgctgccattggcatgaaatggccaactgtggctgttacagttctttcattcaattataacttgtaaaccagtgactcctaatctttttcaagttaagacaccttaccattgcttatttggttttatgagacttgttcctttttttctccctaaggaaaaagaaagctttatgacatatttatttttttaataaaactaagcaaaaataaaacttatggtaattcttt

SEQ ID NO: 9892 - protein, 341 aa, Homo sapiens
MNVYETTEFDQLRRLSTPPSSNVNSIYHTVWKFFCRDHFGWREYPESVIRLIEEANSRGLKEVRFMMWNNHYILHNSFFRREIKRRPLFRSCFILLPYLQTLGGVPTQAPPPLEATSSSQIICPDGVTSANFYPETWVYMHPSQDFIQVPVSAEDKSYRIIYNLFHKTVPEFKYRILQILRVQNQFLWEKYKRKKEYMNRKMFGRDRIINERHLFHGTSQDVVDGICKHNFDPRVCGKHATMFGQGSYFAKKASYSHNFSKKSSKGVHFMFLAKVLTGRYTMGSHGMRRPPPVNPGSVTSDLYDSCVDNFFEPQIFVIFNDDQSYPYFVIQYEEVSNTVSI

SEQ ID NO: 9893 - DNA, 3633 bp, Homo sapiens
ctttaggcgtggcgcattcaggttctcctggaccatagtggtagtcgctggcccgagttagaggccagctgagaagtcttcgtgcttcagatttgtttacctacaaaatgcttcggtatccatatttttgtagaatgtataaagaatgcctttcatgttggttggaatctggcatacctaatttaggtgtctggccaaaaagaatacatactacagcagaaaaatatagagaatatgaagcccgggagcaaacagatcaaactcaagtccaggagttacacagatctcaagatagagattttgaaactatggctaaattacatattccagtaatggtggatgaagttgttcattgtttgtcaccacaaaaaggacagatttttctagatatgacatttggttcgggagggcacacaaaagccattctgcagaaggagtcagatattgttctctatgccttggacagagacccaacagcttatgcattagctgaacatctttcagagttgtatcctaaacaaatccgagctatgctgggccagttcagccaggcagaagccttattaatgaaagctggagtgcagccaggaacttttgatggagttcttatggatcttgggtgttcctccatgcaacttgatactcctgaaagaggttcttcccttcggaaagatggccctttggacataagaatggatggtggcaggaacatttcctccctctgctatttatacacggaaagacttactacagcaatctacctatattgccaccaagactttccaggctcttcgcatatttgtgaacaatgagctcaatgaactctacacgggactgaagacagctcagaagtttctgagacttggtggtcgtcttgttgccctctccttccattcactagaggatcgcatcgtcaaaagatttttgcttggaataagcatgacagaaagatttaacctaagtgttagacaacaagtgatgaaaacatctcaattgggttcagatcatgaaaacacggaagaagtctctatgagaagagctcctttaatgtgggaactgatacacaagaaggtatttagtccacaagatcaggatgtacaagataaccccagagggcgctcagccaagcttagagcagctatcaaattataagttaccatcatcttattcttcaaattttttctcacaatttctctaatctttactcatgttatgtccctgaatgtcttggtataggtttaagtgtgggacagtctgaaaattgatagcatttagcatttcttttttctcaaaaagaaactgtaggaaatacatgacagagaaagttacactcagggagcagcagcacctccagactggaaaaatgtgttaatctttgcatcatattggactcttgaaggcaatccttcctctggccaggaaattttttaaaaaataatactgtgttgtgtttatctaaatacgtaaactcaagctaccaaagagaaagatgttgtaatcacatctgcatgtcctaaattttgaatttagatattccaatttgcatcagtctttctgtggctcaaataatgatgattatggaatgaattttaatgtccctacttgtgaataattagctttctcaaatgtaggctttttacaaattttaaattttaaaatattagtttaaatgtgtgttatactgataaaatttcatctttcaaattatagtctattattttaaagggatttttcagtatgatatgggccattttgttcatctatcgcaaagtaaaaatgtaaagtcgttacagagaattgtttcacaaaacttatatttcatgtcaattgtatttattttaataatagctcacaatgcctttagtaagtaataaagtctcttattagaatcttgtattttttaattgagctaatcaaaataattcagccaagtctatttgaaatagaaaactgtctatttaatatagtaaaatcaatgctcccttaatgttgttacaaagatatggtaactgtaatatgggtaaaagtttattcaagaaaagagtacttggtagaagattccttaacaaattgaggagattgattcataattcacatgtcaattttttatagtaatatgtacttctaatttattatttatacttgaattgtgacctgaaagatgaattggagataattagtcaaagggcacatggagtatggaagggggcatgttgattaaccatacatagaaataaatattctcttagttatccttgaaatcatatttatactattaatttgctcagtgcacttttttcaaatacagaaaaaagattctccattatagttacaaattttaagttggtgaatccaagtgaatgaaatatcagcataactatgtgggcaaaatagatagaattaaatgcatgaatttttctcagacttattttatctgcctctgtaatatttaactttagtacccaggcttgttcactacttctgctttacaggctttatttaaatctgaacaatcccacagggaaatcagaattaggaaaaaaatctggagaacaatatggttgaaatagaaacaagagaacgcacctaggttaattccctgaatcctacttgaacaatgtataaatttctctttgcatataatacatatttgtgaatgagacatattcccaaaaaattcttatctctgtatgtgattggaaaagaaaagatcacatttgtatattcaacaatctttcacctatttcataagtcattttttcatcctgtatagtatgggaattattttttatgttaaatagaaactgaatgtactgggttgaatggtgtcctctccaaaattcatgtacttcctggagcctcagaatgtgaccttatttggaaatactgtggttgtggttgtaagtagctaagatgaggtcatactggagcagggcaggcccttaatccaatatgactggtgttccttataagagaagatagggcgggcatggtggctcacgcctgtaatcccagcactgtgggaggccaagccaggcaaatcgcttgaggctcaggagttcaagaccagcctggccaacatggcgaaaacccatctctactaaaaataaaattagccaggcgtggtgcttgtaatgtcagctacccaggagtctgaggcacaagaatcactcgaacccgggaggtggaggttgcgagatcacaccactgcactccagtgtgagcaacagaacgagactctgtctcaaaaaaaaaaaaaaaaaaaaaaaaggaagaaagagaagatagagacacaggggagaatgccacatgaagctggaggcagagattggagtgatacattgtgggaaccctcagaagataggaaaaaagcatggaatagattctccctcagagttccagtagttgccaaccctgctaacatggttttgcacatctagcatccagaacagtgagaacgtatttctgctgttttaaggtacccagttcatggtaatttgttacagcaatcctaggaagctaatactctgacagaaaaaaatcttggataatatgcatgagaaaaatccttcaataaacacaaaattggtttcaaaatgttttcatgtaaaaataaattaacttttctgtaat

SEQ ID NO: 9894 - protein, 234 aa, Homo sapiens
MLRYPYFCRMYKECLSCWLESGIPNLGVWPKRIHTTAEKYREYEAREQTDQTQVQELHRSQDRDFETMAKLHIPVMVDEVVHCLSPQKGQIFLDMTFGSGGHTKAILQKESDIVLYALDRDPTAYALAEHLSELYPKQIRAMLGQFSQAEALLMKAGVQPGTFDGVLMDLGCSSMQLDTPERGSSLRKDGPLDIRMDGGRNISSLCYLYTERLTTAIYLYCHQDFPGSSHICEQ

SEQ ID NO: 9895 - DNA, 3283 bp, Homo sapiens
agtgcacgctcgggcttcctggtgcgcccggagcctgcctcgcgtgccgaccccgccgcgtaatccggcgaggcatcccagattccgcccggctccagacgccctccaccgactttagttcgagcagactcatttggaagcagtgcatttttatcagagggactgaaaagcctttcgagaatcagtcaagaaaaaggaatgcgcatgagagtcatggtcacatcatgtgattgtagggaaagcctaggctatcatggagggaagagattggataaattatttgaaaagcaagcctgtgaattgctgtggaggaacaatagcctgtctcttatctggagcctttccaaggaaaagcaaaggggaccctagaaggcttcctgggagacagtttaattctgaaaacaaagcagtacttcacctcttgtgtgttgggtagagctgtaaaacagaacacagtcaaaatagtcattagggccacatcaatgtctgcccaaagtcaggcgagcattcccaggaaggtggggggctgtggcagttgcacacatcaacctcctttctccattgtcacacagcagaagagcgtgttccattctactaaagttggggcggggggagttgaataatttattgactgaaaactgggggcctgagttagatggtaaaaaagtttagagtgctgttttttgttttttaagttatgtttgttttatatattgaagtgcttaaaatgtattttaaaaattcaaaacatcccagaaattcagcaacttgaggagacaatagtgacgaacattttatggcaacatttggacactttaaagattatttcaggaactttaatgctgataaatgagagaagggacaacttttcctaactataacatttcggcacctgagtacagggatcaaaacaagagcaagcatttcaaattcatattgtgaagcacctacaaaaagattattctgttagccttcataatgtggagagttcatcttttcatcttatcaaataaaaatatacccaaattcttgaacaggcattcagttaggaaaagagggtggggtgatgaaatgtgttctcattcagcaaacactttgcagatatttctagtcaaagatccctgtggtctaggctagtgagagaaaaacgtgccctctgcccagtgacagcggctgcacggggatcagctttcaccaatgcaggcaggggaacaaagggcaggcttcatctgcctgcatcccacaggcccttgcgcaggggagttccatttcagtgcccatcacatgacctctcaggccaaaacggtttttaataattctgattttgaatatcaaatggaagtgaaaagtacatttaggaaggaagggctctatccttattgaagaacatgctctatgcaaacaggttggacaggcactagctcttgtagagctatggttctcagctttggcaacacactggatcacctcctctaaaaggtactgatgcctgctttcctccctcttctgcccctaaagaaagtagaatttaattttaagctctagggtgtggcctgggcatcaggactttttttttttttttgacagagtctcactgtgtcacctaggctagagtgcagtgtgcagtcttggctcactgcagcctcaatctcccagattcaagagatcctcctgcctcagccccctaagtaactaggattacaggcacgcaccaccacaccaggctaatttttgtattttttgtggagacggtctttcactgtgttgcccaagctggtcttgaactcctgagctcaggtgatccacctgcctcagcctcccaaagtgctgggattacaggcataagccacagcccctggccggcatcaggatttttaaaagctcccaagtgcagtcaaggttgagaacagctgctatagtgtgacttaatacagcattcaaagcctctcataatctagcctcagcctaatttttccttccagcaccccatctcagcctgtacataagccacagagacattctcactgttctctgaatgtacttggctcattcatatttccaggctttcttgcacacacattgtctgactctgggcacctaaggaaagctcagctccaatgtcctctcctcttccgtgaaacctttcctgtcaagcccaccttcactactaagtcactccttgctcctagatcagatggaagaatgctttggcatatctctactggagcccttctcactttacattaaagataactgtatataggttagcccactcctcctccctaatagcatgtggaccctttgtagtttcagcagtaagcacagggcttggtttctatgaatacttattgagtgaatggatgaatgaatgccaatcttgtacattgttgatgttcaccacattgaacccagttctcaaaccaggatcacttgggagattctgagtcaataatttgaaggtctgtatcattcctactcaaagtgtggtccataagccagcagtggctatattatctgggagcttgttgcaaatgcagaatatgtattttaacaagatccccaggcaattcatatgcacattacactttgagctatatttttaacaagctcccaggtgattcctttgtagcccggctgctgacctgcatttcgtaaccactgttctagaccttcatttgctgaatggagtggtccctgtgtgattgcctacaggtttcttctagtctcccatttttcttcctagttaacaaagcccaaattttgtttggaagggtgatcagcccttcacccatcaggcctttgcctcagggaagcttgaccccacctttagaccccatgttgggcctgagtagtccaaaggcatatcccattcccctggccagggattagtttagggatagacatgtgaccaaattcagctcaataaaatgtgagtctgcaggggcaatctagaaaaagtgtcctcttccctaagagaaagccacaggagggtaaaaaaatgtctcagaacattgtcctgcctaaacatgatgcctcggacattctgcttctgtcttgctacctgcagcacaaggaaatccaacactgaggggtcacagcagagggacggaaagcacctggatcttacaacattgttgagctcttttgtctcttgacttctagttatgagatgtaattttcttactgttaaagtcatttctgttccttgcaaccaaaagcattcattgatacactgaatatagtacaatatttattcaatcaataaatgcctggcaaattaccc

SEQ ID NO: 9896 - protein, 56 aa, Homo sapiens
MRMRVMVTSCDCRESLGYHGGKRLDKLFEKQACELLWRNNSLSLIWSLSKEKQRGP

SEQ ID NO: 9897 - DNA, 506 bp, Homo sapiens
caaatattttccatcagtggttggttgaaaccatggatgtggcacttgtggatatggaagaccgcctataatagtaacaattatggtagtagtaatgctggtgatggtgttggtaacagtggtggtgagtaacggtgttggagaaattttttccactcacgtggaacctcgcaccagtctactctctgataatttggatgtatctcataaatggtatctcagttttcttcaagttgtatataggtcttcatatttttttttcttttaaagtttaaaacatctaccattcggtctaaaataaatgcttttaacttggtcagggtgtggaacagaatttcctgggctcttttaaggtatggtctggtcttgcagtctatactctcaggctctctgtagcctccttcctttatcagtgaaatggaggaatgcaactctggacctctacttctcctttctctcctaaggggccagagactgcctaaaccccacacaataaaactcacaga

SEQ ID NO: 9898 - protein, 61 aa, Homo sapiens [sequence omitted]

SEQ ID NO: 9899 - DNA, 997 bp, Homo sapiens
gacgtccagccgactggcggcgcggtcgcccgggagaccgggaaagccgtttcacacccgtcctagtcgaagtcgagatttcctttggcttcaaagctctctcaccatattttgggaagttatggatcatcacattcccatgcatgcgttgcctgaagaaatccaaaagatgttgcctgaagaaaaagtttgtaagtactgtggagtcagctatctaattcttcatgaatttaaggctatggaagaaaaagtgaaagcaatggaaaaagagatgaaattttatcaaggaagtgtagatcgtgaaaagagacttcaagaaaagctgcattctcttagccaagaacttgaacagtacaaaattgacaacaaatccaaaacagaaaggttgagtatgtttttcttttctatcatttatttagttgaaagacagctacaggaaataaatacactttgaatgtttttctaaaatttctctacatcaggtatagtttatactttaatgcatttgtttcttaattatattaataattactaaatataattattatagtttgctttcttttgaggcatatatttactatctgaaaaattagaaaccaattaatttagtaaccaccagctgagacattcaaatttttttcccaggtatatatatcttacgttttattattaggaaaatttatctatcaaaaatcagattaattttggtagtttttcatacatttatttttaaatggctttggatttttagatttgtagaataaggctttcatgttttgaaaaagatgccaagacgttcaaattagtgtgtgattttaaattattggaattggaaataaattaaagaatgggtttctaattttgtagaatctaatcagcaatctagcctgcctaaagacacttcagtgagcctacacaggagagtttttgctggtgttttatagtttttcctatgaatgaaaatttcttgatttaaagtattgacagttgatgttaa

SEQ ID NO: 9900 - protein, 110 aa, Homo sapiens
MDHHIPMHALPEEIQKMLPEEKVCKYCGVSYLILHEFKAMEEKVKAMEKEMKFYQGSVDREKRLQEKLHSLSQELEQYKIDNKSKTERLSMFFFSIIYLVERQLQEINTL

SEQ ID NO: 9901 - DNA, 542 bp, Homo sapiens
gactggcggcgcggtcgcccgggagaccgggaaagccgtttcacacccgtcctagtcgaagtcgagatttcctttggcttcaaagctctctcaccatattttgggaagttatggatcatcacattcccatgcatgcgttgcctgaagaaatccaaaagatgttgcctgaagaaaaagtttgtaagtactgtggagtcagctatctaattcttcatgaatttaaggctatggaagaaaaagtgaaagcaatggaaaaagagatgaaattttatcaaggaagtgtagatcgtgaaaagagacttcaagaaaagctgcattctcttagccaagaacttgaacagtacaaaattgacaacaaatccaaaacagaaagcaaaatatacttcagactcatgcttagactggaagtagaacattgccagctgaaagaacgaatgccagatctacaacattctgtcactgagccatacataggtctgtgatttgttttccttagcttttcttaataactttgtttttgcaaaataaatatttttttgaaa

SEQ ID NO: 9902 - protein, 123 aa, Homo sapiens
MDHHIPMHALPEEIQKMLPEEKVCKYCGVSYLILHEFKAMEEKVKAMEKEMKFYQGSVDREKRLQEKLHSLSQELEQYKIDNKSKTESKIYFRLMLRLEVEHCQLKERMPDLQHSVTEPYIGL

SEQ ID NO: 9903 - DNA, 1220 bp, Homo sapiens
gactggcggcgcggtcgcccgggagaccgggaaagccgtttcacacccgtcctagtcgaagtcgagatttcctttggcttcaaagctctctcaccatattttgggaagttatggatcatcacattcccatgcatgcgttgcctgaagaaatccaaaagatgttgcctgaagaaaaagtttgtaagtactgtggagtcagctatctaattcttcatgaatttaaggctatggaagaaaaagtgaaagcaatggaaaaagagatgaaattttatcaaggaagtgtagatcgtgaaaagagacttcaagaaaagctgcattctcttagccaagaacttgaacagtacaaaattgacaacaaatccaaaacagaaagaatttacgatgtaggcatgcagttaaaaagtcaacaaaatgaatttcagaaagtaaagaaacaactgagtcatttgcaagatgagctaaaaattaaatatagacaatcatacatcttcagtcaaagattgtcagagtacaaatatttctggaataagactctttcattacttacttttactaaaagggaactaaccagtattaaaaatgaagtatatgataattaccaaaactggacttcattgaaaggagcagtttttctacaaattaaatctataagtgaaacagccttgacagaaatagacatactgaataaaagtttgacagtatcccagagaaataaagtatgccttgaaaaggaaatgaaaaatctgaaattgttgtcagatgcagccatattgagatctcagcagattcggacatctagacaacaggaagtaaacttgcaaaccagatgctatgatttgcaaaaagaagtactagatttacaatgtctagtagaggcacttggattaaaacttcagaaggcggtgacagagatggacaactataaagaaatgcttatgtaagatggagaatattaaacaacttataacagtgctctgtagatgtgttacaaaatggcaagaattaggaagaaatgacaagaattataaagaccctggtgtgttctctgtgattcttttggcagtgatttactggtgtgggtaatagtttactgctgcttttcttgcccactttactggcctagattatatattgaagaacctgtaaatatttttaaatacatggaggatttctttctctcaataagaaacttacttatccatatattaaagctttccctg

SEQ ID NO: 9904 - protein, 276 aa, Homo sapiens
MDHHIPMHALPEEIQKMLPEEKVCKYCGVSYLILHEFKAMEEKVKAMEKEMKFYQGSVDREKRLQEKLHSLSQELEQYKIDNKSKTERIYDVGMQLKSQQNEFQKVKKQLSHLQDELKIKYRQSYIFSQRLSEYKYFWNKTLSLLTFTKRELTSIKNEVYDNYQNWTSLKGAVFLQIKSISETALTEIDILNKSLTVSQRNKVCLEKEMKNLKLLSDAAILRSQQIRTSRQQEVNLQTRCYDLQKEVLDLQCLVEALGLKLQKAVTEMDNYKEMLM

SEQ ID NO: 9905 - DNA, 792 bp, Homo sapiens
tggcggcgcggtcgcccgggagaccgggaaagccgtttcacacccgtcctagtcgaagtcgagatttcctttggcttcaaagctctctcaccatattttgggaagttatggatcatcacattcccatgcatgcgttgcctgaagaaatccaaaagatgttgcctgaagaaaaagtttgtaagtactgtggagtcagctatctaattcttcatgaatttaaggctatggaagaaaaagtgaaagcaatggaaaaagagatgaaattttatcaaggaagtgtagatcgtgaaaagagacttcaagaaaagctgcattctcttagccaagaacttgaacagtacaaaattgacaacaaatccaaaacagaaagaatttacgatgtaggcatgcagttaaaaagtcaacaaaatgaatttcagaaagtaaagaaacaactgagtcatttgcaagatgagctaaaaattaaatatagacaatcatacatcttcagattgtgcttttgctgatgtctgtaagaactctgtctaagccggtcagaaggattttctcctgtattttcttctaagtgttttatagttttagctcttctttagatctatgatctatttcagctaacttctgtgtatgatatgaggtaagaatctaaattcatcctgtttcacgtggatattcaattgttccagtgctgtttgttagaggccaatttttccttattgaattgcctcagcatctttgcctaaaataaattcaccataaatgtaaaggattatttttggattttctattctattc

SEQ ID NO: 9906 - protein, 132 aa, Homo sapiens; identical to SEQ ID NO: 4482

SEQ ID NO: 9907 - DNA, 1975 bp, Homo sapiens
ggtcgcccgggagaccgggaaagccgtttcacacccgtcctagtcgaagtcgaggtgagggacgatggctttcctcagcctgggatgacccggtcctccaaatgcagttccggagtggaggcgtgctcgcacccggggagagagccagaaagctgagccgcggcgccccagcgagagcacgaggccccgggtctggactccgccaccacgctcctctgcggccccttcctggtgtctgccagcccgcggggcccaggcgcggtccgccttcctcccagccccggggaacgcgcggctctgcttcctcacccccgcaccctcctcctcctcctcttccggccactgcaggtccagggggaacggggttagaaagggacagatttgaaagccattccagcagttttgtctggccttgcggttggtttctgtgtggaagagcctgccgcttcaggaaagtcttaggatgtgaactcccgccttcacctgcccctgacctgctcgttgtgggtgattcacgccatgggaatggttctttacgtaagggcttgaaagctgaacgtgagttaatggcctgacgtgacactagtgtgagaaacggaattggaaacgaacaaggacgtgtctgcattttaaaaaatgtcttttcggtgatcttgttagagaggaggttcacaaacacccacgtagctgcagccacttatcactgcacctcttgccaaagtgcggtccacatacgtgcaatgagaaaggattaaagggacttgtttgataacacacgcaaaactatatttcctttggcttcaaagctctctcaccatattttgggaagttatggatcatcacattcccatgcatgcgttgcctgaagaaatccaaaagatgttgcctgaagaaaaagtttgtaagtactgtggagtcagctatctaattcttcatgaatttaaggctatggaagaaaaagtgaaagcaatggaaaaagagatgaaattttatcaaggaagtgtagatcgtgaaaagagacttcaagaaaagctgcattctcttagccaagaacttgaacagtacaaaattgacaacaaatccaaaacagaaagaatttacgatgtaggcatgcagttaaaaagtcaacaaaatgaatttcagaaagtaaagaaacaactgagtcatttgcaagatgagctaaaaattaaatatagacaatcatacatcttcagattgtgcttttgctgatgtctgtaagaactctgtctaagccggtcagaaggattttctcctgtattttcttctaagtgttttatagttttagctcttctttagatctatgatctatttcagctaacttctgtgtatgatatgaggtaagaatctaaattcatcctgtttcacgtggatattcaattgttccagtgctgtttgttagaggccaatttttccttattgaattgcctcagcatctttgcctaaaataaattcaccataaatgtaaaggattatttttggattttctattctattccattaatctatatgtcttatgtcagtgccacactctcttaagtactacagtttttaataaattttaaaatcaagaaatataattactctaacttccttcttcgttttcaaaattgtttttgctattctgcgccctccataatgaattttaggatcagcttgtgaatttctgcaaagtaacctgctgggattttgataggtatagtattgaatctatagatcaatttggggagaatttctaccttaaaatttttgtatctttcaattcatgaatgtggtatgtttttccatggagatctttagccctctcaaaaatgttttgttttcttgaacttcttttattacaatttatttctaagtgttttattctttttatgttgttatgaattgggactgttaattttatcttggggattggtcattgttaatatacagaaataaaattgatttttgtatatgt

SEQ ID NO: 9908 - protein, 132 aa, Homo sapiens; identical to SEQ ID NO: 4482

SEQ ID NO: 9909 - DNA, 811 bp, Homo sapiens
ccgggagaccgggaaagccgtttcacacccgtcctagtcgaagtcgagatttcctttggcttcaaagctctctcaccatattttgggaagttatggatcatcacattcccatgcatgcgttgcctgaagaaatccaaaagaatttacgatgtaggcatgcagttaaaaagtcaacaaaatgaatttcagaaagtaaagaaacaactgagtcatttgcaagatgagctaaaaattaaatatagacaatcatacatcttcagaaatagacatactgaataaaagtttgacagtatcccagagaaataaagtatgccttgaaaaggaaatgaaaaatctgaaattgttgtcagatgcagccatattgagatctcagcagattcggacatctagacaacaggaagtaaacttgcaaaccagatgctatgatttgcaaaaagaagtactagatttacaatgtctagtagaggcacttggattaaaacttcagaaggcggtgacagagatggacaactataaagaaatgcttatgtaagatggagaatattaaacaacttataacagtgctctgtagatgtgttacaaaatggcaagaattaggaagaaatgacaagaattataaagaccctggtgtgttctctgtgattcttttggcagtgatttactggtgtgggtaatagtttactgctgcttttcttgcccactttactggcctagattatatattgaagaacctgtaaatatttttaaatacatggaggatttctttctctcaataagaaacttacttatccatatattaaagctttccctg

SEQ ID NO: 9910 - protein, 68 aa, Homo sapiens
MKNLKLLSDAAILRSQQIRTSRQQEVNLQTRCYDLQKEVLDLQCLVEALGLKLQKAVTEMDNYKEMLM

SEQ ID NO: 9911 - DNA, 469 bp, Homo sapiens
ttaaatatagacaatcatacatcttcagtcaaagattgtcagagtacaaatatttctggaataagactctttcattacttacttttactaaaagggaactaaccagtattaaaaatgaagtatatgataattaccaaaactggacttcattgaaaggagcagtttttctacaaattaaatctataagtgaaacagccttgacagaaatagacatactgaataaaagtttgacagtatcccagagaaataaagtatgccttgaaaaggaaatgaaaaatctgaaattgttgtcagatgcagccatattgagatctcagcagattcggacatctagacaacaggaagtaaacttgcaaaccagatgctatgatttgcaaaaagaagtactaggtaaagaaaagtcttttgctgtttttggtgactagttatataagtacatgaataaatgtttacatttttacttataatt

SEQ ID NO: 9912 - protein, 51 aa, Homo sapiens
MKNLKLLSDAAILRSQQIRTSRQQEVNLQTRCYDLQKEVLGKEKSFAVFGD

SEQ ID NO: 9913 - DNA, 2018 bp, Homo sapiens
atgtgaagaacagtgtttctctcctacagaggatgcagtgtccagggcatcatctatgaatggagacaacctttaccggacaccaaacctaccagcaccatgaccttgaactttccagccttctgaactatggcgtactgctctgttgcccaggttagagtgcagtggcttgatcatagctcactgcagccttgagctcctaggctcaagcagtcctcttgcctcagcctcctgaatagctgggactacaggttctattctgaggtactaaggttaagacctcaacatatgaattctggaggacaaaattcaacccagaagtctaccttgtattgggtcctcacggcaaggctgcaaaacccggggggttggtggcccagtcccacctcccatgagctaatgaatgtggggctcagggaggactgacaggactagagttgacaaccattcatccaacaaacatttactgcacgaggaagagaggtgatcaaggcactgcccttgtccccaggaagctcgccagtgcatgggactgtgcaggtgtcttcacctctgcattaggcattcgatgtcaggccatggctgagcatccatcctctctatgctaattttttccaaaagtcaagagtttggaagaacactaatgtgtttttcttccagcctttcctatacaaatgacaacatcattaccctcagcttttaaagtgcaagtctgtacagagatcccagagtcaaggagggcgcctgagtcatttgaaataattaccttttttttttcctgcctgagtcttgcatatctgtgaatcagcaatgtggaaactgggcttcaaaaaaattaagggaggcttaaagtgagcaaagcagagaagagcattggcaagagctgagcgctgccacagcaggaacatcatgccgatcgtcatctaagggagctcatggtgctgtctgcctcctcttagcaacatccacacaggctggtacagtcagatcattgtgacttggacagggatgaaaatactcagctgacaccaatagctcccagcacagccagggtattctagaggtgtgtggtgtcaggacagcctgtgcggcctcatttatttacctgagtcatctgaacaaagcggtgactggctttgcctggctctggcaaggactcgcaacaaagccaaagcctcttcctccacggcctttgctcctgcagcacagcactggcatctttttagcatcatagacactgtcacgtggcaatcaatgacagatgaactgtcccttccctgggccacaagctcttcaaggcgggagcctcagcccagtttcttccatgtctccagcgcccagcacagggcctggcttctagctggtttctgatgaataaacgaatggctatagagatgtactcttcaaaacacaaggggcttctatagtggcaacatgttcagtagcacagtgctgtattggttctttacagcttgcaggacccaaagaaggaatgatttttgtttcccgggaaaggtgtacctcgtgggggcactgctcaagggaaggtgcccacaagttggggatcaagggaggcacaggttgatcaaagcccctggaattgaaatggaggtgttcatcctgcggaggctccgaacatctgaggcagagcctcgattctccaggaaattgactttgccggagaacaaggctggggaaggcaggctgtcctaggggaggagtcgtatttcagccccactgagaccccaaaggcgcactcccatgctttaccccagctgtccaccagggggcaggcagaggcaagagaagaggaaagcgggcggctggtcaggcccagcacatccagcctggcatcccacacgctgggctgcctgactcagacaaagccaggccgctcctcctgcctgttgtggcctctgtgattttatatggtttggcctgtgacatcagacaccacgcgaccatggtaaccaaagtatacagcctggagtgaatgttaataaacaggaaagaaatga

SEQ ID NO: 9914 - protein, 45 aa, Homo sapiens
MNSGGQNSTQKSTLYWVLTARLQNPGGWWPSPTSHELMNVGLRED

SEQ ID NO: 9915 - DNA, 1550 bp, Homo sapiens
ggagcggcctggctttgtctgagtcaggcagcccagcgtgtgggatgccaggctggatgtgctgggcctgaccagccgcccgctttcctcttctcttgcctctgcctgccccctggtggacagctggggtaaagcatgggagtgcgcctttggggtctcagtggggctgaaatacgactcctcccctaggacagcctgccttccccagccttgttctccggcaaagtcaatttcctggagaatcgaggctctgcctcagatgttcggagcctccgcaggatgaacacctccatttcaattccaggggctttgatcaacctgtgcctcccttgatccccaacttgtgggcaccttcccttgagcagtgcccccacgaggtacacctttcccgggaaacaaaaatcattccttctttgggtcctgcaagctgtaaagaaccaatacagcactgtgctactgaacatgttgccactatagaagccccttgtgttttgaagagtacatctctatagccattcgtttattcatcagaaaccagctagaagccaggccctgtgctgggcgctggagacatggaagaaactgggctgaggctcccgccttgaagagcttgtggcccagggaagggacagttcatctgtcattgattgccacgtgacagtgtctatgatgctaaaaagatgccagtgctgtgctgcaggagcaaaggccgtggaggaagaggctttggctttgttgcgagtccttgccagagccaggcaaagccagtcaccgctttgttcagatgactcaggtaaataaatgaggccgcacaggctgtcctgacaccacacacctctagaataccctggctgtgctgggagctattggtgtcagctgagtattttcatccctgtccaagtcacaatgatctgactgtaccagcctgtgtggatgttgctaagaggaggcagacagcaccatgagctcccttagatgacgatcggcatgatgttcctgctgtggcagcgctcagctcttgccaatgctcttctctgctttgctcactttaagcctcccttaatttttttgaagcccagtttccacattgctgattcacagatatgcaagactcaggcaggaaaaaaaaaagtgtctccttttccagacttcttagaggacttggaaagaaaatgaaatgacgttgaacgaaatcaaagtaaattgagtgatctgaaacgatttgatgtcagcaagaattccccatacagctcacagccctaccccgagcacgcctccctcttgggtatgctctctgcaggcccaaaccttgcagaagccattccatgtttcctgagcaggaaaagacaaactcagaccgacaaccttggacttcaaaagactgcacacaaggggaggaaggactgagagtaccaaggcgtgagaattcagaatgctgctatctcatttatttttaccatttaggaaacgttttgatctgcattccttttcccttccctgatttcaaaaaataaaaataaaaatgcttcggttctgaggagtaactctcc

SEQ ID NO: 9916 - protein, 66 aa, Homo sapiens
MTIGMMFLLWQRSALANALLCFAHFKPPLIFLKPSFHIADSQICKTQAGKKKVSPFPDFLEDLERK

SEQ ID NO: 9917 - DNA, 2292 bp, Homo sapiens
agtatcattgtttttacttcaaggttcaggaaacgctggaaattgctagctaatatcacaggaaaaaaaacaaaaaacacgaggttgacctcaccctacccgcggtaggtaaccatgtatgaatagagactcccaggcataatcaaattacctctgtcaagtcctcgccctaagactatttttggaaactagggattttccagattactgaaagccgtggcggtgtcaaaggccgggcaggagtttcgcaagcggagctatgaaagcagccactctcgcggtcattcctatgcctccgccctacttccccatactggcaaaaacacgctccccggggagctttcatttgggaaccgatagggtccacagccctgtgttcttcaaatactgtaaagcagccctctccagattccttgagggtcactttatattacacattcgtccacacaggacaacaaagtcaccacttccacccgccaaagcgcgctcaggtcggccgccacttcccttggtacacgcggaacgcaagccgcgccgaggctaaaggaagaggccggaatgcagggcgaaggggcgcagagatgctagccaatgctgccacctctattttgggtataagggatcttgtaaagctccgttattcgtgtggctatcacaaacaaggtggtttcgaccggccttggctagagaaggcctcctcagcctctgaggatcccaaggtctgtcgcagcacccaacactcccctcgcaggcccagatgccgagggcggaggcgcggcctggagggactagttggcgcgcggctgcccggcgtggtgacgtcagggcggaagcgcacgcggcgtgaagcggcccagaacccggcggtcacgggaatatccgtcgcgccgagaacgctggttagtcttgtttcgggttccggctgcgttgggcttgcgtgcggctcgctaagactatggcgtccgggcctcattcgacagctactgctgccgcagccgcctcatcggccgccccaagcgcgggcggctccagctccgggacgacgaccacgacgacgaccacgacgggagggatcctgatcggcgatcgcctgtactcggaagtttcacttaccatcgaccactctctgattccggaggagaggctctcgcccaccccatccatgcaggatgggctcgacctgcccagtgagacggacttacgcatcctgggctgcgagctcatccaggccgccggcattctcctccggctgccgcaggtggcgatggcaacggggcaggtgttgtttcatcgttttttctactccaaatctttcgtcaaacacagtttcgagattgttgctatggcttgtattaatcttgcatcaaaaatcgaagaagcacctagaagaataagagatgtgattaatgtattccaccacctccgccagttaagaggaaaaaggactccaagccccctgatccttgatcagaactacattaacaccaaaaatcaagttatcaaagcagagaggagggtgctaaaggagttgggattttgtgttcatgtcaagcatcctcataagatcattgttatgtatttacaagtcttagaatgtgaacgtaatcaaaccctggttcaaactgcctggaattacatgaatgacagtcttcgaaccaatgtgtttgttcgatttcaaccagagactatagcatgtgcttgcatctaccttgcagctagagcacttcagattccgttgccaactcgtccccattggtttcttctttttggtactacagaagaggaaatccaggaaatctgcatagaaacacttaggctttataccagaaaaaagccaaactatgaattactggaaaaagaagtagaaaaaagaaaagtagccttacaagaagccaaattaaaagcaaagggattgaatccggatggaactccagccctttcaaccctgggtggattttctccagcctccaagccatcatcaccaagagaagtaaaagctgaagagaaatcaccaatctccattaatgtgaagacagtcaaaaaagaacctgaggatagacaacaggcttccaaaagcccttacaatggtgtaagaaaagacagcaagagaagtagaaatagcagaagtgcaagtcgatcgaggtcaagaacacgatcacgttctagatcacatactccaagaagacaagacgaggtcttgctacgttgcccaggtcggtcacgaactcctggcctcaagtgatcctcccacctcagcctcccaagtattaaattcttaatagtgttgaaatt

SEQ ID NO: 9918 - protein, 428 aa, Homo sapiens
MASGPHSTATAAAAASSAAPSAGGSSSGTTTTTTTTTGGILIGDRLYSEVSLTIDHSLIPEERLSPTPSMQDGLDLPSETDLRILGCELIQAAGILLRLPQVAMATGQVLFHRFFYSKSFVKHSFEIVAMACINLASKIEEAPRRIRDVINVFHHLRQLRGKRTPSPLILDQNYINTKNQVIKAERRVLKELGFCVHVKHPHKIIVMYLQVLECERNQTLVQTAWNYMNDSLRTNVFVRFQPETIACACIYLAARALQIPLPTRPHWFLLFGTTEEEIQEICIETLRLYTRKKPNYELLEKEVEKRKVALQEAKLKAKGLNPDGTPALSTLGGFSPASKPSSPREVKAEEKSPISINVKTVKKEPEDRQQASKSPYNGVRKDSKRSRNSRSASRSRSRTRSRSRSHTPRRQDEVLLRCPGRSRTPGLK

SEQ ID NO: 9919 - DNA, 2733 bp, Homo sapiens
tttcaggaattacatgaatgacagtcttcgaaccaatgtgtttgttcgatttcaaccagagactatagcatgtgcttgcatctaccttgcagctagagcacttcaggtaggtgtatatttcccattttgttctgtaggataaatcacacaaattttcggtggttccaatacagatttagcaaaaatttaatttaaaacattctgttcttatggtttagattccgttgccaactcgtccccattggtttcttctttttggtactacagaagaggaaatccaggaaatctgcatagaaacacttaggctttataccagaaaaaaggtattctctatttactcgtttgtgccaacatgctaagagtccaagctactctaaggaagaaatactaacttttttttcctccaacagccaaactatgaattactggaaaaagaagtagaaaaaagaaaagtagccttacaagaagccaaattaaaagcaaagggattgaatccggatggaactccagccctttcaaccctgggtggattttctccagcctccaagccatgtaagatgtatttagaattaaaatgacttgggggcactgaaagtgtgtctttattagagagcttttacatttgaaagttgcatagagaaaaatgatgttaggaaactgctgctatgttctctcatggcagtcaaccaacatggaagcggaagcatggtactttgagttacatttagaaacaacttttggccctctgttaaatccagtagttaacatgttgttattatatcttttaaaagcatcaccaagagaagtaaaagctgaagagaaatcaccaatctccattaatgtgaagacagtcaaaaaagaacctgaggatagacaacaggcttccaaaagcccttacaatggtgtaagaaaagacagcaagagaagtagaaatagcagaagtgcaagtcgatcgaggtcaagaacacgatcacgttctagatcacatactccaagaagacagtaagtaaatgttttcttagggaagcagtcttatttggagtttttaaaggttattgctttttctttaaaaattgaacatagattattttcaaagttaggttagaattaggcttttagtatgaggcaaattatgagaaatgagtttggagatgttctggacatacagtatcttaatggcattctgttatattttctcccatgttttttggagaagtgtaggagctacccacaaagtgcttgagggccatagtattgttcataatgtgaaaacttctttttttttttttaatttcagttagaaaatgtgtttcattaaccccttattaataaccaataatcaaattaaccagtcaatgaatcttctttagttaggcctgtaattagattgttagctcttcgtggctcttcaatgtcttttgaacatgtgggagatacttaataaaaagcatagctctaggacactataaaaattgctaattactccccttggaataaagacataagaacatttgcttaagatttaatatgttatatataggcttgggcatacagcagtgaggggtggggagattttgaaaagttctggtttgtcatttatgtagctggtagttttgttttgaacctgttatgagcaaccaccggaataatctgttccccatagaaactgaacctaaacttcaaatttttattatctaagctataataataggcggagtcgatctggaacatacagctcgagatcaagaagcaggtcccgcagtcacagtgaaagccctcgaagacatcataatcatggttctcctcaccttaaggccaagcataccagagatgatttaaaaagttcaaacagacatggtcataaaaggaaaaaatctcgttctcgatctcagagcaagtctcgggatcactcagatgcagccaagaaacacaggcatgaaaggggacatcatagggacaggcgtgaacgatctcgctcctttgagaggtcccataaaagcaagcaccatggtggcagtcgctcaggacatggcaggcacaggcgctgactttctcttcctttgagcctgcatcagttcttggttttgcctatctacagtgtgatgtatggactcaatcaaaaacattaaacgcaaactgattaggatttgatttcttgaaaccctctaggtctctagaacactgaggacagtttcttttgaaaagaactatgttaatttttttgcacattaaaatgccctagcagtatctaattaaaaaccatggtcaggttcaattgtactttattatagttgtgtattgtttattgctataagaactggagcgtgaattctgtaaaaatgtatcttatttttatacagataaaattgcagacactgttctatttaagtggttatttgtttaaatgatggtgaatactttcttaacactggtttgtctgcatgtgtaaagatttttacaaggaaataaaatacaaatcttgttttttctaaactgcttcaaataccttatttaaataaattattaaaaaggaaaattttaatagcaaaatggctgtactggttttctgacaaacttattctttcctccattagatggtagtttgagattattaaaatgcaattcttaactgcattgtgagctattgtaagtcttcactgtatatatggaaaaagtaaatgggagtcgcccaacaatgtgacattaaatgttatattttagcactaaaccaaa

SEQ ID NO: 9920 - protein, 120 aa, Homo sapiens
MMLGNCCYVLSWQSTNMEAEAWYFELHLETTFGPLLNPVVNMLLLYLLKASPREVKAEEKSPISINVKTVKKEPEDRQQASKSPYNGVRKDSKRSRNSRSASRSRSRTRSRSRSHTPRRQ

SEQ ID NO: 9921 - DNA, 2396 bp, Homo sapiens
agtccatttaatttcagcttaaccttttaaatgatctgtaaaatttctttgatagtttaggaatgttgtggggagggttcattaataaaagttcagcaattttttaactgaaatagtttatctcttttacctagtcacaaaaaaggtatgtaaacaaggccattatatgtgtttattgctctttatttccctatctagattttctaagtatcttagctttcttaatataagtttaacttggtacttactgaaaatgcctttttacccctgttaacggtattttgagcttttgaaaagaacttggttgacactgcttttattgtggataaaggagagatggtcagtaattaatggcttgaagtattattggagtggtttatcatttctgaaactaatcgtgtcagaattgactttgaaaagcattgctttttacagaaatatattaactttttaggagtaatttctagtttggattgtaatatgaaataatttaaaagggcttcgctcatatataggaaaatcgcatatggtcctagtattaaattcttattgcttactgatttttttgagttaagagttgttatatgctagaatatgaggatgtgaatataaataagagaagaaaaaagaataaagtagattgagtctccaattttatgtaagcttcagaagaactggtttgtttacatgcaagcttatagttgaaatatttttcaggaattacatgaatgacagtcttcgaaccaatgtgtttgttcgatttcaaccagagactatagcatgtgcttgcatctaccttgcagctagagcacttcagattccgttgccaactcgtccccattggtttcttctttttggtactacagaagaggaaatccaggaaatctgcatagaaacacttaggctttataccagaaaaaaggtattctctatttactcgtttgtgccaacatgctaagagtccaagctactctaaggaagaaatactaacttttttttcctccaacagccaaactatgaattactggaaaaagaagtagaaaaaagaaaagtagccttacaagaagccaaattaaaagcaaagggattgaatccggatggaactccagccctttcaaccctgggtggattttctccagcctccaagccatcatcaccaagagaagtaaaagctgaagagaaatcaccaatctccattaatgtgaagacagtcaaaaaagaacctgaggatagacaacaggcttccaaaagcccttacaatggtgtaagaaaagacagcaagagaagtagaaatagcagaagtgcaagtcgatcgaggtcaagaacacgatcacgttctagatcacatactccaagaagacactataataataggcggagtcgatctggaacatacagctcgagatcaagaagcaggtcccgcagtcacagtgaaagccctcgaagacatcataatcatggttctcctcaccttaaggccaagcataccagagatgatttaaaaagttcaaacagacatggtcataaaaggaaaaaatctcgttctcgatctcagagcaagtctcgggatcactcagatgcagccaagaaacacaggcatgaaaggggacatcatagggacaggcgtgaacgatctcgctcctttgagaggtcccataaaagcaagcaccatggtggcagtcgctcaggacatggcaggcacaggcgctgactttctcttcctttgagcctgcatcagttcttggttttgcctatctacagtgtgatgtatggactcaatcaaaaacattaaacgcaaactgattaggatttgatttcttgaaaccctctaggtctctagaacactgaggacagtttcttttgaaaagaactatgttaatttttttgcacattaaaatgccctagcagtatctaattaaaaaccatggtcaggttcaattgtactttattatagttgtgtattgtttattgctataagaactggagcgtgaattctgtaaaaatgtatcttatttttatacagataaaattgcagacactgttctatttaagtggttatttgtttaaatgatggtgaatactttcttaacactggtttgtctgcatgtgtaaagatttttacaaggaaataaaatacaaatcttgttttttctaaactgcttcaaataccttatttaaataaattattaaaaaggaaaattttaatagcaaaatggctgtactggttttctgacaaacttattctttcctccattagatggtagtttgagattattaaaatgcaattcttaactgcattgtgagctattgtaagtcttcactgtatatatggaaaaagtaaatgggagtcgcccaacaatgtgacattaaatgttatattttagcactaaaccaaa

SEQ ID NO: 9922 - protein, 77 aa, Homo sapiens
MNDSLRTNVFVRFQPETIACACIYLAARALQIPLPTRPHWFLLFGTTEEEIQEICIETLRLYTRKKVFSIYSFVPTC

SEQ ID NO: 9923 - DNA, 2883 bp, Homo sapiens
agttcatttttgatagatttgttgtgcagccattatgaattaaatggtttattaggagtttgactaaatttttatttttagtgtgtatagcatgaatactaccaaaggagacgacaaacttgcagcttaaaatgggcaccagttcccacactggcttaatttatataactgcttggctgtattgcgggtaataatattagaagcaagaagcacttcatttttaaaagagatgttactataatattgcttaaatgctttagcacttggacttcttgagatgcagatgtgtgatttggagtgctggcttatttaaaggtcaagccaaggagtttgtggttcagccacaactactgtttcctaagactattgatgtgaaggacttagtgaagtaatttttatattctgggcttcccagcaagatgtcctttttatgactgccatgcttcttttggactcagtaaatatttgtaatgttagaaaagtctcattatttttataaaatgcatgacattttaagtatgtgttgcataaaatggattatagcagttctcatggtttaggatttttaagaaatagtccatttaatttcagcttaaccttttaaatgatctgtaaaatttctttgatagtttaggaatgttgtggggagggttcattaataaaagttcagcaattttttaactgaaatagtttatctcttttacctagtcacaaaaaaggtatgtaaacaaggccattatatgtgtttattgctctttatttccctatctagattttctaagtatcttagctttcttaatataagtttaacttggtacttactgaaaatgcctttttacccctgttaacggtattttgagcttttgaaaagaacttggttgacactgcttttattgtggataaaggagagatggtcagtaattaatggcttgaagtattattggagtggtttatcatttctgaaactaatcgtgtcagaattgactttgaaaagcattgctttttacagaaatatattaactttttaggagtaatttctagtttggattgtaatatgaaataatttaaaagggcttcgctcatatataggaaaatcgcatatggtcctagtattaaattcttattgcttactgatttttttgagttaagagttgttatatgctagaatatgaggatgtgaatataaataagagaagaaaaaagaataaagtagattgagtctccaattttatgtaagcttcagaagaactggtttgtttacatgcaagcttatagttgaaatatttttcaggaattacatgaatgacagtcttcgaaccaatgtgtttgttcgatttcaaccagagactatagcatgtgcttgcatctaccttgcagctagagcacttcagattccgttgccaactcgtccccattggtttcttctttttggtactacagaagaggaaatccaggaaatctgcatagaaacacttaggctttataccagaaaaaagccaaactatgaattactggaaaaagaagtagaaaaaagaaaagtagccttacaagaagccaaattaaaagcaaagggattgaatccggatggaactccagccctttcaaccctgggtggattttctccagcctccaagccatcatcaccaagagaagtaaaagctgaagagaaatcaccaatctccattaatgtgaagacagtcaaaaaagaacctgaggatagacaacaggcttccaaaagcccttacaatggtgtaagaaaagacagcaagagaagtagaaatagcagaagtgcaagtcgatcgaggtcaagaacacgatcacgttctagatcacatactccaagaagacactataataataggcggagtcgatctggaacatacagctcgagatcaagaagcaggtcccgcagtcacagtgaaagccctcgaagacatcataatcatggttctcctcaccttaaggccaagcataccagagatgatttaaaaagttcaaacagacatggtcataaaaggaaaaaatctcgttctcgatctcagagcaagtctcgggatcactcagatgcagccaagaaacacaggcatgaaaggggacatcatagggacaggcgtgaacgatctcgctcctttgagaggtcccataaaagcaagcaccatggtggcagtcgctcaggacatggcaggcacaggcgctgactttctcttcctttgagcctgcatcagttcttggttttgcctatctacagtgtgatgtatggactcaatcaaaaacattaaacgcaaactgattaggatttgatttcttgaaaccctctaggtctctagaacactgaggacagtttcttttgaaaagaactatgttaatttttttgcacattaaaatgccctagcagtatctaattaaaaaccatggtcaggttcaattgtactttattatagttgtgtattgtttattgctataagaactggagcgtgaattctgtaaaaatgtatcttatttttatacagataaaattgcagacactgttctatttaagtggttatttgtttaaatgatggtgaatactttcttaacactggtttgtctgcatgtgtaaagatttttacaaggaaataaaatacaaatcttgttttttctaaactgcttcaaataccttatttaaataaattattaaaaaggaaaattttaatagcaaaatggctgtactggttttctgacaaacttattctttcctccattagatggtagtttgagattattaaaatgcaattcttaactgcattgtgagctattgtaagtcttcactgtatatatggaaaaagtaaatgggagtcgcccaacaatgtgacattaaatgttatattttagcactaaaccaaa

SEQ ID NO: 9924 - protein, 299 aa, Homo sapiens
MNDSLRTNVFVRFQPETIACACIYLAARALQIPLPTRPHWFLLFGTTEEEIQEICIETLRLYTRKKPNYELLEKEVEKRKVALQEAKLKAKGLNPDGTPALSTLGGFSPASKPSSPREVKAEEKSPISINVKTVKKEPEDRQQASKSPYNGVRKDSKRSRNSRSASRSRSRTRSRSRSHTPRRHYNNRRSRSGTYSSRSRSRSRSHSESPRRHHNHGSPHLKAKHTRDDLKSSNRHGHKRKKSRSRSQSKSRDHSDAAKKHRHERGHHRDRRERSRSFERSHKSKHHGGSRSGHGRHRR

SEQ ID NO: 9925 - DNA, 4875 bp, Homo sapiens
tttcttaaatctattttgatgtcattggcattttgacacaaaaacaaagaaaatggcatcattaagtctgatttgggactaaatagtagctataattcaaacatatttagcttctttagtgtaattgcaagaacaaatgaattatatcaccatttgaaggcagttcttaaagcaggttatcttaagaggtatagataatttttattaacaaatggagaaaaatgagacaactatgttttcataaaattacattttactagggattttgatgataccgtcttctgtctggattgcaaggggttaagagttaaaatggtgtgtgcagctgtaacactggagctattttatctcttaatgacagttaaggagagccattagataacacagccataagttaaaaagagtctgaagttggttttacttttttccaaatttcctgtgatgataaaacctgatcatagaccttaagatctttggaatatgtttatatgtatgtatgtatgtatgtatgtatgtatgtatgtatatatatggagagagagataggttgttttcatgagaattaagtttgacttattttccaaagagcaatttgtagcctactgtcctgataaaatggattcatcattacacgttaatattagaaagcagctcaatgaggccagctggtggcctcattcctcataggtgtgaggaatgaaaccgagggaaggccattttaagtaacagctgtcttttatcttgtcagcgctgccagtttttgtttagtaagcattccagtttctgtaataattttaaatggaagaaagtaaggaaaatgtatgataactgactttttactctgatgttaccataggggtaatgaagttcatcgcagattgttttctaaccttcggtgcatgtattgaaatagatttttgttttaaaaatatgagattacatttttctggatctggtgtgcattggggtagagaggatgactgtcttaaaaatagatcgtgtattctgcctagagcaaagactcttaagtcttttggctgaaaatgaactgagtatggacaaaaatattgaagtattctacttgtaaacttaccgtataatcagtgtcttgataaaatagtagtttttgttggttgaatctaagaatgtgttggacttgggtaaatttcagacatgaccaacaacaaaaaacaaaagcccaattccttaacctttcctgactgaaacttctcaggaagaaaccagttttgaattgtatgacataaataagattgtcttttattataagtttttaaactatgtaataaaacatttggggataacatcagttgaatgtgctacttttaaagcattaaaccactgacataagccttctgtattatagaaacttctgagttaccaaaatttagtctggtacagagcccttgaatatgttgtggttccctcattatggcccttcattcccttctgtgttaatagtaaagcatgttgcctaataactacaaccctgaccaaatttgggcctggatctcatgggtcacgtggagttttaaatacgatttttaatttacttgggtaattgagctgaatctttagttttcagattacttttttaaacagataggctcttagaacaaattattaaaaacataataccccattggaggggaatctggattaactacccactgttcccaccccccccaacttttgaaaaattttggccatatagaatgcatgaaaaatcagtatgatcttatgaggactttatagtactgtaaatcttaggagcactttagttgttttgtttgtttgtttgttttaccagtcaaatagcagtgggagattgtataccaactttagtgacactgatattagtaagttctgataacccactaccatcggaccagcctggagcacattactttggccagtggaaagtctcttggagagactttgaggtttgtgatgacaaatcatgctatcgttaaagttaaatacatatatatacacacctagaatataagcagaatggaaaagttggcagggatgaattcaagaacattagagtgaatttttttcattacagaattgttagttcctttaggaacttagtctcgtagatgtatatatttaattagcataacttggacagcacaagattaatgctttaacttgtttgcaggagtttaaaaagctggtttctgttgccaatagttggttggaagggaaaatggagatgccacaaataaaattttttggatgtgcaaaacagttttgattttatttcttacaaactataggactccaagccccctgatccttgatcagaactacattaacaccaaaaatcaagttatcaaagcagagaggagggtgctaaaggagttgggattttgtgttcatgtcaagcatcctcataaggtgagttgtagagtacagaaattgggttcgtaagtattaggacttttctaaaaattttattttatatgaatttatgtttctatctgagtgttaaccttggttttaaaaagcattcttttaaaggttcaggcttcatcgaaaaacattcttttggatgttgagatttatcagtaaaatgacagtcaaaaatgtaggttcaaatcttaaatcttaattgtgtgctcatagagaagttatttttgtttctgtggttaaagtcccagtttttccacctagaaaacagagatgtaaagttcctcattccaaggaataaatgtgtagctacaaaagtatctggcacacttatcatcatagtagaatgttctaagtgtgttggctgctcactgttaccattattggaaatttgtttctcccaacatctcttagctttcattatcaatataagccatagagtgagttacccgggtcaggactacctgggttagaaatgtaccttgggaaattaggtgaaataatctagcacggtgcccatcacatagtaaagtgccaatgaaaaatattcttttaattgccttttttcctgtacaattttgaaatatgcttctaaacataatttatataaaatctagtcatgtagcagttcacattagaatcttatgtacatttaaattggtctgtattatcgatgcacaattagaacttgagtctaacattttcaattacttttttcattgaactctactccgaaagaactaccagtatactgaattgagtttttttcccttgtccttcagatcattgttatgtatttacaagtcttagaatgtgaacgtaatcaaaccctggttcaaactgcctggaattacatgaatgacagtcttcgaaccaatgtgtttgttcgatttcaaccagagactatagcatgtgcttgcatctaccttgcagctagagcacttcagattccgttgccaactcgtccccattggtttcttctttttggtactacagaagaggaaatccaggaaatctgcatagaaacacttaggctttataccagaaaaaagccaaactatgaattactggaaaaagaagtagaaaaaagaaaagtagccttacaagaagccaaattaaaagcaaagggattgaatccggatggaactccagccctttcaaccctgggtggattttctccagcctccaagccatcatcaccaagagaagtaaaagctgaagagaaatcaccaatctccattaatgtgaagacagtcaaaaaagaacctgaggatagacaacaggcttccaaaagcccttacaatggtgtaagaaaagacagcaagagaagtagaaatagcagaagtgcaagtcgatcgaggtcaagaacacgatcacgttctagatcacatactccaagaagacactataataataggcggagtcgatctggaacatacagctcgagatcaagaagcaggtcccgcagtcacagtgaaagccctcgaagacatcataatcatggttctcctcaccttaaggccaagcataccagagatgatttaaaaagttcaaacagacatggtcataaaaggaaaaaatctcgttctcgatctcagagcaagtctcgggatcactcagatgcagccaagaaacacaggcatgaaaggggacatcatagggacaggcgtgaacgatctcgctcctttgagaggtcccataaaagcaagcaccatggtggcagtcgctcaggacatggcaggcacaggcgctgactttctcttcctttgagcctgcatcagttcttggttttgcctatctacagtgtgatgtatggactcaatcaaaaacattaaacgcaaactgattaggatttgatttcttgaaaccctctaggtctctagaacactgaggacagtttcttttgaaaagaactatgttaatttttttgcacattaaaatgccctagcagtatctaattaaaaaccatggtcaggttcaattgtactttattatagttgtgtattgtttattgctataagaactggagcgtgaattctgtaaaaatgtatcttatttttatacagataaaattgcagacactgttctatttaagtggttatttgtttaaatgatggtgaatactttcttaacactggtttgtctgcatgtgtaaagatttttacaaggaaataaaatacaaatcttgttttttctaaactgcttcaaataccttatttaaataaattattaaaaaggaaaattttaatagcaaaatggctgtactggttttctgacaaacttattctttcctccattagatggtagtttgagattattaaaatgcaattcttaactgcattgtgagctattgtaagtcttcactgtatatatggaaaaagtaaatgggagtcgcccaacaatgtgacattaaatgttatattttagcactaaaccaaa

SEQ ID NO: 9926 - protein, 320 aa, Homo sapiens
MYLQVLECERNQTLVQTAWNYMNDSLRTNVFVRFQPETIACACIYLAARALQIPLPTRPHWFLLFGTTEEEIQEICIETLRLYTRKKPNYELLEKEVEKRKVALQEAKLKAKGLNPDGTPALSTLGGFSPASKPSSPREVKAEEKSPISINVKTVKKEPEDRQQASKSPYNGVRKDSKRSRNSRSASRSRSRTRSRSRSHTPRRHYNNRRSRSGTYSSRSRSRSRSHSESPRRHHNHGSPHLKAKHTRDDLKSSNRHGHKRKKSRSRSQSKSRDHSDAAKKHRHERGHHRDRRERSRSFERSHKSKHHGGSRSGHGRHRR

SEQ ID NO: 9927 - DNA, 2676 bp, Homo sapiens
ccagaacccggcggtcacgggaatatccgtcgcgccgagaacgctggttagtcttgtttcgggttccggctgcgttgggcttgcgtgcggctcgctaagactatggcgtccgggcctcattcgacagctactgctgccgcagccgcctcatcggccgccccaagcgcgggcggctccagctccgggacgacgaccacgacgacgaccacgacgggagggatcctgatcggcgatcgcctgtactcggaagtttcacttaccatcgaccactctctgattccggaggagaggctctcgcccaccccatccatgcaggatgggctcgacctgcccagtgagacggacttacgcatcctgggctgcgagctcatccaggccgccggcattctcctccggctgccgcaggtggcgatggcaacggggcaggtgttgtttcatcgttttttctactccaaatctttcgtcaaacacagtttcgagattgttgctatggcttgtattaatcttgcatcaaaaatcgaagaagcacctagaagaataagagatgtgattaatgtattccaccacctccgccagttaagaggaaaaaggactccaagccccctgatccttgatcagaactacattaacaccaaaaatcaagttatcaaagcagagaggagggtgctaaaggagttgggattttgtgttcatgtcaagcatcctcataagatcattgttatgtatttacaagtcttagaatgtgaacgtaatcaaaccctggttcaaactgcctgggtagtccatgatggtaagtcatagaactctgccctctgcacttcagcccatgacctcaggatggcctgattggctaccctgctctccagccaatccagtgcaagctctcatccgagattcactgaagtggtccatatccatctggcagcatcttctagttctgtcggggtgtcaaaaggatttgtatatttgcttctagaatgtgtatagcatgaatactaccaaaggagacgacaaacttgcagcttaaaatgggcaccagttcccacactggcttaatttatataactgcttggctgtattgcgggaattacatgaatgacagtcttcgaaccaatgtgtttgttcgatttcaaccagagactatagcatgtgcttgcatctaccttgcagctagagcacttcagattccgttgccaactcgtccccattggtttcttctttttggtactacagaagaggaaatccaggaaatctgcatagaaacacttaggctttataccagaaaaaagccaaactatgaattactggaaaaagaagtagaaaaaagaaaagtagccttacaagaagccaaattaaaagcaaagggattgaatccggatggaactccagccctttcaaccctgggtggattttctccagcctccaagccatcatcaccaagagaagtaaaagctgaagagaaatcaccaatctccattaatgtgaagacagtcaaaaaagaacctgaggatagacaacaggcttccaaaagcccttacaatggtgtaagaaaagacagcaagagaagtagaaatagcagaagtgcaagtcgatcgaggtcaagaacacgatcacgttctagatcacatactccaagaagacactataataataggcggagtcgatctggaacatacagctcgagatcaagaagcaggtcccgcagtcacagtgaaagccctcgaagacatcataatcatggttctcctcaccttaaggccaagcataccagagatgatttaaaaagttcaaacagacatggtcataaaaggaaaaaatctcgttctcgatctcagagcaagtctcgggatcactcagatgcagccaagaaacacaggcatgaaaggggacatcatagggacaggcgtgaacgatctcgctcctttgagaggtcccataaaagcaagcaccatggtggcagtcgctcaggacatggcaggcacaggcgctgactttctcttcctttgagcctgcatcagttcttggttttgcctatctacagtgtgatgtatggactcaatcaaaaacattaaacgcaaactgattaggatttgatttcttgaaaccctctaggtctctagaacactgaggacagtttcttttgaaaagaactatgttaatttttttgcacattaaaatgccctagcagtatctaattaaaaaccatggtcaggttcaattgtactttattatagttgtgtattgtttattgctataagaactggagcgtgaattctgtaaaaatgtatcttatttttatacagataaaattgcagacactgttctatttaagtggttatttgtttaaatgatggtgaatactttcttaacactggtttgtctgcatgtgtaaagatttttacaaggaaataaaatacaaatcttgttttttctaaactgcttcaaataccttatttaaataaattattaaaaaggaaaattttaatagcaaaatggctgtactggttttctgacaaacttattctttcctccattagatggtagtttgagattattaaaatgcaattcttaactgcattgtgagctattgtaagtcttcactgtatatatggaaaaagtaaatgggagtcgcccaacaatgtgacattaaatgttatattttagcactaaaccaaa

SEQ ID NO: 9928 - protein, 320 aa, Homo sapiens
MGTSSHTGLIYITAWLYCGNYMNDSLRTNVFVRFQPETIACACIYLAARALQIPLPTRPHWFLLFGTTEEEIQEICIETLRLYTRKKPNYELLEKEVEKRKVALQEAKLKAKGLNPDGTPALSTLGGFSPASKPSSPREVKAEEKSPISINVKTVKKEPEDRQQASKSPYNGVRKDSKRSRNSRSASRSRSRTRSRSRSHTPRRHYNNRRSRSGTYSSRSRSRSRSHSESPRRHHNHGSPHLKAKHTRDDLKSSNRHGHKRKKSRSRSQSKSRDHSDAAKKHRHERGHHRDRRERSRSFERSHKSKHHGGSRSGHGRHRR

SEQ ID NO: 9929 - DNA, 3138 bp, Homo sapiens
ccagaacccggcggtcacgggaatatccgtcgcgccgagaacgctggttagtcttgtttcgggttccggctgcgttgggcttgcgtgcggctcgctaagactatggcgtccgggcctcattcgacagctactgctgccgcagccgcctcatcggccgccccaagcgcgggcggctccagctccgggacgacgaccacgacgacgaccacgacgggagggatcctgatcggcgatcgcctgtactcggaagtttcacttaccatcgaccactctctgattccggaggagaggctctcgcccaccccatccatgcaggatgggctcgacctgcccagtgagacggacttacgcatcctgggctgcgagctcatccaggccgccggcattctcctccggctgccgcaggtggcgatggcaacggggcaggtgttgtttcatcgttttttctactccaaatctttcgtcaaacacagtttcgagattgttgctatggcttgtattaatcttgcatcaaaaatcgaagaagcacctagaagaataagagatgtgattaatgtattccaccacctccgccagttaagaggaaaaagcgaccagctacatttaccaaagcctgggtgatgtggagtggtacatagagatgaagctgtcgtcatggcaacagactccaagccccctgatccttgatcagaactacattaacaccaaaaatcaagttatcaaagcagagaggagggtgctaaaggagttgggattttgtgttcatgtcaagcatcctcataagatcattgttatgtatttacaagtcttagaatgtgaacgtaatcaaaccctggttcaaactgcctggaattacatgaatgacagtcttcgaaccaatgtgtttgttcgatttcaaccagagactatagcatgtgcttgcatctaccttgcagctagagcacttcagattccgttgccaactcgtccccattggtttcttctttttggtactacagaagaggaaatccaggaaatctgcatagaaacacttaggctttataccagaaaaaagccaaactatgaattactggaaaaagaagtagaaaaaagaaaagtagccttacaagaagccaaattaaaagcaaagggattgaatccggatggaactccagccctttcaaccctgggtggattttctccagcctccaagccatcatcaccaagagaagtaaaagctgaagagaaatcaccaatctccattaatgtgaagacagtcaaaaaagaacctgaggatagacaacaggcttccaaaagcccttacaatggtgtaagaaaagacagcaagagaagtagaaatagcagaagtgcaagtcgatcgaggtcaagaacacgatcacgttctagatcacatactccaagaagacagtaagtaaatgttttcttagggaagcagtcttatttggagtttttaaaggttattgctttttctttaaaaattgaacatagattattttcaaagttaggttagaattaggcttttagtatgaggcaaattatgagaaatgagtttggagatgttctggacatacagtatcttaatggcattctgttatattttctcccatgttttttggagaagtgtaggagctacccacaaagtgcttgagggccatagtattgttcataatgtgaaaacttctttttttttttttaatttcagttagaaaatgtgtttcattaaccccttattaataaccaataatcaaattaaccagtcaatgaatcttctttagttaggcctgtaattagattgttagctcttcgtggctcttcaatgtcttttgaacatgtgggagatacttaataaaaagcatagctctaggacactataaaaattgctaattactccccttggaataaagacataagaacatttgcttaagatttaatatgttatatataggcttgggcatacagcagtgaggggtggggagattttgaaaagttctggtttgtcatttatgtagctggtagttttgttttgaacctgttatgagcaaccaccggaataatctgttccccatagaaactgaacctaaacttcaaatttttattatctaagctataataataggcggagtcgatctggaacatacagctcgagatcaagaagcaggtcccgcagtcacagtgaaagccctcgaagacatcataatcatggttctcctcaccttaaggccaagcataccagagatgatttaaaaagttcaaacagacatggtcataaaaggaaaaaatctcgttctcgatctcagagcaagtctcgggatcactcagatgcagccaagaaacacaggcatgaaaggggacatcatagggacaggcgtgaacgatctcgctcctttgagaggtcccataaaagcaagcaccatggtggcagtcgctcaggacatggcaggcacaggcgctgactttctcttcctttgagcctgcatcagttcttggttttgcctatctacagtgtgatgtatggactcaatcaaaaacattaaacgcaaactgattaggatttgatttcttgaaaccctctaggtctctagaacactgaggacagtttcttttgaaaagaactatgttaatttttttgcacattaaaatgccctagcagtatctaattaaaaaccatggtcaggttcaattgtactttattatagttgtgtattgtttattgctataagaactggagcgtgaattctgtaaaaatgtatcttatttttatacagataaaattgcagacactgttctatttaagtggttatttgtttaaatgatggtgaatactttcttaacactggtttgtctgcatgtgtaaagatttttacaaggaaataaaatacaaatcttgttttttctaaactgcttcaaataccttatttaaataaattattaaaaaggaaaattttaatagcaaaatggctgtactggttttctgacaaacttattctttcctccattagatggtagtttgagattattaaaatgcaattcttaactgcattgtgagctattgtaagtcttcactgtatatatggaaaaagtaaatgggagtcgcccaacaatgtgacattaaatgttatattttagcactaaaccaaa

SEQ ID NO: 9930 - protein, 256 aa, Homo sapiens
MKLSSWQQTPSPLILDQNYINTKNQVIKAERRVLKELGFCVHVKHPHKIIVMYLQVLECERNQTLVQTAWNYMNDSLRTNVFVRFQPETIACACIYLAARALQIPLPTRPHWFLLFGTTEEEIQEICIETLRLYTRKKPNYELLEKEVEKRKVALQEAKLKAKGLNPDGTPALSTLGGFSPASKPSSPREVKAEEKSPISINVKTVKKEPEDRQQASKSPYNGVRKDSKRSRNSRSASRSRSRTRSRSRSHTPRRQ

SEQ ID NO: 9931 - DNA, 2368 bp, Homo sapiens
ccagaacccggcggtcacgggaatatccgtcgcgccgagaacgctggttagtcttgtttcgggttccggctgcgttgggcttgcgtgcggctcgctaagactatggcgtccgggcctcattcgacagctactgctgccgcagccgcctcatcggccgccccaagcgcgggcggctccagctccgggacgacgaccacgacgacgaccacgacgggagggatcctgatcggcgatcgcctgtactcggaagtttcacttaccatcgaccactctctgattccggaggagaggctctcgcccaccccatccatgcaggatgggctcgacctgcccagtgagacggacttacgcatcctgggctgcgagctcatccaggccgccggcattctcctccggctgccgcaggtggcgatggcaacggggcaggtgttgtttcatcgttttttctactccaaatctttcgtcaaacacagtttcgagattgttgctatggcttgtattaatcttgcatcaaaaatcgaagaagcacctagaagaataagagatgtgattaatgtattccaccacctccgccagttaagaggaaaaaggactccaagccccctgatccttgatcagaactacattaacaccaaaaatcaagttatcaaagcagagaggagggtgctaaaggagttgggattttgtgttcatgtcaagcatcctcataagatcattgttatgtatttacaagtcttagaatgtgaacgtaatcaaaccctggttcaaactgcctggaattacatgaatgacagtcttcgaaccaatgtgtttgttcgatttcaaccagagactatagcatgtgcttgcatctaccttgcagctagagcacttcagattccgttgccaactcgtccccattggtttcttctttttggtactacagaagaggaaatccaggaaatctgcatagaaacacttaggctttataccagaaaaaagccaaactatgaattactggaaaaagaagtagaaaaaagaaaagtagccttacaagaagccaaattaaaagcaaagggattgaatccggatggaactccagccctttcaaccctgggtggattttctccagcctccaagccatcatcaccaagagaagtaaaagctgaagagaaatcaccaatctccattaatgtgaagacagtcaaaaaagaacctgaggatagacaacaggcttccaaaagcccttacaatggtgtaagaaaagacagcaagagaagtagaaatagcagaagtgcaagtcgatcgaggtcaagaacacgatcacgttctagatcacatactccaagaagacactataataataggcggagtcgatctggaacatacagctcgagatcaagaagcaggtcccgcagtcacagtgaaagccctcgaagacatcataatcatggttctcctcaccttaaggccaagcataccagagatgatttaaaaagttcaaacagacatggtcataaaaggaaaaaatctcgttctcgatctcagagcaagtctcgggatcactcagatgcagccaagaaacacaggcatgaaaggggacatcatagggacaggcgtgaacgatctcgctcctttgagaggtcccataaaagcaagcaccatggtggcagtcgctcaggacatggcaggcacaggcgctgactttctcttcctttgagcctgcatcagttcttggttttgcctatctacagtgtgatgtatggactcaatcaaaaacattaaacgcaaactgattaggatttgatttcttgaaaccctctaggtctctagaacactgaggacagtttcttttgaaaagaactatgttaatttttttgcacattaaaatgccctagcagtatctaattaaaaaccatggtcaggttcaattgtactttattatagttgtgtattgtttattgctataagaactggagcgtgaattctgtaaaaatgtatcttatttttatacagataaaattgcagacactgttctatttaagtggttatttgtttaaatgatggtgaatactttcttaacactggtttgtctgcatgtgtaaagatttttacaaggaaataaaatacaaatcttgttttttctaaactgcttcaaataccttatttaaataaattattaaaaaggaaaattttaatagcaaaatggctgtactggttttctgacaaacttattctttcctccattagatggtagtttgagattattaaaatgcaattcttaactgcattgtgagctattgtaagtcttcactgtatatatggaaaaagtaaatgggagtcgcccaacaatgtgacattaaatgttatattttagcactaaaccaaa

SEQ ID NO: 9932 - protein, 526 aa, Homo sapiens; identical to SEQ ID NO: 874

SEQ ID NO: 9933 - DNA, 2554 bp, Homo sapiens
tttcaggaattacatgaatgacagtcttcgaaccaatgtgtttgttcgatttcaaccagagactatagcatgtgcttgcatctaccttgcagctagagcacttcaggtaggtgtatatttcccattttgttctgtaggataaatcacacaaattttcggtggttccaatacagatttagcaaaaatttaatttaaaacattctgttcttatggtttagattccgttgccaactcgtccccattggtttcttctttttggtactacagaagaggaaatccaggaaatctgcatagaaacacttaggctttataccagaaaaaaggtattctctatttactcgtttgtgccaacatgctaagagtccaagctactctaaggaagaaatactaacttttttttcctccaacagccaaactatgaattactggaaaaagaagtagaaaaaagaaaagtagccttacaagaagccaaattaaaagcaaagggattgaatccggatggaactccagccctttcaaccctgggtggattttctccagcctccaagccatgtaagatgtatttagaattaaaatgacttgggggcactgaaagtgtgtctttattagagagcttttacatttgaaagttgcatagagaaaaatgatgttaggaaactgctgctatgttctctcatggcagtcaaccaacatggaagcggaagcatggtactttgagttacatttagaaacaacttttggccctctgttaaatccagtagttaacatgttgttattatatcttttaaaagcatcaccaagagaagtaaaagctgaagagaaatcaccaatctccattaatgtgaagacagtcaaaaaagaacctgaggatagacaacaggcttccaaaagcccttacaatggtgtaagaaaagacagcaagagaagtagaaatagcagaagtgcaagtcgatcgaggtcaagaacacgatcacgttctagatcacatactccaagaagacagtaagtaaatgttttcttagggaagcagtcttatttggagtttttaaaggttattgctttttctttaaaaattgaacatagattattttcaaagttaggttagaattaggcttttagtatgaggcaaattatgagaaatgagtttggagatgttctggacatacagtatcttaatggcattctgttatattttctcccatgttttttggagaagtgtaggagctacccacaaagtgcttgagggccatagtattgttcataatgtgaaaacttctttttttttttttaatttcagttagaaaatgtgtttcattaaccccttattaataaccaataatcaaattaaccagtcaatgaatcttctttagttaggcctgtaattagattgttagctcttcgtggctcttcaatgtcttttgaacatgtgggagatacttaataaaaagcatagctctaggacactataaaaattgctaattactccccttggaataaagacataagaacatttgcttaagatttaatatgttatatataggcttgggcatacagcagtgaggggtggggagattttgaaaagttctggtttgtcatttatgtagctggtagttttgttttgaacctgttatgagcaaccaccggaataatctgttccccatagaaactgaacctaaacttcaaatttttattatctaagctataataataggcggagtcgatctggaacatacagctcgagatcaagaagcaggtcccgcagtcacagtgaaagccctcgaagacatcataatcatggttctcctcaccttaaggccaagcataccagagatgatttaaaaagttcaaacagacatggtcataaaaggaaaaaatctcgttctcgatctcagagcaagtctcgggatcactcagatgcagccaagaaacacaggcatgaaaggggacatcatagggacaggcgtgaacgatctcgctcctttgagaggtcccataaaagcaagcaccatggtggcagtcgctcaggacatggcaggcacaggcgctgactttctcttcctttgagcctgcatcagttcttggttttgcctatctacagtgtgatgtatggactcaatcaaaaacattaaacgcaaactgattaggatttgatttcttgaaaccctctaggtctctagaacactgaggacagtttcttttgaaaagaactatgttaatttttttgcacattaaaatgccctagcagtatctaattaaaaaccatggtcaggttcaattgtactttattatagttgtgtattgtttattgctataagaactggagcgtgaattctgtaaaaatgtatcttatttttatacagataaaattgcagacactgttctatttaagtggttatttgtttaaatgatggtgaatactttcttaacactggtttgtctgcatgtgtaaagatttttacaaggaaataaaatacaaatcttgttttttctaaactgcttcaaataccttatttaaataaattattaaaaaggaaaattttaatagcaaaatggc

SEQ ID NO: 9934 - protein, 120 aa, Homo sapiens; identical to SEQ ID NO: 9920

SEQ ID NO: 9935 - DNA, 2217 bp, Homo sapiens
agtccatttaatttcagcttaaccttttaaatgatctgtaaaatttctttgatagtttaggaatgttgtggggagggttcattaataaaagttcagcaattttttaactgaaatagtttatctcttttacctagtcacaaaaaaggtatgtaaacaaggccattatatgtgtttattgctctttatttccctatctagattttctaagtatcttagctttcttaatataagtttaacttggtacttactgaaaatgcctttttacccctgttaacggtattttgagcttttgaaaagaacttggttgacactgcttttattgtggataaaggagagatggtcagtaattaatggcttgaagtattattggagtggtttatcatttctgaaactaatcgtgtcagaattgactttgaaaagcattgctttttacagaaatatattaactttttaggagtaatttctagtttggattgtaatatgaaataatttaaaagggcttcgctcatatataggaaaatcgcatatggtcctagtattaaattcttattgcttactgatttttttgagttaagagttgttatatgctagaatatgaggatgtgaatataaataagagaagaaaaaagaataaagtagattgagtctccaattttatgtaagcttcagaagaactggtttgtttacatgcaagcttatagttgaaatatttttcaggaattacatgaatgacagtcttcgaaccaatgtgtttgttcgatttcaaccagagactatagcatgtgcttgcatctaccttgcagctagagcacttcagattccgttgccaactcgtccccattggtttcttctttttggtactacagaagaggaaatccaggaaatctgcatagaaacacttaggctttataccagaaaaaaggtattctctatttactcgtttgtgccaacatgctaagagtccaagctactctaaggaagaaatactaacttttttttcctccaacagccaaactatgaattactggaaaaagaagtagaaaaaagaaaagtagccttacaagaagccaaattaaaagcaaagggattgaatccggatggaactccagccctttcaaccctgggtggattttctccagcctccaagccatcatcaccaagagaagtaaaagctgaagagaaatcaccaatctccattaatgtgaagacagtcaaaaaagaacctgaggatagacaacaggcttccaaaagcccttacaatggtgtaagaaaagacagcaagagaagtagaaatagcagaagtgcaagtcgatcgaggtcaagaacacgatcacgttctagatcacatactccaagaagacactataataataggcggagtcgatctggaacatacagctcgagatcaagaagcaggtcccgcagtcacagtgaaagccctcgaagacatcataatcatggttctcctcaccttaaggccaagcataccagagatgatttaaaaagttcaaacagacatggtcataaaaggaaaaaatctcgttctcgatctcagagcaagtctcgggatcactcagatgcagccaagaaacacaggcatgaaaggggacatcatagggacaggcgtgaacgatctcgctcctttgagaggtcccataaaagcaagcaccatggtggcagtcgctcaggacatggcaggcacaggcgctgactttctcttcctttgagcctgcatcagttcttggttttgcctatctacagtgtgatgtatggactcaatcaaaaacattaaacgcaaactgattaggatttgatttcttgaaaccctctaggtctctagaacactgaggacagtttcttttgaaaagaactatgttaatttttttgcacattaaaatgccctagcagtatctaattaaaaaccatggtcaggttcaattgtactttattatagttgtgtattgtttattgctataagaactggagcgtgaattctgtaaaaatgtatcttatttttatacagataaaattgcagacactgttctatttaagtggttatttgtttaaatgatggtgaatactttcttaacactggtttgtctgcatgtgtaaagatttttacaaggaaataaaatacaaatcttgttttttctaaactgcttcaaataccttatttaaataaattattaaaaaggaaaattttaatagcaaaatggc

SEQ ID NO: 9936 - protein, 77 aa, Homo sapiens; identical to SEQ ID NO: 9922

SEQ ID NO: 9937 - DNA, 2704 bp, Homo sapiens
agttcatttttgatagatttgttgtgcagccattatgaattaaatggtttattaggagtttgactaaatttttatttttagtgtgtatagcatgaatactaccaaaggagacgacaaacttgcagcttaaaatgggcaccagttcccacactggcttaatttatataactgcttggctgtattgcgggtaataatattagaagcaagaagcacttcatttttaaaagagatgttactataatattgcttaaatgctttagcacttggacttcttgagatgcagatgtgtgatttggagtgctggcttatttaaaggtcaagccaaggagtttgtggttcagccacaactactgtttcctaagactattgatgtgaaggacttagtgaagtaatttttatattctgggcttcccagcaagatgtcctttttatgactgccatgcttcttttggactcagtaaatatttgtaatgttagaaaagtctcattatttttataaaatgcatgacattttaagtatgtgttgcataaaatggattatagcagttctcatggtttaggatttttaagaaatagtccatttaatttcagcttaaccttttaaatgatctgtaaaatttctttgatagtttaggaatgttgtggggagggttcattaataaaagttcagcaattttttaactgaaatagtttatctcttttacctagtcacaaaaaaggtatgtaaacaaggccattatatgtgtttattgctctttatttccctatctagattttctaagtatcttagctttcttaatataagtttaacttggtacttactgaaaatgcctttttacccctgttaacggtattttgagcttttgaaaagaacttggttgacactgcttttattgtggataaaggagagatggtcagtaattaatggcttgaagtattattggagtggtttatcatttctgaaactaatcgtgtcagaattgactttgaaaagcattgctttttacagaaatatattaactttttaggagtaatttctagtttggattgtaatatgaaataatttaaaagggcttcgctcatatataggaaaatcgcatatggtcctagtattaaattcttattgcttactgatttttttgagttaagagttgttatatgctagaatatgaggatgtgaatataaataagagaagaaaaaagaataaagtagattgagtctccaattttatgtaagcttcagaagaactggtttgtttacatgcaagcttatagttgaaatatttttcaggaattacatgaatgacagtcttcgaaccaatgtgtttgttcgatttcaaccagagactatagcatgtgcttgcatctaccttgcagctagagcacttcagattccgttgccaactcgtccccattggtttcttctttttggtactacagaagaggaaatccaggaaatctgcatagaaacacttaggctttataccagaaaaaagccaaactatgaattactggaaaaagaagtagaaaaaagaaaagtagccttacaagaagccaaattaaaagcaaagggattgaatccggatggaactccagccctttcaaccctgggtggattttctccagcctccaagccatcatcaccaagagaagtaaaagctgaagagaaatcaccaatctccattaatgtgaagacagtcaaaaaagaacctgaggatagacaacaggcttccaaaagcccttacaatggtgtaagaaaagacagcaagagaagtagaaatagcagaagtgcaagtcgatcgaggtcaagaacacgatcacgttctagatcacatactccaagaagacactataataataggcggagtcgatctggaacatacagctcgagatcaagaagcaggtcccgcagtcacagtgaaagccctcgaagacatcataatcatggttctcctcaccttaaggccaagcataccagagatgatttaaaaagttcaaacagacatggtcataaaaggaaaaaatctcgttctcgatctcagagcaagtctcgggatcactcagatgcagccaagaaacacaggcatgaaaggggacatcatagggacaggcgtgaacgatctcgctcctttgagaggtcccataaaagcaagcaccatggtggcagtcgctcaggacatggcaggcacaggcgctgactttctcttcctttgagcctgcatcagttcttggttttgcctatctacagtgtgatgtatggactcaatcaaaaacattaaacgcaaactgattaggatttgatttcttgaaaccctctaggtctctagaacactgaggacagtttcttttgaaaagaactatgttaatttttttgcacattaaaatgccctagcagtatctaattaaaaaccatggtcaggttcaattgtactttattatagttgtgtattgtttattgctataagaactggagcgtgaattctgtaaaaatgtatcttatttttatacagataaaattgcagacactgttctatttaagtggttatttgtttaaatgatggtgaatactttcttaacactggtttgtctgcatgtgtaaagatttttacaaggaaataaaatacaaatcttgttttttctaaactgcttcaaataccttatttaaataaattattaaaaaggaaaattttaatagcaaaatggc

SEQ ID NO: 9938 - protein, 299 aa, Homo sapiens; identical to SEQ ID NO: 9924

SEQ ID NO: 9939 - DNA, 4696 bp, Homo sapiens
tttcttaaatctattttgatgtcattggcattttgacacaaaaacaaagaaaatggcatcattaagtctgatttgggactaaatagtagctataattcaaacatatttagcttctttagtgtaattgcaagaacaaatgaattatatcaccatttgaaggcagttcttaaagcaggttatcttaagaggtatagataatttttattaacaaatggagaaaaatgagacaactatgttttcataaaattacattttactagggattttgatgataccgtcttctgtctggattgcaaggggttaagagttaaaatggtgtgtgcagctgtaacactggagctattttatctcttaatgacagttaaggagagccattagataacacagccataagttaaaaagagtctgaagttggttttacttttttccaaatttcctgtgatgataaaacctgatcatagaccttaagatctttggaatatgtttatatgtatgtatgtatgtatgtatgtatgtatgtatgtatatatatggagagagagataggttgttttcatgagaattaagtttgacttattttccaaagagcaatttgtagcctactgtcctgataaaatggattcatcattacacgttaatattagaaagcagctcaatgaggccagctggtggcctcattcctcataggtgtgaggaatgaaaccgagggaaggccattttaagtaacagctgtcttttatcttgtcagcgctgccagtttttgtttagtaagcattccagtttctgtaataattttaaatggaagaaagtaaggaaaatgtatgataactgactttttactctgatgttaccataggggtaatgaagttcatcgcagattgttttctaaccttcggtgcatgtattgaaatagatttttgttttaaaaatatgagattacatttttctggatctggtgtgcattggggtagagaggatgactgtcttaaaaatagatcgtgtattctgcctagagcaaagactcttaagtcttttggctgaaaatgaactgagtatggacaaaaatattgaagtattctacttgtaaacttaccgtataatcagtgtcttgataaaatagtagtttttgttggttgaatctaagaatgtgttggacttgggtaaatttcagacatgaccaacaacaaaaaacaaaagcccaattccttaacctttcctgactgaaacttctcaggaagaaaccagttttgaattgtatgacataaataagattgtcttttattataagtttttaaactatgtaataaaacatttggggataacatcagttgaatgtgctacttttaaagcattaaaccactgacataagccttctgtattatagaaacttctgagttaccaaaatttagtctggtacagagcccttgaatatgttgtggttccctcattatggcccttcattcccttctgtgttaatagtaaagcatgttgcctaataactacaaccctgaccaaatttgggcctggatctcatgggtcacgtggagttttaaatacgatttttaatttacttgggtaattgagctgaatctttagttttcagattacttttttaaacagataggctcttagaacaaattattaaaaacataataccccattggaggggaatctggattaactacccactgttcccaccccccccaacttttgaaaaattttggccatatagaatgcatgaaaaatcagtatgatcttatgaggactttatagtactgtaaatcttaggagcactttagttgttttgtttgtttgtttgttttaccagtcaaatagcagtgggagattgtataccaactttagtgacactgatattagtaagttctgataacccactaccatcggaccagcctggagcacattactttggccagtggaaagtctcttggagagactttgaggtttgtgatgacaaatcatgctatcgttaaagttaaatacatatatatacacacctagaatataagcagaatggaaaagttggcagggatgaattcaagaacattagagtgaatttttttcattacagaattgttagttcctttaggaacttagtctcgtagatgtatatatttaattagcataacttggacagcacaagattaatgctttaacttgtttgcaggagtttaaaaagctggtttctgttgccaatagttggttggaagggaaaatggagatgccacaaataaaattttttggatgtgcaaaacagttttgattttatttcttacaaactataggactccaagccccctgatccttgatcagaactacattaacaccaaaaatcaagttatcaaagcagagaggagggtgctaaaggagttgggattttgtgttcatgtcaagcatcctcataaggtgagttgtagagtacagaaattgggttcgtaagtattaggacttttctaaaaattttattttatatgaatttatgtttctatctgagtgttaaccttggttttaaaaagcattcttttaaaggttcaggcttcatcgaaaaacattcttttggatgttgagatttatcagtaaaatgacagtcaaaaatgtaggttcaaatcttaaatcttaattgtgtgctcatagagaagttatttttgtttctgtggttaaagtcccagtttttccacctagaaaacagagatgtaaagttcctcattccaaggaataaatgtgtagctacaaaagtatctggcacacttatcatcatagtagaatgttctaagtgtgttggctgctcactgttaccattattggaaatttgtttctcccaacatctcttagctttcattatcaatataagccatagagtgagttacccgggtcaggactacctgggttagaaatgtaccttgggaaattaggtgaaataatctagcacggtgcccatcacatagtaaagtgccaatgaaaaatattcttttaattgccttttttcctgtacaattttgaaatatgcttctaaacataatttatataaaatctagtcatgtagcagttcacattagaatcttatgtacatttaaattggtctgtattatcgatgcacaattagaacttgagtctaacattttcaattacttttttcattgaactctactccgaaagaactaccagtatactgaattgagtttttttcccttgtccttcagatcattgttatgtatttacaagtcttagaatgtgaacgtaatcaaaccctggttcaaactgcctggaattacatgaatgacagtcttcgaaccaatgtgtttgttcgatttcaaccagagactatagcatgtgcttgcatctaccttgcagctagagcacttcagattccgttgccaactcgtccccattggtttcttctttttggtactacagaagaggaaatccaggaaatctgcatagaaacacttaggctttataccagaaaaaagccaaactatgaattactggaaaaagaagtagaaaaaagaaaagtagccttacaagaagccaaattaaaagcaaagggattgaatccggatggaactccagccctttcaaccctgggtggattttctccagcctccaagccatcatcaccaagagaagtaaaagctgaagagaaatcaccaatctccattaatgtgaagacagtcaaaaaagaacctgaggatagacaacaggcttccaaaagcccttacaatggtgtaagaaaagacagcaagagaagtagaaatagcagaagtgcaagtcgatcgaggtcaagaacacgatcacgttctagatcacatactccaagaagacactataataataggcggagtcgatctggaacatacagctcgagatcaagaagcaggtcccgcagtcacagtgaaagccctcgaagacatcataatcatggttctcctcaccttaaggccaagcataccagagatgatttaaaaagttcaaacagacatggtcataaaaggaaaaaatctcgttctcgatctcagagcaagtctcgggatcactcagatgcagccaagaaacacaggcatgaaaggggacatcatagggacaggcgtgaacgatctcgctcctttgagaggtcccataaaagcaagcaccatggtggcagtcgctcaggacatggcaggcacaggcgctgactttctcttcctttgagcctgcatcagttcttggttttgcctatctacagtgtgatgtatggactcaatcaaaaacattaaacgcaaactgattaggatttgatttcttgaaaccctctaggtctctagaacactgaggacagtttcttttgaaaagaactatgttaatttttttgcacattaaaatgccctagcagtatctaattaaaaaccatggtcaggttcaattgtactttattatagttgtgtattgtttattgctataagaactggagcgtgaattctgtaaaaatgtatcttatttttatacagataaaattgcagacactgttctatttaagtggttatttgtttaaatgatggtgaatactttcttaacactggtttgtctgcatgtgtaaagatttttacaaggaaataaaatacaaatcttgttttttctaaactgcttcaaataccttatttaaataaattattaaaaaggaaaattttaatagcaaaatggc

SEQ ID NO: 9940 - protein, 320 aa, Homo sapiens; identical to SEQ ID NO: 9926

SEQ ID NO: 9941 - DNA, 2497 bp, Homo sapiens
ccagaacccggcggtcacgggaatatccgtcgcgccgagaacgctggttagtcttgtttcgggttccggctgcgttgggcttgcgtgcggctcgctaagactatggcgtccgggcctcattcgacagctactgctgccgcagccgcctcatcggccgccccaagcgcgggcggctccagctccgggacgacgaccacgacgacgaccacgacgggagggatcctgatcggcgatcgcctgtactcggaagtttcacttaccatcgaccactctctgattccggaggagaggctctcgcccaccccatccatgcaggatgggctcgacctgcccagtgagacggacttacgcatcctgggctgcgagctcatccaggccgccggcattctcctccggctgccgcaggtggcgatggcaacggggcaggtgttgtttcatcgttttttctactccaaatctttcgtcaaacacagtttcgagattgttgctatggcttgtattaatcttgcatcaaaaatcgaagaagcacctagaagaataagagatgtgattaatgtattccaccacctccgccagttaagaggaaaaaggactccaagccccctgatccttgatcagaactacattaacaccaaaaatcaagttatcaaagcagagaggagggtgctaaaggagttgggattttgtgttcatgtcaagcatcctcataagatcattgttatgtatttacaagtcttagaatgtgaacgtaatcaaaccctggttcaaactgcctgggtagtccatgatggtaagtcatagaactctgccctctgcacttcagcccatgacctcaggatggcctgattggctaccctgctctccagccaatccagtgcaagctctcatccgagattcactgaagtggtccatatccatctggcagcatcttctagttctgtcggggtgtcaaaaggatttgtatatttgcttctagaatgtgtatagcatgaatactaccaaaggagacgacaaacttgcagcttaaaatgggcaccagttcccacactggcttaatttatataactgcttggctgtattgcgggaattacatgaatgacagtcttcgaaccaatgtgtttgttcgatttcaaccagagactatagcatgtgcttgcatctaccttgcagctagagcacttcagattccgttgccaactcgtccccattggtttcttctttttggtactacagaagaggaaatccaggaaatctgcatagaaacacttaggctttataccagaaaaaagccaaactatgaattactggaaaaagaagtagaaaaaagaaaagtagccttacaagaagccaaattaaaagcaaagggattgaatccggatggaactccagccctttcaaccctgggtggattttctccagcctccaagccatcatcaccaagagaagtaaaagctgaagagaaatcaccaatctccattaatgtgaagacagtcaaaaaagaacctgaggatagacaacaggcttccaaaagcccttacaatggtgtaagaaaagacagcaagagaagtagaaatagcagaagtgcaagtcgatcgaggtcaagaacacgatcacgttctagatcacatactccaagaagacactataataataggcggagtcgatctggaacatacagctcgagatcaagaagcaggtcccgcagtcacagtgaaagccctcgaagacatcataatcatggttctcctcaccttaaggccaagcataccagagatgatttaaaaagttcaaacagacatggtcataaaaggaaaaaatctcgttctcgatctcagagcaagtctcgggatcactcagatgcagccaagaaacacaggcatgaaaggggacatcatagggacaggcgtgaacgatctcgctcctttgagaggtcccataaaagcaagcaccatggtggcagtcgctcaggacatggcaggcacaggcgctgactttctcttcctttgagcctgcatcagttcttggttttgcctatctacagtgtgatgtatggactcaatcaaaaacattaaacgcaaactgattaggatttgatttcttgaaaccctctaggtctctagaacactgaggacagtttcttttgaaaagaactatgttaatttttttgcacattaaaatgccctagcagtatctaattaaaaaccatggtcaggttcaattgtactttattatagttgtgtattgtttattgctataagaactggagcgtgaattctgtaaaaatgtatcttatttttatacagataaaattgcagacactgttctatttaagtggttatttgtttaaatgatggtgaatactttcttaacactggtttgtctgcatgtgtaaagatttttacaaggaaataaaatacaaatcttgttttttctaaactgcttcaaataccttatttaaataaattattaaaaaggaaaattttaatagcaaaatggc

SEQ ID NO: 9942 - protein, 320 aa, Homo sapiens; identical to SEQ ID NO: 9928

SEQ ID NO: 9943 - DNA, 2959 bp, Homo sapiens
ccagaacccggcggtcacgggaatatccgtcgcgccgagaacgctggttagtcttgtttcgggttccggctgcgttgggcttgcgtgcggctcgctaagactatggcgtccgggcctcattcgacagctactgctgccgcagccgcctcatcggccgccccaagcgcgggcggctccagctccgggacgacgaccacgacgacgaccacgacgggagggatcctgatcggcgatcgcctgtactcggaagtttcacttaccatcgaccactctctgattccggaggagaggctctcgcccaccccatccatgcaggatgggctcgacctgcccagtgagacggacttacgcatcctgggctgcgagctcatccaggccgccggcattctcctccggctgccgcaggtggcgatggcaacggggcaggtgttgtttcatcgttttttctactccaaatctttcgtcaaacacagtttcgagattgttgctatggcttgtattaatcttgcatcaaaaatcgaagaagcacctagaagaataagagatgtgattaatgtattccaccacctccgccagttaagaggaaaaagcgaccagctacatttaccaaagcctgggtgatgtggagtggtacatagagatgaagctgtcgtcatggcaacagactccaagccccctgatccttgatcagaactacattaacaccaaaaatcaagttatcaaagcagagaggagggtgctaaaggagttgggattttgtgttcatgtcaagcatcctcataagatcattgttatgtatttacaagtcttagaatgtgaacgtaatcaaaccctggttcaaactgcctggaattacatgaatgacagtcttcgaaccaatgtgtttgttcgatttcaaccagagactatagcatgtgcttgcatctaccttgcagctagagcacttcagattccgttgccaactcgtccccattggtttcttctttttggtactacagaagaggaaatccaggaaatctgcatagaaacacttaggctttataccagaaaaaagccaaactatgaattactggaaaaagaagtagaaaaaagaaaagtagccttacaagaagccaaattaaaagcaaagggattgaatccggatggaactccagccctttcaaccctgggtggattttctccagcctccaagccatcatcaccaagagaagtaaaagctgaagagaaatcaccaatctccattaatgtgaagacagtcaaaaaagaacctgaggatagacaacaggcttccaaaagcccttacaatggtgtaagaaaagacagcaagagaagtagaaatagcagaagtgcaagtcgatcgaggtcaagaacacgatcacgttctagatcacatactccaagaagacagtaagtaaatgttttcttagggaagcagtcttatttggagtttttaaaggttattgctttttctttaaaaattgaacatagattattttcaaagttaggttagaattaggcttttagtatgaggcaaattatgagaaatgagtttggagatgttctggacatacagtatcttaatggcattctgttatattttctcccatgttttttggagaagtgtaggagctacccacaaagtgcttgagggccatagtattgttcataatgtgaaaacttctttttttttttttaatttcagttagaaaatgtgtttcattaaccccttattaataaccaataatcaaattaaccagtcaatgaatcttctttagttaggcctgtaattagattgttagctcttcgtggctcttcaatgtcttttgaacatgtgggagatacttaataaaaagcatagctctaggacactataaaaattgctaattactccccttggaataaagacataagaacatttgcttaagatttaatatgttatatataggcttgggcatacagcagtgaggggtggggagattttgaaaagttctggtttgtcatttatgtagctggtagttttgttttgaacctgttatgagcaaccaccggaataatctgttccccatagaaactgaacctaaacttcaaatttttattatctaagctataataataggcggagtcgatctggaacatacagctcgagatcaagaagcaggtcccgcagtcacagtgaaagccctcgaagacatcataatcatggttctcctcaccttaaggccaagcataccagagatgatttaaaaagttcaaacagacatggtcataaaaggaaaaaatctcgttctcgatctcagagcaagtctcgggatcactcagatgcagccaagaaacacaggcatgaaaggggacatcatagggacaggcgtgaacgatctcgctcctttgagaggtcccataaaagcaagcaccatggtggcagtcgctcaggacatggcaggcacaggcgctgactttctcttcctttgagcctgcatcagttcttggttttgcctatctacagtgtgatgtatggactcaatcaaaaacattaaacgcaaactgattaggatttgatttcttgaaaccctctaggtctctagaacactgaggacagtttcttttgaaaagaactatgttaatttttttgcacattaaaatgccctagcagtatctaattaaaaaccatggtcaggttcaattgtactttattatagttgtgtattgtttattgctataagaactggagcgtgaattctgtaaaaatgtatcttatttttatacagataaaattgcagacactgttctatttaagtggttatttgtttaaatgatggtgaatactttcttaacactggtttgtctgcatgtgtaaagatttttacaaggaaataaaatacaaatcttgttttttctaaactgcttcaaataccttatttaaataaattattaaaaaggaaaattttaatagcaaaatggc

SEQ ID NO: 9944 - protein, 256 aa, Homo sapiens; identical to SEQ ID NO: 9930

SEQ ID NO: 9945 - DNA, 2189 bp, Homo sapiens
ccagaacccggcggtcacgggaatatccgtcgcgccgagaacgctggttagtcttgtttcgggttccggctgcgttgggcttgcgtgcggctcgctaagactatggcgtccgggcctcattcgacagctactgctgccgcagccgcctcatcggccgccccaagcgcgggcggctccagctccgggacgacgaccacgacgacgaccacgacgggagggatcctgatcggcgatcgcctgtactcggaagtttcacttaccatcgaccactctctgattccggaggagaggctctcgcccaccccatccatgcaggatgggctcgacctgcccagtgagacggacttacgcatcctgggctgcgagctcatccaggccgccggcattctcctccggctgccgcaggtggcgatggcaacggggcaggtgttgtttcatcgttttttctactccaaatctttcgtcaaacacagtttcgagattgttgctatggcttgtattaatcttgcatcaaaaatcgaagaagcacctagaagaataagagatgtgattaatgtattccaccacctccgccagttaagaggaaaaaggactccaagccccctgatccttgatcagaactacattaacaccaaaaatcaagttatcaaagcagagaggagggtgctaaaggagttgggattttgtgttcatgtcaagcatcctcataagatcattgttatgtatttacaagtcttagaatgtgaacgtaatcaaaccctggttcaaactgcctggaattacatgaatgacagtcttcgaaccaatgtgtttgttcgatttcaaccagagactatagcatgtgcttgcatctaccttgcagctagagcacttcagattccgttgccaactcgtccccattggtttcttctttttggtactacagaagaggaaatccaggaaatctgcatagaaacacttaggctttataccagaaaaaagccaaactatgaattactggaaaaagaagtagaaaaaagaaaagtagccttacaagaagccaaattaaaagcaaagggattgaatccggatggaactccagccctttcaaccctgggtggattttctccagcctccaagccatcatcaccaagagaagtaaaagctgaagagaaatcaccaatctccattaatgtgaagacagtcaaaaaagaacctgaggatagacaacaggcttccaaaagcccttacaatggtgtaagaaaagacagcaagagaagtagaaatagcagaagtgcaagtcgatcgaggtcaagaacacgatcacgttctagatcacatactccaagaagacactataataataggcggagtcgatctggaacatacagctcgagatcaagaagcaggtcccgcagtcacagtgaaagccctcgaagacatcataatcatggttctcctcaccttaaggccaagcataccagagatgatttaaaaagttcaaacagacatggtcataaaaggaaaaaatctcgttctcgatctcagagcaagtctcgggatcactcagatgcagccaagaaacacaggcatgaaaggggacatcatagggacaggcgtgaacgatctcgctcctttgagaggtcccataaaagcaagcaccatggtggcagtcgctcaggacatggcaggcacaggcgctgactttctcttcctttgagcctgcatcagttcttggttttgcctatctacagtgtgatgtatggactcaatcaaaaacattaaacgcaaactgattaggatttgatttcttgaaaccctctaggtctctagaacactgaggacagtttcttttgaaaagaactatgttaatttttttgcacattaaaatgccctagcagtatctaattaaaaaccatggtcaggttcaattgtactttattatagttgtgtattgtttattgctataagaactggagcgtgaattctgtaaaaatgtatcttatttttatacagataaaattgcagacactgttctatttaagtggttatttgtttaaatgatggtgaatactttcttaacactggtttgtctgcatgtgtaaagatttttacaaggaaataaaatacaaatcttgttttttctaaactgcttcaaataccttatttaaataaattattaaaaaggaaaattttaatagcaaaatggc

SEQ ID NO: 9946 - protein, 526 aa, Homo sapiens; identical to SEQ ID NO: 874

SEQ ID NO: 9947 - DNA, 2490 bp, Homo sapiens
tttcaggaattacatgaatgacagtcttcgaaccaatgtgtttgttcgatttcaaccagagactatagcatgtgcttgcatctaccttgcagctagagcacttcaggtaggtgtatatttcccattttgttctgtaggataaatcacacaaattttcggtggttccaatacagatttagcaaaaatttaatttaaaacattctgttcttatggtttagattccgttgccaactcgtccccattggtttcttctttttggtactacagaagaggaaatccaggaaatctgcatagaaacacttaggctttataccagaaaaaaggtattctctatttactcgtttgtgccaacatgctaagagtccaagctactctaaggaagaaatactaacttttttttcctccaacagccaaactatgaattactggaaaaagaagtagaaaaaagaaaagtagccttacaagaagccaaattaaaagcaaagggattgaatccggatggaactccagccctttcaaccctgggtggattttctccagcctccaagccatgtaagatgtatttagaattaaaatgacttgggggcactgaaagtgtgtctttattagagagcttttacatttgaaagttgcatagagaaaaatgatgttaggaaactgctgctatgttctctcatggcagtcaaccaacatggaagcggaagcatggtactttgagttacatttagaaacaacttttggccctctgttaaatccagtagttaacatgttgttattatatcttttaaaagcatcaccaagagaagtaaaagctgaagagaaatcaccaatctccattaatgtgaagacagtcaaaaaagaacctgaggatagacaacaggcttccaaaagcccttacaatggtgtaagaaaagacagcaagagaagtagaaatagcagaagtgcaagtcgatcgaggtcaagaacacgatcacgttctagatcacatactccaagaagacagtaagtaaatgttttcttagggaagcagtcttatttggagtttttaaaggttattgctttttctttaaaaattgaacatagattattttcaaagttaggttagaattaggcttttagtatgaggcaaattatgagaaatgagtttggagatgttctggacatacagtatcttaatggcattctgttatattttctcccatgttttttggagaagtgtaggagctacccacaaagtgcttgagggccatagtattgttcataatgtgaaaacttctttttttttttttaatttcagttagaaaatgtgtttcattaaccccttattaataaccaataatcaaattaaccagtcaatgaatcttctttagttaggcctgtaattagattgttagctcttcgtggctcttcaatgtcttttgaacatgtgggagatacttaataaaaagcatagctctaggacactataaaaattgctaattactccccttggaataaagacataagaacatttgcttaagatttaatatgttatatataggcttgggcatacagcagtgaggggtggggagattttgaaaagttctggtttgtcatttatgtagctggtagttttgttttgaacctgttatgagcaaccaccggaataatctgttccccatagaaactgaacctaaacttcaaatttttattatctaagctataataataggcggagtcgatctggaacatacagctcgagatcaagaagcaggtcccgcagtcacagtgaaagccctcgaagacatcataatcatggttctcctcaccttaaggccaagcataccagagatgatttaaaaagttcaaacagacatggtcataaaaggaaaaaatctcgttctcgatctcagagcaagtctcgggatcactcagatgcagccaagaaacacaggcatgaaaggggacatcatagggacaggcgtgaacgatctcgctcctttgagaggtcccataaaagcaagcaccatggtggcagtcgctcaggacatggcaggcacaggcgctgactttctcttcctttgagcctgcatcagttcttggttttgcctatctacagtgtgatgtatggactcaatcaaaaacattaaacgcaaactgattaggatttgatttcttgaaaccctctaggtctctagaacactgaggacagtttcttttgaaaagaactatgttaatttttttgcacattaaaatgccctagcagtatctaattaaaaaccatggtcaggttcaattgtactttattatagttgtgtattgtttattgctataagaactggagcgtgaattctgtaaaaatgtatcttatttttatacagataaaattgcagacactgttctatttaagtggttatttgtttaaatgatggtgaatactttcttaacactggtttgtctgcatgtgtaaagatttttacaaggaaataaaatacaaatcttgttttttct

SEQ ID NO: 9948 - protein, 120 aa, Homo sapiens; identical to SEQ ID NO: 9920

SEQ ID NO: 9949 - DNA, 2153 bp, Homo sapiens
agtccatttaatttcagcttaaccttttaaatgatctgtaaaatttctttgatagtttaggaatgttgtggggagggttcattaataaaagttcagcaattttttaactgaaatagtttatctcttttacctagtcacaaaaaaggtatgtaaacaaggccattatatgtgtttattgctctttatttccctatctagattttctaagtatcttagctttcttaatataagtttaacttggtacttactgaaaatgcctttttacccctgttaacggtattttgagcttttgaaaagaacttggttgacactgcttttattgtggataaaggagagatggtcagtaattaatggcttgaagtattattggagtggtttatcatttctgaaactaatcgtgtcagaattgactttgaaaagcattgctttttacagaaatatattaactttttaggagtaatttctagtttggattgtaatatgaaataatttaaaagggcttcgctcatatataggaaaatcgcatatggtcctagtattaaattcttattgcttactgatttttttgagttaagagttgttatatgctagaatatgaggatgtgaatataaataagagaagaaaaaagaataaagtagattgagtctccaattttatgtaagcttcagaagaactggtttgtttacatgcaagcttatagttgaaatatttttcaggaattacatgaatgacagtcttcgaaccaatgtgtttgttcgatttcaaccagagactatagcatgtgcttgcatctaccttgcagctagagcacttcagattccgttgccaactcgtccccattggtttcttctttttggtactacagaagaggaaatccaggaaatctgcatagaaacacttaggctttataccagaaaaaaggtattctctatttactcgtttgtgccaacatgctaagagtccaagctactctaaggaagaaatactaacttttttttcctccaacagccaaactatgaattactggaaaaagaagtagaaaaaagaaaagtagccttacaagaagccaaattaaaagcaaagggattgaatccggatggaactccagccctttcaaccctgggtggattttctccagcctccaagccatcatcaccaagagaagtaaaagctgaagagaaatcaccaatctccattaatgtgaagacagtcaaaaaagaacctgaggatagacaacaggcttccaaaagcccttacaatggtgtaagaaaagacagcaagagaagtagaaatagcagaagtgcaagtcgatcgaggtcaagaacacgatcacgttctagatcacatactccaagaagacactataataataggcggagtcgatctggaacatacagctcgagatcaagaagcaggtcccgcagtcacagtgaaagccctcgaagacatcataatcatggttctcctcaccttaaggccaagcataccagagatgatttaaaaagttcaaacagacatggtcataaaaggaaaaaatctcgttctcgatctcagagcaagtctcgggatcactcagatgcagccaagaaacacaggcatgaaaggggacatcatagggacaggcgtgaacgatctcgctcctttgagaggtcccataaaagcaagcaccatggtggcagtcgctcaggacatggcaggcacaggcgctgactttctcttcctttgagcctgcatcagttcttggttttgcctatctacagtgtgatgtatggactcaatcaaaaacattaaacgcaaactgattaggatttgatttcttgaaaccctctaggtctctagaacactgaggacagtttcttttgaaaagaactatgttaatttttttgcacattaaaatgccctagcagtatctaattaaaaaccatggtcaggttcaattgtactttattatagttgtgtattgtttattgctataagaactggagcgtgaattctgtaaaaatgtatcttatttttatacagataaaattgcagacactgttctatttaagtggttatttgtttaaatgatggtgaatactttcttaacactggtttgtctgcatgtgtaaagatttttacaaggaaataaaatacaaatcttgttttttct

SEQ ID NO: 9950 - protein, 77 aa, Homo sapiens; identical to SEQ ID NO: 9922

SEQ ID NO: 9951 - DNA, 4029 bp, Homo sapiens
aaatgacagtcaaaaatgtaggttcaaatcttaaatcttaattgtgtgctcatagagaagttatttttgtttctgtggttaaagtcccagtttttccacctagaaaacagagatgtaaagttcctcattccaaggaataaatgtgtagctacaaaagtatctggcacacttatcatcatagtagaatgttctaagtgtgttggctgctcactgttaccattattggaaatttgtttctcccaacatctcttagctttcattatcaatataagccatagagtgagttacccgggtcaggactacctgggttagaaatgtaccttgggaaattaggtgaaataatctagcacggtgcccatcacatagtaaagtgccaatgaaaaatattcttttaattgccttttttcctgtacaattttgaaatatgcttctaaacataatttatataaaatctagtcatgtagcagttcacattagaatcttatgtacatttaaattggtctgtattatcgatgcacaattagaacttgagtctaacattttcaattacttttttcattgaactctactccgaaagaactaccagtatactgaattgagtttttttcccttgtccttcagatcattgttatgtatttacaagtcttagaatgtgaacgtaatcaaaccctggttcaaactgcctggtaagtcacttttttagatttctttcctagccaggaaaacagaagcagaaataaagtaagtttcgttttccctttccaaaataatgagataagtttgtttggggcttttcgttgtttttttgttttgtttttttaaccaaaaggtaaataatgcttatttctgcttcctgttttcttggcttgactaattacttttaatggagaactcaatttaactttgttcttttttctactctttaattaaagggtagtccatgatggtaagtcatagaactctgccctctgcacttcagcccatgacctcaggatggcctgattggctaccctgctctccagccaatccagtgcaagctctcatccgagattcactgaagtggtccatatccatctggcagcatcttctagttctgtcggggtgtcaaaaggatttgtatatttgcttctagaagtaactatttgacatgcctatgtatttaatgtatacttgtaactatcaaaatgaatagttcatttttgatagatttgttgtgcagccattatgaattaaatggtttattaggagtttgactaaatttttatttttagtgtgtatagcatgaatactaccaaaggagacgacaaacttgcagcttaaaatgggcaccagttcccacactggcttaatttatataactgcttggctgtattgcgggtaataatattagaagcaagaagcacttcatttttaaaagagatgttactataatattgcttaaatgctttagcacttggacttcttgagatgcagatgtgtgatttggagtgctggcttatttaaaggtcaagccaaggagtttgtggttcagccacaactactgtttcctaagactattgatgtgaaggacttagtgaagtaatttttatattctgggcttcccagcaagatgtcctttttatgactgccatgcttcttttggactcagtaaatatttgtaatgttagaaaagtctcattatttttataaaatgcatgacattttaagtatgtgttgcataaaatggattatagcagttctcatggtttaggatttttaagaaatagtccatttaatttcagcttaaccttttaaatgatctgtaaaatttctttgatagtttaggaatgttgtggggagggttcattaataaaagttcagcaattttttaactgaaatagtttatctcttttacctagtcacaaaaaaggtatgtaaacaaggccattatatgtgtttattgctctttatttccctatctagattttctaagtatcttagctttcttaatataagtttaacttggtacttactgaaaatgcctttttacccctgttaacggtattttgagcttttgaaaagaacttggttgacactgcttttattgtggataaaggagagatggtcagtaattaatggcttgaagtattattggagtggtttatcatttctgaaactaatcgtgtcagaattgactttgaaaagcattgctttttacagaaatatattaactttttaggagtaatttctagtttggattgtaatatgaaataatttaaaagggcttcgctcatatataggaaaatcgcatatggtcctagtattaaattcttattgcttactgatttttttgagttaagagttgttatatgctagaatatgaggatgtgaatataaataagagaagaaaaaagaataaagtagattgagtctccaattttatgtaagcttcagaagaactggtttgtttacatgcaagcttatagttgaaatatttttcaggaattacatgaatgacagtcttcgaaccaatgtgtttgttcgatttcaaccagagactatagcatgtgcttgcatctaccttgcagctagagcacttcaggtaggtgtatatttcccattttgttctgtaggataaatcacacaaattttcggtggttccaatacagatttagcaaaaatttaatttaaaacattctgttcttatggtttagattccgttgccaactcgtccccattggtttcttctttttggtactacagaagaggaaatccaggaaatctgcatagaaacacttaggctttataccagaaaaaaggtattctctatttactcgtttgtgccaacatgctaagagtccaagctactctaaggaagaaatactaacttttttttcctccaacagccaaactatgaattactggaaaaagaagtagaaaaaagaaaagtagccttacaagaagccaaattaaaagcaaagggattgaatccggatggaactccagccctttcaaccctgggtggattttctccagcctccaagccatcatcaccaagagaagtaaaagctgaagagaaatcaccaatctccattaatgtgaagacagtcaaaaaagaacctgaggatagacaacaggcttccaaaagcccttacaatggtgtaagaaaagacagcaagagaagtagaaatagcagaagtgcaagtcgatcgaggtcaagaacacgatcacgttctagatcacatactccaagaagacactataataataggcggagtcgatctggaacatacagctcgagatcaagaagcaggtcccgcagtcacagtgaaagccctcgaagacatcataatcatggttctcctcaccttaaggccaagcataccagagatgatttaaaaagttcaaacagacatggtcataaaaggaaaaaatctcgttctcgatctcagagcaagtctcgggatcactcagatgcagccaagaaacacaggcatgaaaggggacatcatagggacaggcgtgaacgatctcgctcctttgagaggtcccataaaagcaagcaccatggtggcagtcgctcaggacatggcaggcacaggcgctgactttctcttcctttgagcctgcatcagttcttggttttgcctatctacagtgtgatgtatggactcaatcaaaaacattaaacgcaaactgattaggatttgatttcttgaaaccctctaggtctctagaacactgaggacagtttcttttgaaaagaactatgttaatttttttgcacattaaaatgccctagcagtatctaattaaaaaccatggtcaggttcaattgtactttattatagttgtgtattgtttattgctataagaactggagcgtgaattctgtaaaaatgtatcttatttttatacagataaaattgcagacactgttctatttaagtggttatttgtttaaatgatggtgaatactttcttaacactggtttgtctgcatgtgtaaagatttttacaaggaaataaaatacaaatcttgttttttct

SEQ ID NO: 9952 - protein, 69 aa, Homo sapiens [sequence omitted]

SEQ ID NO: 9953 - DNA, 5122 bp, Homo sapiens
aaaacatttggggataacatcagttgaatgtgctacttttaaagcattaaaccactgacataagccttctgtattatagaaacttctgagttaccaaaatttagtctggtacagagcccttgaatatgttgtggttccctcattatggcccttcattcccttctgtgttaatagtaaagcatgttgcctaataactacaaccctgaccaaatttgggcctggatctcatgggtcacgtggagttttaaatacgatttttaatttacttgggtaattgagctgaatctttagttttcagattacttttttaaacagataggctcttagaacaaattattaaaaacataataccccattggaggggaatctggattaactacccactgttcccaccccccccaacttttgaaaaattttggccatatagaatgcatgaaaaatcagtatgatcttatgaggactttatagtactgtaaatcttaggagcactttagttgttttgtttgtttgtttgttttaccagtcaaatagcagtgggagattgtataccaactttagtgacactgatattagtaagttctgataacccactaccatcggaccagcctggagcacattactttggccagtggaaagtctcttggagagactttgaggtttgtgatgacaaatcatgctatcgttaaagttaaatacatatatatacacacctagaatataagcagaatggaaaagttggcagggatgaattcaagaacattagagtgaatttttttcattacagaattgttagttcctttaggaacttagtctcgtagatgtatatatttaattagcataacttggacagcacaagattaatgctttaacttgtttgcaggagtttaaaaagctggtttctgttgccaatagttggttggaagggaaaatggagatgccacaaataaaattttttggatgtgcaaaacagttttgattttatttcttacaaactataggactccaagccccctgatccttgatcagaactacattaacaccaaaaatcaagttatcaaagcagagaggagggtgctaaaggagttgggattttgtgttcatgtcaagcatcctcataaggtgagttgtagagtacagaaattgggttcgtaagtattaggacttttctaaaaattttattttatatgaatttatgtttctatctgagtgttaaccttggttttaaaaagcattcttttaaaggttcaggcttcatcgaaaaacattcttttggatgttgagatttatcagtaaaatgacagtcaaaaatgtaggttcaaatcttaaatcttaattgtgtgctcatagagaagttatttttgtttctgtggttaaagtcccagtttttccacctagaaaacagagatgtaaagttcctcattccaaggaataaatgtgtagctacaaaagtatctggcacacttatcatcatagtagaatgttctaagtgtgttggctgctcactgttaccattattggaaatttgtttctcccaacatctcttagctttcattatcaatataagccatagagtgagttacccgggtcaggactacctgggttagaaatgtaccttgggaaattaggtgaaataatctagcacggtgcccatcacatagtaaagtgccaatgaaaaatattcttttaattgccttttttcctgtacaattttgaaatatgcttctaaacataatttatataaaatctagtcatgtagcagttcacattagaatcttatgtacatttaaattggtctgtattatcgatgcacaattagaacttgagtctaacattttcaattacttttttcattgaactctactccgaaagaactaccagtatactgaattgagtttttttcccttgtccttcagatcattgttatgtatttacaagtcttagaatgtgaacgtaatcaaaccctggttcaaactgcctggtaagtcacttttttagatttctttcctagccaggaaaacagaagcagaaataaagtaagtttcgttttccctttccaaaataatgagataagtttgtttggggcttttcgttgtttttttgttttgtttttttaaccaaaaggtaaataatgcttatttctgcttcctgttttcttggcttgactaattacttttaatggagaactcaatttaactttgttcttttttctactctttaattaaagggtagtccatgatggtaagtcatagaactctgccctctgcacttcagcccatgacctcaggatggcctgattggctaccctgctctccagccaatccagtgcaagctctcatccgagattcactgaagtggtccatatccatctggcagcatcttctagttctgtcggggtgtcaaaaggatttgtatatttgcttctagaagtaactatttgacatgcctatgtatttaatgtatacttgtaactatcaaaatgaatagttcatttttgatagatttgttgtgcagccattatgaattaaatggtttattaggagtttgactaaatttttatttttagtgtgtatagcatgaatactaccaaaggagacgacaaacttgcagcttaaaatgggcaccagttcccacactggcttaatttatataactgcttggctgtattgcgggtaataatattagaagcaagaagcacttcatttttaaaagagatgttactataatattgcttaaatgctttagcacttggacttcttgagatgcagatgtgtgatttggagtgctggcttatttaaaggtcaagccaaggagtttgtggttcagccacaactactgtttcctaagactattgatgtgaaggacttagtgaagtaatttttatattctgggcttcccagcaagatgtcctttttatgactgccatgcttcttttggactcagtaaatatttgtaatgttagaaaagtctcattatttttataaaatgcatgacattttaagtatgtgttgcataaaatggattatagcagttctcatggtttaggatttttaagaaatagtccatttaatttcagcttaaccttttaaatgatctgtaaaatttctttgatagtttaggaatgttgtggggagggttcattaataaaagttcagcaattttttaactgaaatagtttatctcttttacctagtcacaaaaaaggtatgtaaacaaggccattatatgtgtttattgctctttatttccctatctagattttctaagtatcttagctttcttaatataagtttaacttggtacttactgaaaatgcctttttacccctgttaacggtattttgagcttttgaaaagaacttggttgacactgcttttattgtggataaaggagagatggtcagtaattaatggcttgaagtattattggagtggtttatcatttctgaaactaatcgtgtcagaattgactttgaaaagcattgctttttacagaaatatattaactttttaggagtaatttctagtttggattgtaatatgaaataatttaaaagggcttcgctcatatataggaaaatcgcatatggtcctagtattaaattcttattgcttactgatttttttgagttaagagttgttatatgctagaatatgaggatgtgaatataaataagagaagaaaaaagaataaagtagattgagtctccaattttatgtaagcttcagaagaactggtttgtttacatgcaagcttatagttgaaatatttttcaggaattacatgaatgacagtcttcgaaccaatgtgtttgttcgatttcaaccagagactatagcatgtgcttgcatctaccttgcagctagagcacttcagattccgttgccaactcgtccccattggtttcttctttttggtactacagaagaggaaatccaggaaatctgcatagaaacacttaggctttataccagaaaaaagccaaactatgaattactggaaaaagaagtagaaaaaagaaaagtagccttacaagaagccaaattaaaagcaaagggattgaatccggatggaactccagccctttcaaccctgggtggattttctccagcctccaagccatcatcaccaagagaagtaaaagctgaagagaaatcaccaatctccattaatgtgaagacagtcaaaaaagaacctgaggatagacaacaggcttccaaaagcccttacaatggtgtaagaaaagacagcaagagaagtagaaatagcagaagtgcaagtcgatcgaggtcaagaacacgatcacgttctagatcacatactccaagaagacactataataataggcggagtcgatctggaacatacagctcgagatcaagaagcaggtcccgcagtcacagtgaaagccctcgaagacatcataatcatggttctcctcaccttaaggccaagcataccagagatgatttaaaaagttcaaacagacatggtcataaaaggaaaaaatctcgttctcgatctcagagcaagtctcgggatcactcagatgcagccaagaaacacaggcatgaaaggggacatcatagggacaggcgtgaacgatctcgctcctttgagaggtcccataaaagcaagcaccatggtggcagtcgctcaggacatggcaggcacaggcgctgactttctcttcctttgagcctgcatcagttcttggttttgcctatctacagtgtgatgtatggactcaatcaaaaacattaaacgcaaactgattaggatttgatttcttgaaaccctctaggtctctagaacactgaggacagtttcttttgaaaagaactatgttaatttttttgcacattaaaatgccctagcagtatctaattaaaaaccatggtcaggttcaattgtactttattatagttgtgtattgtttattgctataagaactggagcgtgaattctgtaaaaatgtatcttatttttatacagataaaattgcagacactgttctatttaagtggttatttgtttaaatgatggtgaatactttcttaacactggtttgtctgcatgtgtaaagatttttacaaggaaataaaatacaaatcttgttttttct

SEQ ID NO: 9954 - protein, 299 aa, Homo sapiens; identical to SEQ ID NO: 9924

SEQ ID NO: 9955 - DNA, 2433 bp, Homo sapiens
ccagaacccggcggtcacgggaatatccgtcgcgccgagaacgctggttagtcttgtttcgggttccggctgcgttgggcttgcgtgcggctcgctaagactatggcgtccgggcctcattcgacagctactgctgccgcagccgcctcatcggccgccccaagcgcgggcggctccagctccgggacgacgaccacgacgacgaccacgacgggagggatcctgatcggcgatcgcctgtactcggaagtttcacttaccatcgaccactctctgattccggaggagaggctctcgcccaccccatccatgcaggatgggctcgacctgcccagtgagacggacttacgcatcctgggctgcgagctcatccaggccgccggcattctcctccggctgccgcaggtggcgatggcaacggggcaggtgttgtttcatcgttttttctactccaaatctttcgtcaaacacagtttcgagattgttgctatggcttgtattaatcttgcatcaaaaatcgaagaagcacctagaagaataagagatgtgattaatgtattccaccacctccgccagttaagaggaaaaaggactccaagccccctgatccttgatcagaactacattaacaccaaaaatcaagttatcaaagcagagaggagggtgctaaaggagttgggattttgtgttcatgtcaagcatcctcataagatcattgttatgtatttacaagtcttagaatgtgaacgtaatcaaaccctggttcaaactgcctgggtagtccatgatggtaagtcatagaactctgccctctgcacttcagcccatgacctcaggatggcctgattggctaccctgctctccagccaatccagtgcaagctctcatccgagattcactgaagtggtccatatccatctggcagcatcttctagttctgtcggggtgtcaaaaggatttgtatatttgcttctagaatgtgtatagcatgaatactaccaaaggagacgacaaacttgcagcttaaaatgggcaccagttcccacactggcttaatttatataactgcttggctgtattgcgggaattacatgaatgacagtcttcgaaccaatgtgtttgttcgatttcaaccagagactatagcatgtgcttgcatctaccttgcagctagagcacttcagattccgttgccaactcgtccccattggtttcttctttttggtactacagaagaggaaatccaggaaatctgcatagaaacacttaggctttataccagaaaaaagccaaactatgaattactggaaaaagaagtagaaaaaagaaaagtagccttacaagaagccaaattaaaagcaaagggattgaatccggatggaactccagccctttcaaccctgggtggattttctccagcctccaagccatcatcaccaagagaagtaaaagctgaagagaaatcaccaatctccattaatgtgaagacagtcaaaaaagaacctgaggatagacaacaggcttccaaaagcccttacaatggtgtaagaaaagacagcaagagaagtagaaatagcagaagtgcaagtcgatcgaggtcaagaacacgatcacgttctagatcacatactccaagaagacactataataataggcggagtcgatctggaacatacagctcgagatcaagaagcaggtcccgcagtcacagtgaaagccctcgaagacatcataatcatggttctcctcaccttaaggccaagcataccagagatgatttaaaaagttcaaacagacatggtcataaaaggaaaaaatctcgttctcgatctcagagcaagtctcgggatcactcagatgcagccaagaaacacaggcatgaaaggggacatcatagggacaggcgtgaacgatctcgctcctttgagaggtcccataaaagcaagcaccatggtggcagtcgctcaggacatggcaggcacaggcgctgactttctcttcctttgagcctgcatcagttcttggttttgcctatctacagtgtgatgtatggactcaatcaaaaacattaaacgcaaactgattaggatttgatttcttgaaaccctctaggtctctagaacactgaggacagtttcttttgaaaagaactatgttaatttttttgcacattaaaatgccctagcagtatctaattaaaaaccatggtcaggttcaattgtactttattatagttgtgtattgtttattgctataagaactggagcgtgaattctgtaaaaatgtatcttatttttatacagataaaattgcagacactgttctatttaagtggttatttgtttaaatgatggtgaatactttcttaacactggtttgtctgcatgtgtaaagatttttacaaggaaataaaatacaaatcttgttttttct

SEQ ID NO: 9956 - protein, 320 aa, Homo sapiens; identical to SEQ ID NO: 9928

SEQ ID NO: 9957 - DNA, 2895 bp, Homo sapiens
ccagaacccggcggtcacgggaatatccgtcgcgccgagaacgctggttagtcttgtttcgggttccggctgcgttgggcttgcgtgcggctcgctaagactatggcgtccgggcctcattcgacagctactgctgccgcagccgcctcatcggccgccccaagcgcgggcggctccagctccgggacgacgaccacgacgacgaccacgacgggagggatcctgatcggcgatcgcctgtactcggaagtttcacttaccatcgaccactctctgattccggaggagaggctctcgcccaccccatccatgcaggatgggctcgacctgcccagtgagacggacttacgcatcctgggctgcgagctcatccaggccgccggcattctcctccggctgccgcaggtggcgatggcaacggggcaggtgttgtttcatcgttttttctactccaaatctttcgtcaaacacagtttcgagattgttgctatggcttgtattaatcttgcatcaaaaatcgaagaagcacctagaagaataagagatgtgattaatgtattccaccacctccgccagttaagaggaaaaagcgaccagctacatttaccaaagcctgggtgatgtggagtggtacatagagatgaagctgtcgtcatggcaacagactccaagccccctgatccttgatcagaactacattaacaccaaaaatcaagttatcaaagcagagaggagggtgctaaaggagttgggattttgtgttcatgtcaagcatcctcataagatcattgttatgtatttacaagtcttagaatgtgaacgtaatcaaaccctggttcaaactgcctggaattacatgaatgacagtcttcgaaccaatgtgtttgttcgatttcaaccagagactatagcatgtgcttgcatctaccttgcagctagagcacttcagattccgttgccaactcgtccccattggtttcttctttttggtactacagaagaggaaatccaggaaatctgcatagaaacacttaggctttataccagaaaaaagccaaactatgaattactggaaaaagaagtagaaaaaagaaaagtagccttacaagaagccaaattaaaagcaaagggattgaatccggatggaactccagccctttcaaccctgggtggattttctccagcctccaagccatcatcaccaagagaagtaaaagctgaagagaaatcaccaatctccattaatgtgaagacagtcaaaaaagaacctgaggatagacaacaggcttccaaaagcccttacaatggtgtaagaaaagacagcaagagaagtagaaatagcagaagtgcaagtcgatcgaggtcaagaacacgatcacgttctagatcacatactccaagaagacagtaagtaaatgttttcttagggaagcagtcttatttggagtttttaaaggttattgctttttctttaaaaattgaacatagattattttcaaagttaggttagaattaggcttttagtatgaggcaaattatgagaaatgagtttggagatgttctggacatacagtatcttaatggcattctgttatattttctcccatgttttttggagaagtgtaggagctacccacaaagtgcttgagggccatagtattgttcataatgtgaaaacttctttttttttttttaatttcagttagaaaatgtgtttcattaaccccttattaataaccaataatcaaattaaccagtcaatgaatcttctttagttaggcctgtaattagattgttagctcttcgtggctcttcaatgtcttttgaacatgtgggagatacttaataaaaagcatagctctaggacactataaaaattgctaattactccccttggaataaagacataagaacatttgcttaagatttaatatgttatatataggcttgggcatacagcagtgaggggtggggagattttgaaaagttctggtttgtcatttatgtagctggtagttttgttttgaacctgttatgagcaaccaccggaataatctgttccccatagaaactgaacctaaacttcaaatttttattatctaagctataataataggcggagtcgatctggaacatacagctcgagatcaagaagcaggtcccgcagtcacagtgaaagccctcgaagacatcataatcatggttctcctcaccttaaggccaagcataccagagatgatttaaaaagttcaaacagacatggtcataaaaggaaaaaatctcgttctcgatctcagagcaagtctcgggatcactcagatgcagccaagaaacacaggcatgaaaggggacatcatagggacaggcgtgaacgatctcgctcctttgagaggtcccataaaagcaagcaccatggtggcagtcgctcaggacatggcaggcacaggcgctgactttctcttcctttgagcctgcatcagttcttggttttgcctatctacagtgtgatgtatggactcaatcaaaaacattaaacgcaaactgattaggatttgatttcttgaaaccctctaggtctctagaacactgaggacagtttcttttgaaaagaactatgttaatttttttgcacattaaaatgccctagcagtatctaattaaaaaccatggtcaggttcaattgtactttattatagttgtgtattgtttattgctataagaactggagcgtgaattctgtaaaaatgtatcttatttttatacagataaaattgcagacactgttctatttaagtggttatttgtttaaatgatggtgaatactttcttaacactggtttgtctgcatgtgtaaagatttttacaaggaaataaaatacaaatcttgttttttct

SEQ ID NO: 9958 - protein, 256 aa, Homo sapiens; identical to SEQ ID NO: 9930

SEQ ID NO: 9959 - DNA, 2400 bp, Homo sapiens
ccagaacccggcggtcacgggaatatccgtcgcgccgagaacgctggttagtcttgtttcgggttccggctgcgttgggcttgcgtgcggctcgctaagactatggcgtccgggcctcattcgacagctactgctgccgcagccgcctcatcggccgccccaagcgcgggcggctccagctccgggacgacgaccacgacgacgaccacgacgggagggatcctgatcggcgatcgcctgtactcggaagtttcacttaccatcgaccactctctgattccggaggagaggctctcgcccaccccatccatgcaggatgggctcgacctgcccagtgagacggacttacgcatcctgggctgcgagctcatccaggccgccggcattctcctccggctgccgcaggtggcgatggcaacggggcaggtgttgtttcatcgttttttctactccaaatctttcgtcaaacacagtttcgagattgttgctatggcttgtattaatcttgcatcaaaaatcgaagaagcacctagaagaataagagatgtgattaatgtattccaccacctccgccagttaagaggaaaaagcgaccagctacatttaccaaagcctgggtgatgtggagtggtacatagagatgaagctgtcgtcatggcaacagactccaagccccctgatccttgatcagaactacattaacaccaaaaatcaagttatcaaagcagagaggagggtgctaaaggagttgggattttgtgttcatgtcaagcatcctcataagatcattgttatgtatttacaagtcttagaatgtgaacgtaatcaaaccctggttcaaactgcctgggtagtccatgatggtaagtcatagaactctgccctctgcacttcagcccatgacctcaggatggcctgattggctaccctgctctccagccaatccagtgcaagctctcatccgagattcactgaagtggtccatatccatctggcagcatcttctagttctgtcggggtgtcaaaaggatttgtatatttgcttctagaagaattacatgaatgacagtcttcgaaccaatgtgtttgttcgatttcaaccagagactatagcatgtgcttgcatctaccttgcagctagagcacttcagattccgttgccaactcgtccccattggtttcttctttttggtactacagaagaggaaatccaggaaatctgcatagaaacacttaggctttataccagaaaaaagccaaactatgaattactggaaaaagaagtagaaaaaagaaaagtagccttacaagaagccaaattaaaagcaaagggattgaatccggatggaactccagccctttcaaccctgggtggattttctccagcctccaagccatcatcaccaagagaagtaaaagctgaagagaaatcaccaatctccattaatgtgaagacagtcaaaaaagaacctgaggatagacaacaggcttccaaaagcccttacaatggtgtaagaaaagacagcaagagaagtagaaatagcagaagtgcaagtcgatcgaggtcaagaacacgatcacgttctagatcacatactccaagaagacactataataataggcggagtcgatctggaacatacagctcgagatcaagaagcaggtcccgcagtcacagtgaaagccctcgaagacatcataatcatggttctcctcaccttaaggccaagcataccagagatgatttaaaaagttcaaacagacatggtcataaaaggaaaaaatctcgttctcgatctcagagcaagtctcgggatcactcagatgcagccaagaaacacaggcatgaaaggggacatcatagggacaggcgtgaacgatctcgctcctttgagaggtcccataaaagcaagcaccatggtggcagtcgctcaggacatggcaggcacaggcgctgactttctcttcctttgagcctgcatcagttcttggttttgcctatctacagtgtgatgtatggactcaatcaaaaacattaaacgcaaactgattaggatttgatttcttgaaaccctctaggtctctagaacactgaggacagtttcttttgaaaagaactatgttaatttttttgcacattaaaatgccctagcagtatctaattaaaaaccatggtcaggttcaattgtactttattatagttgtgtattgtttattgctataagaactggagcgtgaattctgtaaaaatgtatcttatttttatacagataaaattgcagacactgttctatttaagtggttatttgtttaaatgatggtgaatactttcttaacactggtttgtctgcatgtgtaaagatttttacaaggaaataaaatacaaatcttgttttttct

SEQ ID NO: 9960 - protein, 299 aa, Homo sapiens; identical to SEQ ID NO: 9924

SEQ ID NO: 9961 - DNA, 2125 bp, Homo sapiens
ccagaacccggcggtcacgggaatatccgtcgcgccgagaacgctggttagtcttgtttcgggttccggctgcgttgggcttgcgtgcggctcgctaagactatggcgtccgggcctcattcgacagctactgctgccgcagccgcctcatcggccgccccaagcgcgggcggctccagctccgggacgacgaccacgacgacgaccacgacgggagggatcctgatcggcgatcgcctgtactcggaagtttcacttaccatcgaccactctctgattccggaggagaggctctcgcccaccccatccatgcaggatgggctcgacctgcccagtgagacggacttacgcatcctgggctgcgagctcatccaggccgccggcattctcctccggctgccgcaggtggcgatggcaacggggcaggtgttgtttcatcgttttttctactccaaatctttcgtcaaacacagtttcgagattgttgctatggcttgtattaatcttgcatcaaaaatcgaagaagcacctagaagaataagagatgtgattaatgtattccaccacctccgccagttaagaggaaaaaggactccaagccccctgatccttgatcagaactacattaacaccaaaaatcaagttatcaaagcagagaggagggtgctaaaggagttgggattttgtgttcatgtcaagcatcctcataagatcattgttatgtatttacaagtcttagaatgtgaacgtaatcaaaccctggttcaaactgcctggaattacatgaatgacagtcttcgaaccaatgtgtttgttcgatttcaaccagagactatagcatgtgcttgcatctaccttgcagctagagcacttcagattccgttgccaactcgtccccattggtttcttctttttggtactacagaagaggaaatccaggaaatctgcatagaaacacttaggctttataccagaaaaaagccaaactatgaattactggaaaaagaagtagaaaaaagaaaagtagccttacaagaagccaaattaaaagcaaagggattgaatccggatggaactccagccctttcaaccctgggtggattttctccagcctccaagccatcatcaccaagagaagtaaaagctgaagagaaatcaccaatctccattaatgtgaagacagtcaaaaaagaacctgaggatagacaacaggcttccaaaagcccttacaatggtgtaagaaaagacagcaagagaagtagaaatagcagaagtgcaagtcgatcgaggtcaagaacacgatcacgttctagatcacatactccaagaagacactataataataggcggagtcgatctggaacatacagctcgagatcaagaagcaggtcccgcagtcacagtgaaagccctcgaagacatcataatcatggttctcctcaccttaaggccaagcataccagagatgatttaaaaagttcaaacagacatggtcataaaaggaaaaaatctcgttctcgatctcagagcaagtctcgggatcactcagatgcagccaagaaacacaggcatgaaaggggacatcatagggacaggcgtgaacgatctcgctcctttgagaggtcccataaaagcaagcaccatggtggcagtcgctcaggacatggcaggcacaggcgctgactttctcttcctttgagcctgcatcagttcttggttttgcctatctacagtgtgatgtatggactcaatcaaaaacattaaacgcaaactgattaggatttgatttcttgaaaccctctaggtctctagaacactgaggacagtttcttttgaaaagaactatgttaatttttttgcacattaaaatgccctagcagtatctaattaaaaaccatggtcaggttcaattgtactttattatagttgtgtattgtttattgctataagaactggagcgtgaattctgtaaaaatgtatcttatttttatacagataaaattgcagacactgttctatttaagtggttatttgtttaaatgatggtgaatactttcttaacactggtttgtctgcatgtgtaaagatttttacaaggaaataaaatacaaatcttgttttttct

SEQ ID NO: 9962 - protein, 526 aa, Homo sapiens; identical to SEQ ID NO: 874

SEQ ID NO: 9963 - DNA, 988 bp, Homo sapiens
ccagaacccggcggtcacgggaatatccgtcgcgccgagaacgctggttagtcttgtttcgggttccggctgcgttgggcttgcgtgcggctcgctaagactatggcgtccgggcctcattcgacagctactgctgccgcagccgcctcatcggccgccccaagcgcgggcggctccagctccgggacgacgaccacgacgacgaccacgacgggagggatcctgatcggcgatcgcctgtactcggaagtttcacttaccatcgaccactctctgattccggaggagaggctctcgcccaccccatccatgcaggatgggctcgacctgcccagtgagacggacttacgcatcctgggctgcgagctcatccaggccgccggcattctcctccggctgccgcaggtggcgatggcaacggggcaggtgttgtttcatcgttttttctactccaaatctttcgtcaaacacagtttcgagattgttgctatggcttgtattaatcttgcatcaaaaatcgaagaagcacctagaagaataagagatgtgattaatgtattccaccacctccgccagttaagaggaaaaaggactccaagccccctgatccttgatcagaactacattaacaccaaaaatcaagttatcaaagcagagaggagggtgctaaaggagttgggattttgtgttcatgtcaagcatcctcataagatcattgttatgtatttacaagtcttagaatgtgaacgtaatcaaaccctggttcaaactgcctggtaagtcacttttttagatttctttcctagccaggaaaacagaagcagaaataaagtaagtttcgttttccctttccaaaataatgagataagtttgtttggggcttttcgttgtttttttgttttgtttttttaaccaaaaggtaaataatgcttatttctgcttcctgttttcttggcttgactaattacttttaatggagaactcaatt

SEQ ID NO: 9964 - protein, 225 aa, Homo sapiens
MASGPHSTATAAAAASSAAPSAGGSSSGTTTTTTTTTGGILIGDRLYSEVSLTIDHSLIPEERLSPTPSMQDGLDLPSETDLRILGCELIQAAGILLRLPQVAMATGQVLFHRFFYSKSFVKHSFEIVAMACINLASKIEEAPRRIRDVINVFHHLRQLRGKRTPSPLILDQNYINTKNQVIKAERRVLKELGFCVHVKHPHKIIVMYLQVLECERNQTLVQTAW

SEQ ID NO: 9965 - DNA, 811 bp, Homo sapiens
ctcggcatctgggcctgcgaggggagtgttgggtgctgcgacagaccttgggatcctcagaggctgaggaggccttctctagccaaggccggtcgaaaccaccttgtttgtgatagccacacgaataacggagctttacaagatcccttatacccaaaatagaggtggcagcattggctagcatctctgcgccccttcgccctgcattccggcctcttcctttagcctcggcgcggcttgcgttccgcgtgtaccaagggaaatgtgggccaccagccttaagccagagggagctttgtaagacaggaacatataaaatgataaaagcttctctacgtacagttttcctgactctgattctgcgtgggacaaccagtgaaaattgcaggtgaagagaagaaatgcgtatttattcctccactgggaaaaaaaataccatccaaagctacatgacttgagagacaaggtctcactatgttgcccaggctggcctcgaactcccgggcttcagcagtcctcccgcctcaccctccgatgtagctaggactacaggaccgcgacccggcgctgcctaagaactgtttttaaacgtgaaagccacggctatcatttgctttttgctctgctcttcatcttctggataaacctcgtaacacactgcttctcagtggtagtctgctgcctacgccccgtcagacaagtggcctgagtcccccgcaacccctgcaggtccggccgccggcgccaagcctcaaggcatccaagccaggaacgatcgcggtcagctctgccacggaacatgtgcaagacc

SEQ ID NO: 9966 - protein, 71 aa, Homo sapiens
KPRLSFAFCSALHLLDKPRNTLLLSGSLLPTPRQTSGLSPPQPLQVRPPAPSLKASKPGTIAVSSATEHVQ

SEQ ID NO: 9967 - DNA, 866 bp, Homo sapiens
caggttccgggggaggcgaattgatttcacaacggtcgagaaggaggaccccgcccacttcgtcatttctcggaagcccagggactcgccggaagagcggctcaaaagccggaaaactggcaaatccgagtctcccggcgcatgcgcggcgcaatcggcttcgcgtggttgcagtagagaggatccctccgccagccactgcatccggcggccggatctaacttacccgctagcgttttacccttgcgcggccgtggcgtagggcggtcttttcccttggtcctccgcggcgccgcctcttgtgacgtaagccgcagaatcctctgtcttagttcggctctattgccgcgagcttgactcttcctgggtctgaggaaaagtaaaagtaattttgtcatttcctgaaacttcaagttaaacctttaagctgttcatttcctaaaagggtgaaaacgcgggcacccctcgagctagttcatcgccttttaacctgttgttggatctttccagatcaccacaccacatcacccagccactctgcccaatgggagggcagacagtgttccagtgtaggaggaaggggtgtaaggtgcgggcagtttgtgaggagggcaccaacgagagctactgtgagaaagtctgcatggtcaaaaagtggattaccaagaacaaagcatcataatgttgtccagtggaccccaggttagcttaaaaggtctagtctttgattctttatggattattgttttgatgtatgtcttagtctgtttatgctgctataacaaaataccttaggctgggtaatttataaagaacagaagtatatttctcacagttatggaggttggaaagtccaagatcaagat

SEQ ID NO: 9968 - protein, 45 aa, Homo sapiens
MGGQTVFQCRRKGCKVRAVCEEGTNESYCEKVCMVKKWITKNKAS

SEQ ID NO: 9969 - DNA, 860 bp, Homo sapiens
caggttccgggggaggcgaattgatttcacaacggtcgagaaggaggaccccgcccacttcgtcatttctcggaagcccagggactcgccggaagagcggctcaaaagccggaaaactggcaaatccgagtctcccggcgcatgcgcggcgcaatcggcttcgcgtggttgcagtagagaggatccctccgccagccactgcatccggcggccggatctaacttacccgctagcgttttacccttgcgcggccgtggcgtagggcggtcttttcccttggtcctccgcggcgccgcctcttgtgacgtaagccgcagaatcctctgtcttagttcggctctattgccgcgagcttgactcttcctgggtctgaggaaaagtaaaagtaattttgtcatttcctgaaacttcaagttaaacctttaagctgttcatttcctaaaagggtgaaaacgcgggcacccctcgagctagttcatcgccttttaacctgttgttggatctttccagatcaccacaccacatcacccagccactctgcccaatgggagggcagacagtgttccagtgtaggaggaaggggtgtaaggtgcgggcagtttgtgaggagggcaccaacgagagctactgtgagaaagtctgcatggtcaaaaagtggattaccaagaacaaagcatcataatgttgtccagtggaccccaggttacaatttggtttgactttgaaacaaaaagttatcatgtacacagaaaagcacagaagcagaggagtggaatgaagtgtgatattagtgaacgaaagagccaacattgaagtgaccacagttccatatggtcttgcaaagcaaccactgaatgttt

SEQ ID NO: 9970 - protein, 43 aa, Homo sapiens [sequence omitted]

SEQ ID NO: 9971 - DNA, 736 bp, Homo sapiens
ggttgttggatctttccagatcaccacaccacatcacccagccactctgcccaatgggagggcagacagtgttccagtgtaggaggaaggggtgtaaggtgcgggcagtttgtgaggagggcaccaacgagagctactgtgagaaagtctgcatggtcaaaaagtggattaccaagaacaaagcatcataatgttgtccagtggaccccagggtcatctggatgaaatgaatacttttagggcaaaatggctgatactgcttccttgataaccacatatagaaaactgacaactgtttagaacaaagccaaagatgaaaccaaatataaaaccactgatgaaaactaagtgaaaaatataagcaaaatagaagaaaaataaggtcgttatttcaagaaaacgaaagacagtcaatgctgttctttgtattcacatacaatttggttcacaccaaaatgtgagttgttctctatgagatgttattaaatgttcctaagaagactcgctttagaaaaaaacagtattcctaaggcatgtccaatctgtctcttttcttaattgctatagttctactttattattataatgtattcagcattaaaattcattatttcccaataagcttgactttatcttataatgaaatacaactgtcttcttggtgatttttataggagatattatggaaatattttattaacagaagtaaataaagtgtcatatcatttggcttttc

SEQ ID NO: 9972 - protein, 45 aa, Homo sapiens; identical to SEQ ID NO: 9968

SEQ ID NO: 9973 - DNA, 4185 bp, Homo sapiens
acgcggctgcagcccacaggactgggcagcagctgcaaggctgcctctgagcatggtcatgggtcccagctgcagtgctctaaagatcaaggattttgccttctattttctatgaccagagattcctgtgcaaagagagagtgtcaatgaagacctcaaagtctggagaaaaatgacctttcatggaataagaagtatacctccttctacatgtttttgtcttactgacctctgataactggaacacatgactctgggtctgtagaaagtcaactgatcaaactcatcctcaccatgcatcaactgttcagactggttttgggacaaaaagatctttcacgagctggggacctcttctccttagatgactctgagattgaagacagccttacagaagctttggagcaaattaagataattagctcatcttcagattaccaaaccaataacaatgaccaggcagtagttgaaatctgtatcacaagaatcacaacagccatcagagagaccgagtccattgaaaagcatgcaaaggcccttgtggggctctgggactcctgcttggaacataacctgagaccctttgggaaagacgaagacactcctcatgcaaaaatcgcatctgatatcatgagttgcattttacagaattacaaccgacccccagtgatggcattagccatccccattgcagtgaaattcctccacagaggcaacaaggaactgtgcaggaatatgtctaactacctgtctctggctgcaattaccaaggcagatctcctggctgatcacacggaagttatagtaaagagcatactccaaggtaacaccatgttgttgagagtgttacctgctgtgtatgaaaagcagcctcagccaattaatagacacctgacagaactcctggccttgatgtctcagctggaacagccagaacagtaccatctactacggcttttgcatgtagcagcaaagaaaaaacaactcgaggtagttcagaagtgtattcctttcctaattgggcatttgaaggattcaacccataatgacatcatcctaaacatcctcatagagatagcagtctatgagccagtggctttgaacagttttcttccaatgctgaaagagattggtgagagattcccctacctcactggacagatggcaaggatttatggagctgttgggcatgtggatgaagagagagccaggagctgcctgacatacctggtgagccaactggccaacatggagcattcgtttcaccatattctcctgctggagattaaaagcatcaccgacaccttctcctcaatcttgggccctcagagcagagacatcttccgcatgagcaacagcttcaccgccattgctaaactccttacccgacaactggaaaataccaaggctggaagtggcaggagaaaaatcagcactgaaattgaattccctgagaaactggaagaaaccaagctcatagtaactgaaaatgaagaccatgaaaaactccaagttaaaatccaggcttttgaagacaagataaatgcagggagcaatacccctggctctatcagaagatatagtctgggccaagtttctaaagaagaaagaaaaaacattagatttaacaggtcaaaaagtttggctttccacactatgctcacaaagggtgtgggttcagatgacggcgaagatgaaaacaggggagacataccagccagcatctctctttcagaaatagacccacttggccaaggaaatgacaagctgccgtttaagacagacactgagagatcacagctgggggagtcttcagtttcatacccaaatattatacatatagactcagagaatttgtcagaaactgttaaagaaaactcccaggaagaaactccagagacaactgcaagtcctatagaataccaagataagctctacttgcacttaaaaaaaaacctcagcaaagtgaaagcatatgccatggaaattggaaagaagattccagtccctgatcagtgtaccattgaagacactgtgagaagttgtgtagcaaagttgttcttcacctgctccctgaagggtcattactgcctatacagtaagtccagttttattctcatcagccaagaacctcagccatggatccagatcatgtttctatttcagcagagcctgtttcctgaacccctgtccattcagagtcattctgtgcaattcctcagagctctgtgggagaagacccaggcagggggtgctcacagctttgaaactgccatgatggagtccacgtttccacagcagaaggatctggaccaggtacagctccatctggaagaagtgaggttctttgacgtgtttggcttcagtgaaacagcaggagcatggcaatgcttcatgtgcaacaatcctgagaaagcaactgttgtaaatcaagatggccagcctctcatagaaggaaaacttaaagagaagcaagtcagatggaagttcatcaaaaggtggaaaacacgctattttacactggctggaaatcaacttctgtttcaaaaaggaaagtctaaagatgaccctgacgactgcccaatagaactcagcaaagtacagagtgtgaaggctgtggccaagaaacgcagggaccgctctctcccccgggctttcgaaatcttcacagacaataaaacctatgtctttaaggccaaggatgagaagaatgcagaagaatggctccagtgcatcaacgtggcagttgcccaagccaaagaaagggaaagtagagaagtaaccacatatctgtagggatttataagtcagccatgacaattatacaccacaggcattgtattatcattgccaatgtcaagaaaaagagctaaatttaccaagccatgttgttttttactaaataccaatggaattgttgtcctttaagaagaagggcctaaaatggcaggattcttagtaaatgtcatactctaacagctttagtattgacttcagaatatatctgatgcccacaaaaataaaataaaataaaaggagctacagagtatgccctcagatagtgtggggccaggaagggaaaagtcactgataaaagaacttctgtagatatgtcatttaaaactgtgagaaaacaacatgaaaagatgcctgaactctccatcctgaggaaagattagcacttctgatgaaaatcacagtctgtcaaaggtattaaaagaaaactttaaaaaaaaaaacctttagaaacgttgaactaatgtacactgagaaaaaccatataacttacttatagacatataattacatgatcctctcttactacaactgaggctaacacatggtaaaatggttcccaaatcaagccagttatgtcattaaatacttgtctttcagaattacttatttaattattccatttaagttcatataatataatctacagtttagatacttggacatatatcctgcccaaggcactaagtgtaatataggaaaaggatagaaagccattttctctatcttcaaaataatgtgccatctccgttaaaattaagactttaaagttctataattttttctttgtattcaactttttaatacctccaaattacaaacatctatttttttcactacatagatatataattacactatgatagacagaattctagagtgattctcaataatccatgccttggtataatcctctcccccattgagtgtgggtgggacatgtaacctgcttctaaccaacagaatatggcaaaagtgatgggatcatctctcccatattatgttatgttatataacaaaagtgaagagaagttgcagatatacataaggtttctaatcagctgactttgagttaatcaaagagatcccctgggtgggcctgacctaatcagactagtcctttaaaagagagtgaaccagtcagagactctctctcctattagccttaaataagcaagctgccatgagctctacggctgcaaggaaataagttttgtgaacaaccatgtgatcttggaagaagcatctgaacctcagataaaagcccagccccagccaacgccttgcttgcagctttgtgaaactctgagcagaggacccagctaaatcacgtttggactcctgacccacagaaactttcagataataaatgtatgctgttttaaatct

SEQ ID NO: 9974 - protein, 833 aa, Homo sapiens
MHQLFRLVLGQKDLSRAGDLFSLDDSEIEDSLTEALEQIKIISSSSDYQTNNNDQAVVEICITRITTAIRETESIEKHAKALVGLWDSCLEHNLRPFGKDEDTPHAKIASDIMSCILQNYNRPPVMALAIPIAVKFLHRGNKELCRNMSNYLSLAAITKADLLADHTEVIVKSILQGNTMLLRVLPAVYEKQPQPINRHLTELLALMSQLEQPEQYHLLRLLHVAAKKKQLEVVQKCIPFLIGHLKDSTHNDIILNILIEIAVYEPVALNSFLPMLKEIGERFPYLTGQMARIYGAVGHVDEERARSCLTYLVSQLANMEHSFHHILLLEIKSITDTFSSILGPQSRDIFRMSNSFTAIAKLLTRQLENTKAGSGRRKISTEIEFPEKLEETKLIVTENEDHEKLQVKIQAFEDKINAGSNTPGSIRRYSLGQVSKEERKNIRFNRSKSLAFHTMLTKGVGSDDGEDENRGDIPASISLSEIDPLGQGNDKLPFKTDTERSQLGESSVSYPNIIHIDSENLSETVKENSQEETPETTASPIEYQDKLYLHLKKNLSKVKAYAMEIGKKIPVPDQCTIEDTVRSCVAKLFFTCSLKGHYCLYSKSSFILISQEPQPWIQIMFLFQQSLFPEPLSIQSHSVQFLRALWEKTQAGGAHSFETAMMESTFPQQKDLDQVQLHLEEVRFFDVFGFSETAGAWQCFMCNNPEKATVVNQDGQPLIEGKLKEKQVRWKFIKRWKTRYFTLAGNQLLFQKGKSKDDPDDCPIELSKVQSVKAVAKKRRDRSLPRAFEIFTDNKTYVFKAKDEKNAEEWLQCINVAVAQAKERESREVTTYL

SEQ ID NO: 9975 - DNA, 4414 bp, Homo sapiens
tgtaaatctagtgtagaaataagtgaagctttgcgtcaattgttaggtctaagcagaagtttgggagagagaagaaaagttactcatttgcctgattccgcacggaaacagagcgttgcactgggaggtaactccgctgggtgaggtgcagcctgtcacctgaccggtctctggggctgccggtggcatcaggctgcattccttgaattcttccacccggcaccggctccgcaatgaacaacttcaggttcactgagctgagcggattccactcgctgtgccctcggagcctgcctgaatctcccgcccagtctcaaaccatgcagctgagtaactgcaagggcgcctttgaggagtagcacgcagagagtgtcaatgaagacctcaaagtctggagaaaaatgacctttcatggaataagaagtatacctccttctacatgtttttgtcttactgacctctgataactggaacacatgactctgggtctgtagaaagtcaactgatcaaactcatcctcaccatgcatcaactgttcagactggttttgggacaaaaagatctttcacgagctggggacctcttctccttagatgactctgagattgaagacagccttacagaagctttggagcaaattaagataattagctcatcttcagattaccaaaccaataacaatgaccaggcagtagttgaaatctgtatcacaagaatcacaacagccatcagagagaccgagtccattgaaaagcatgcaaaggcccttgtggggctctgggactcctgcttggaacataacctgagaccctttgggaaagacgaagacactcctcatgcaaaaatcgcatctgatatcatgagttgcattttacagaattacaaccgacccccagtgatggcattagccatccccattgcagtgaaattcctccacagaggcaacaaggaactgtgcaggaatatgtctaactacctgtctctggctgcaattaccaaggcagatctcctggctgatcacacggaagttatagtaaagagcatactccaaggtaacaccatgttgttgagagtgttacctgctgtgtatgaaaagcagcctcagccaattaatagacacctgacagaactcctggccttgatgtctcagctggaacagccagaacagtaccatctactacggcttttgcatgtagcagcaaagaaaaaacaactcgaggtagttcagaagtgtattcctttcctaattgggcatttgaaggattcaacccataatgacatcatcctaaacatcctcatagagatagcagtctatgagccagtggctttgaacagttttcttccaatgctgaaagagattggtgagagattcccctacctcactggacagatggcaaggatttatggagctgttgggcatgtggatgaagagagagccaggagctgcctgacatacctggtgagccaactggccaacatggagcattcgtttcaccatattctcctgctggagattaaaagcatcaccgacaccttctcctcaatcttgggccctcagagcagagacatcttccgcatgagcaacagcttcaccgccattgctaaactccttacccgacaactggaaaataccaaggctggaagtggcaggagaaaaatcagcactgaaattgaattccctgagaaactggaagaaaccaagctcatagtaactgaaaatgaagaccatgaaaaactccaagttaaaatccaggcttttgaagacaagataaatgcagggagcaatacccctggctctatcagaagatatagtctgggccaagtttctaaagaagaaagaaaaaacattagatttaacaggtcaaaaagtttggctttccacactatgctcacaaagggtgtgggttcagatgacggcgaagatgaaaacaggggagacataccagccagcatctctctttcagaaatagacccacttggccaaggaaatgacaagctgccgtttaagacagacactgagagatcacagctgggggagtcttcagtttcatacccaaatattatacatatagactcagagaatttgtcagaaactgttaaagaaaactcccaggaagaaactccagagacaactgcaagtcctatagaataccaagataagctctacttgcacttaaaaaaaaacctcagcaaagtgaaagcatatgccatggaaattggaaagaagattccagtccctgatcagtgtaccattgaagacactgtgagaagttgtgtagcaaagttgttcttcacctgctccctgaagggtcattactgcctatacagtaagtccagttttattctcatcagccaagaacctcagccatggatccagatcatgtttctatttcagcagagcctgtttcctgaacccctgtccattcagagtcattctgtgcaattcctcagagctctgtgggagaagacccaggcagggggtgctcacagctttgaaactgccatgatggagtccacgtttccacagcagaaggatctggaccaggtacagctccatctggaagaagtgaggttctttgacgtgtttggcttcagtgaaacagcaggagcatggcaatgcttcatgtgcaacaatcctgagaaagcaactgttgtaaatcaagatggccagcctctcatagaaggaaaacttaaagagaagcaagtcagatggaagttcatcaaaaggtggaaaacacgctattttacactggctggaaatcaacttctgtttcaaaaaggaaagtctaaagatgaccctgacgactgcccaatagaactcagcaaagtacagagtgtgaaggctgtggccaagaaacgcagggaccgctctctcccccgggctttcgaaatcttcacagacaataaaacctatgtctttaaggccaaggatgagaagaatgcagaagaatggctccagtgcatcaacgtggcagttgcccaagccaaagaaagggaaagtagagaagtaaccacatatctgtagggatttataagtcagccatgacaattatacaccacaggcattgtattatcattgccaatgtcaagaaaaagagctaaatttaccaagccatgttgttttttactaaataccaatggaattgttgtcctttaagaagaagggcctaaaatggcaggattcttagtaaatgtcatactctaacagctttagtattgacttcagaatatatctgatgcccacaaaaataaaataaaataaaaggagctacagagtatgccctcagatagtgtggggccaggaagggaaaagtcactgataaaagaacttctgtagatatgtcatttaaaactgtgagaaaacaacatgaaaagatgcctgaactctccatcctgaggaaagattagcacttctgatgaaaatcacagtctgtcaaaggtattaaaagaaaactttaaaaaaaaaaacctttagaaacgttgaactaatgtacactgagaaaaaccatataacttacttatagacatataattacatgatcctctcttactacaactgaggctaacacatggtaaaatggttcccaaatcaagccagttatgtcattaaatacttgtctttcagaattacttatttaattattccatttaagttcatataatataatctacagtttagatacttggacatatatcctgcccaaggcactaagtgtaatataggaaaaggatagaaagccattttctctatcttcaaaataatgtgccatctccgttaaaattaagactttaaagttctataattttttctttgtattcaactttttaatacctccaaattacaaacatctatttttttcactacatagatatataattacactatgatagacagaattctagagtgattctcaataatccatgccttggtataatcctctcccccattgagtgtgggtgggacatgtaacctgcttctaaccaacagaatatggcaaaagtgatgggatcatctctcccatattatgttatgttatataacaaaagtgaagagaagttgcagatatacataaggtttctaatcagctgactttgagttaatcaaagagatcccctgggtgggcctgacctaatcagactagtcctttaaaagagagtgaaccagtcagagactctctctcctattagccttaaataagcaagctgccatgagctctacggctgcaaggaaataagttttgtgaacaaccatgtgatcttggaagaagcatctgaacctcagataaaagcccagccccagccaacgccttgcttgcagctttgtgaaactctgagcagaggacccagctaaatcacgtttggactcctgacccacagaaactttcagataataaatgtatgctgttttaaatct

SEQ ID NO: 9976 - protein, 833 aa, Homo sapiens; identical to SEQ ID NO: 9974

SEQ ID NO: 9977 - DNA, 373 bp, Homo sapiens
ataacccatagcttttatagccagttgatattttaaaaaataaacagatccatgttagtagagaatgtcctggccaaattgtggtgctttaaatgaaataatgtgttaattggaaagtgagaaaatgattgaatatcctctatgttctacatgcaaacaatttattttagatgatacatgatcataccctcgtagatcattccacatgttatttttcaaatggaatatgatgatcttagaaaaatagtttcttgttttagctgtgaagaggctgtgataacatatctgaatcacctgcttaaaaggacgtactatgggcaatagacctttaaaatgacacgtccccagccatgcatatgttagatgtaatagc

SEQ ID NO: 9978 - protein, 34 aa, Homo sapiens
MEYDDLRKIVSCFSCEEAVITYLNHLLKRTYYGQ

SEQ ID NO: 9979 - DNA, 2370 bp, Homo sapiens
acattgcgctctgtgattctgaggaatacagtgtgccagcatccgatccagtctcctttcacctgcaggtgttccagaaacttcaaaatgcgtctggaagaactgaaaagattgcagaatcctctagaacaagttaatgatggaaaatattcatttgaaaatcaccagctggccatggatgcagagaataatattgaaaagtatcccctcaatctacagcccttggaatcaaaggtgaaaatcattcagcgagcatggcgagagtacctgcagcggcaggagcccctggggaagaggagcccgtccccaccctctgtctcctcagagaagctgagcagctctgtcagcatgaacaccttctccgacagcagcacacccgattaccgagaggatgggatggatctaggcagtgacgccggcagcagcagcagcagcagccgcgccagttcacagtccaactccaccaaagtgaccccttgctccgagtgcaaatcttcatcgtcgccggggggcagcctggacttggtgtctgccctggaggactatgaggagcccttcccggtctaccagaagaaggtgattgatgagtgggcgccggaggaggacggggaggaggaggaagaggaggacgagcgcgaccagcgagggtaccgggatgaccgctctccggcccgggaaccgggggacgtaagcgccaggacccgcagcggcggcggcgggggcaggagcgccaccaccgccatgccgcccccggtgcccaacggcaacctccaccagcacgacccccaggacctcaggcacaatggcaacgtggtggtggctggccggccgagctgttcccggggcccccgccgggcgatccaaaagccccagccggctgggggccggcgcagtggccgcggcccggcggctggggggctctgccttcagcccccagacggcgggacgtgcgtccccgaagagcccccggtgccacctatggattgggaggcgctggagaagcatctggccgggctgcagttccgggagcaggaggtacggaaccagggccaggcgaggaccaactccacctccgcacagaaaaatgagagagagtctatcagacagaagttggcacttggaagcttctttgatgatggcccaggaatttataccagctgtagcaaaagtgggaagccaagcctttcctcccgactgcagagtgggatgaacttgcagatatgctttgtcaacgacagtggcagtgataaggacagtgatgctgatgacagtaagactgaaaccagcttggacacccccttgtctcccatgagcaaacagagttcttcctattctgatagagacactactgaagaggagtctgaatccttggatgacatggacttccttacaaggcaaaagaaattgcaagctgaagccaaaatggcccttgccatggccaaaccaatggccaaaatgcaagtagaagtggagaaacagaacaggaaaaagtctcccgtcgctgatcttctgccacacatgcctcatataagtgaatgcttgatgaaaagaagtttaaaacccaccgacctgagagacatgactattgggcagctacaagtgatagtcaatgatctccattcccagatagaaagcttgaatgaagagttggtccagctgcttctcatccgagatgagctgcacacagagcaggatgccatgctggtggacattgaagacttgaccagacatgctgaaagtcagcagaagcacatggcagagaaaatgcctgcaaagtgaaaagaagccattcaaccagagaacaagctagaatttattttgcttctgtggttgtaaaaatgctgttgctaaaggtggcgcagaaacaaatatcagtgttagtcattgataatgtctgaagcttaatgtccagtgattggcctttgcttcttaatttattttaattttttacttgtgccacttaatatcaggcattttaataaaatattgttacaaaaaatgtacagtactgacaccaccacaaatcatggttaataaaagagagtagttttaactttatttttatttgtttagagattttaagttggaacagtattttcccattgactacttttcattcttcactgtagttttaaagaagaactgtaaatgacggtgctatacaagtcaaaaaatacatgcctgcctcgtagtgaagttgtagctctccgtaatatgtatattttactcagttttcaacattttgtgaatgttgactacctgaagttcctttttagatgtgctattaacattctgttggattcagagggttccttgaaagttttatgtataaatatgtaaaataaaaattaaaactttgtttcatatcat

SEQ ID NO: 9980 - protein, 563 aa, Homo sapiens
MRLEELKRLQNPLEQVNDGKYSFENHQLAMDAENNIEKYPLNLQPLESKVKIIQRAWREYLQRQEPLGKRSPSPPSVSSEKLSSSVSMNTFSDSSTPDYREDGMDLGSDAGSSSSSSRASSQSNSTKVTPCSECKSSSSPGGSLDLVSALEDYEEPFPVYQKKVIDEWAPEEDGEEEEEEDERDQRGYRDDRSPAREPGDVSARTRSGGGGGRSATTAMPPPVPNGNLHQHDPQDLRHNGNVVVAGRPSCSRGPRRAIQKPQPAGGRRSGRGPAAGGLCLQPPDGGTCVPEEPPVPPMDWEALEKHLAGLQFREQEVRNQGQARTNSTSAQKNERESIRQKLALGSFFDDGPGIYTSCSKSGKPSLSSRLQSGMNLQICFVNDSGSDKDSDADDSKTETSLDTPLSPMSKQSSSYSDRDTTEEESESLDDMDFLTRQKKLQAEAKMALAMAKPMAKMQVEVEKQNRKKSPVADLLPHMPHISECLMKRSLKPTDLRDMTIGQLQVIVNDLHSQIESLNEELVQLLLIRDELHTEQDAMLVDIEDLTRHAESQQKHMAEKMPAK

SEQ ID NO: 9981 - DNA, 2632 bp, Homo sapiens
agaaagagataatctgtgaaagccacagagcctgatttctgctgtgataatcttcagcagaccgaggctggggcgagaatgaggcagacctgtttacatggtgtgtgcagtgccttgtggaattcttaactctattttattgtattatttttaatcgaaaagtagatcagatgatagcatgaagtgaatcggctgctttggactaatgggatcttcttttctgcattaagatcaagaacttttctggaatcctctgttctccgagtagccttgtcttctctgtgtgttttatcaatttgaagaacactggcaaaaatcagcaaacttcatctcccaaaaagctctcgctcttttttgccaatacttgaagatttctgctccaaaatctactttgagctgcttgagcatggtggttgataaccgaagggcaaaagcatcacttatttagtgtgtgttatagaaattttttagacaaccttactagctaacccaggtgaccctttacggatttctttcaaagccaatttgaataaacaactcttccctctcaaatgggcaagagtaactcttcagcaccatggagaggtccgggcagcgtgttacaacgtgggactgtgaccagggcaagcactctgacagtgattaccgagaggatgggatggatctaggcagtgacgccggcagcagcagcagcagcagccgcgccagttcacagtccaactccaccaaagtgaccccttgctccgagtgcaaatcttcatcgtcgccggggggcagcctggacttggtgtctgccctggaggactatgaggagcccttcccggtctaccagaagaaggtgattgatgagtgggcgccggaggaggacggggaggaggaggaagaggaggacgagcgcgaccagcgagggtaccgggatgaccgctctccggcccgggaaccgggggacgtaagcgccaggacccgcagcggcggcggcgggggcaggagcgccaccaccgccatgccgcccccggtgcccaacggcaacctccaccagcacgacccccaggacctcaggcacaatggcaacgtggtggtggctggccggccgagctgttcccggggcccccgccgggcgatccaaaagccccagccggctgggggccggcgcagtggccgcggcccggcggctggggggctctgccttcagcccccagacggcgggacgtgcgtccccgaagagcccccggtgccacctatggattgggaggcgctggagaagcatctggccgggctgcagttccgggagcaggaggtacggaaccagggccaggcgaggaccaactccacctccgcacagaaaaatgagagagagtctatcagacagaagttggcacttggaagcttctttgatgatggcccaggaatttataccagctgtagcaaaagtgggaagccaagcctttcctcccgactgcagagtgggatgaacttgcagatatgctttgtcaacgacagtggcagtgataaggacagtgatgctgatgacagtaagactgaaaccagcttggacacccccttgtctcccatgagcaaacagagttcttcctattctgatagagacactactgaagaggagtctgaatccttggatgacatggacttccttacaaggcaaaagaaattgcaagctgaagccaaaatggcccttgccatggccaaaccaatggccaaaatgcaagtagaagtggagaaacagaacaggaaaaagtctcccgtcgctgatcttctgccacacatgcctcatataagtgaatgcttgatgaaaagaagtttaaaacccaccgacctgagagacatgactattgggcagctacaagtgatagtcaatgatctccattcccagatagaaagcttgaatgaagagttggtccagctgcttctcatccgagatgagctgcacacagagcaggatgccatgctggtggacattgaagacttgaccagacatgctgaaagtcagcagaagcacatggcagagaaaatgcctgcaaagtgaaaagaagccattcaaccagagaacaagctagaatttattttgcttctgtggttgtaaaaatgctgttgctaaaggtggcgcagaaacaaatatcagtgttagtcattgataatgtctgaagcttaatgtccagtgattggcctttgcttcttaatttattttaattttttacttgtgccacttaatatcaggcattttaataaaatattgttacaaaaaatgtacagtactgacaccaccacaaatcatggttaataaaagagagtagttttaactttatttttatttgtttagagattttaagttggaacagtattttcccattgactacttttcattcttcactgtagttttaaagaagaactgtaaatgacggtgctatacaagtcaaaaaatacatgcctgcctcgtagtgaagttgtagctctccgtaatatgtatattttactcagttttcaacattttgtgaatgttgactacctgaagttcctttttagatgtgctattaacattctgttggattcagagggttccttgaaagttttatgtataaatatgtaaaataaaaattaaaactttgtttcatatcat

SEQ ID NO: 9982 - protein, 487 aa, Homo sapiens; identical to SEQ ID NO: 878

SEQ ID NO: 9983 - DNA, 2590 bp, Homo sapiens
aagagataatctgtgaaagccacagagcctgatttctgctgtgataatcttcagcagaccgaggctggggcgagaatgaggcagacctgtttacatggtgtgtgcagtgccttgtggaattcttaactctattttattgtattatttttaatcgaaaagtagatcagatgatagcatgaagtgaatcggctgctttggactaatgggatcttcttttctgcattaagatcaagaacttttctggaatcctctgttctccgagtagccttgtcttctctgtgtgttttatcaatttgaagaacactggcaaaaatcagcaaacttcatctcccaaaaagctctcgctcttttttgccaatacttgaagatttctgctccaaaatctactttgagctgcttgagcatggtggttgataaccgaagggcaaaagcatcacttatttagtgtgtgttatagaaattttttagacaaccttactagctaacccaggtgaccctttacggatttctttcaaagccaatttgaataaacaactcttccctctcaaatgggcaagagtaactcttcagcaccatggagaggtccgggcagcgtgttacaacgtgggactgtgaccagggcaagcactctgacagtgattaccgagaggatgggatggatctaggcagtgacgccggcagcagcagcagcagcagccgcgccagttcacagtccaactccaccaaagtgaccccttgctccgagtgcaaatcttcatcgtcgccggggggcagcctggacttggtgtctgccctggaggactatgaggagcccttcccggtctaccagaagaaggtgattgatgagtgggcgccggaggaggacggggaggaggaggaagaggaggacgagcgcgaccagcgagggtaccgggatgaccgctctccggcccgggaaccgggggacgtaagcgccaggacccgcagcggcggcggcgggggcaggagcgccaccaccgccatgccgcccccggtgcccaacggcaacctccaccagcacgacccccaggacctcaggcacaatggcaacgtggtggtggctggccggccgagctgttcccggggcccccgccgggcgatccaaaagccccagccggctgggggccggcgcagtggccgcggcccggcggctggggggctctgccttcagcccccagacggcgggacgtgcgtccccgaagagcccccggtgccacctatggattgggaggcgctggagaagcatctggccgggctgcagttccgggagcaggaggcacagaaaaatgagagagagtctatcagacagaagttggcacttggaagcttctttgatgatggcccaggaatttataccagctgtagcaaaagtgggaagccaagcctttcctcccgactgcagagtgggatgaacttgcagatatgctttgtcaacgacagtggcagtgataaggacagtgatgctgatgacagtaagactgaaaccagcttggacacccccttgtctcccatgagcaaacagagttcttcctattctgatagagacactactgaagaggagtctgaatccttggatgacatggacttccttacaaggcaaaagaaattgcaagctgaagccaaaatggcccttgccatggccaaaccaatggccaaaatgcaagtagaagtggagaaacagaacaggaaaaagtctcccgtcgctgatcttctgccacacatgcctcatataagtgaatgcttgatgaaaagaagtttaaaacccaccgacctgagagacatgactattgggcagctacaagtgatagtcaatgatctccattcccagatagaaagcttgaatgaagagttggtccagctgcttctcatccgagatgagctgcacacagagcaggatgccatgctggtggacattgaagacttgaccagacatgctgaaagtcagcagaagcacatggcagagaaaatgcctgcaaagtgaaaagaagccattcaaccagagaacaagctagaatttattttgcttctgtggttgtaaaaatgctgttgctaaaggtggcgcagaaacaaatatcagtgttagtcattgataatgtctgaagcttaatgtccagtgattggcctttgcttcttaatttattttaattttttacttgtgccacttaatatcaggcattttaataaaatattgttacaaaaaatgtacagtactgacaccaccacaaatcatggttaataaaagagagtagttttaactttatttttatttgtttagagattttaagttggaacagtattttcccattgactacttttcattcttcactgtagttttaaagaagaactgtaaatgacggtgctatacaagtcaaaaaatacatgcctgcctcgtagtgaagttgtagctctccgtaatatgtatattttactcagttttcaacattttgtgaatgttgactacctgaagttcctttttagatgtgctattaacattctgttggattcagagggttccttgaaagttttatgtataaatatgtaaaataaaaattaaaactttgtttcatatcat

SEQ ID NO: 9984 - protein, 474 aa, Homo sapiens
MERSGQRVTTWDCDQGKHSDSDYREDGMDLGSDAGSSSSSSRASSQSNSTKVTPCSECKSSSSPGGSLDLVSALEDYEEPFPVYQKKVIDEWAPEEDGEEEEEEDERDQRGYRDDRSPAREPGDVSARTRSGGGGGRSATTAMPPPVPNGNLHQHDPQDLRHNGNVVVAGRPSCSRGPRRAIQKPQPAGGRRSGRGPAAGGLCLQPPDGGTCVPEEPPVPPMDWEALEKHLAGLQFREQEAQKNERESIRQKLALGSFFDDGPGIYTSCSKSGKPSLSSRLQSGMNLQICFVNDSGSDKDSDADDSKTETSLDTPLSPMSKQSSSYSDRDTTEEESESLDDMDFLTRQKKLQAEAKMALAMAKPMAKMQVEVEKQNRKKSPVADLLPHMPHISECLMKRSLKPTDLRDMTIGQLQVIVNDLHSQIESLNEELVQLLLIRDELHTEQDAMLVDIEDLTRHAESQQKHMAEKMPAK

SEQ ID NO: 9985 - DNA, 1933 bp, Homo sapiens
aagagataatctgtgaaagccacagagcctgatttctgctgtgataatcttcagcagaccgaggctggggcgagaatgaggcagacctgtttacatggtgtgtgcagtgccttgtggaattcttaactctattttattgtattatttttaatcgaaaagtagatcagatgatagcatgaagtgaatcggctgctttggactaatgggatcttcttttctgcattaagatcaagaacttttctggaatcctctgttctccgagtagccttgtcttctctgtgtgttttatcaatttgaagaacactggcaaaaatcagcaaacttcatctcccaaaaagctctcgctcttttttgccaatacttgaagatttctgctccaaaatctactttgagctgcttgagcatggtggttgataaccgaagggcaaaagcatcacttatttagtgtgtgttatagaaattttttagacaaccttactagctaacccaggtgaccctttacggatttctttcaaagccaatttgaataaacaactcttccctctcaaatgggcaagagtaactcttcagcaccatggagaggtccgggcagcgtgttacaacgtgggactgtgaccagggcaagcactctgacagtgcacagaaaaatgagagagagtctatcagacagaagttggcacttggaagcttctttgatgatggcccaggaatttataccagctgtagcaaaagtgggaagccaagcctttcctcccgactgcagagtgggatgaacttgcagatatgctttgtcaacgacagtggcagtgataaggacagtgatgctgatgacagtaagactgaaaccagcttggacacccccttgtctcccatgagcaaacagagttcttcctattctgatagagacactactgaagaggagtctgaatccttggatgacatggacttccttacaaggcaaaagaaattgcaagctgaagccaaaatggcccttgccatggccaaaccaatggccaaaatgcaagtagaagtggagaaacagaacaggaaaaagtctcccgtcgctgatcttctgccacacatgcctcatataagtgaatgcttgatgaaaagaagtttaaaacccaccgacctgagagacatgactattgggcagctacaagtgatagtcaatgatctccattcccagatagaaagcttgaatgaagagttggtccagctgcttctcatccgagatgagctgcacacagagcaggatgccatgctggtggacattgaagacttgaccagacatgctgaaagtcagcagaagcacatggcagagaaaatgcctgcaaagtgaaaagaagccattcaaccagagaacaagctagaatttattttgcttctgtggttgtaaaaatgctgttgctaaaggtggcgcagaaacaaatatcagtgttagtcattgataatgtctgaagcttaatgtccagtgattggcctttgcttcttaatttattttaattttttacttgtgccacttaatatcaggcattttaataaaatattgttacaaaaaatgtacagtactgacaccaccacaaatcatggttaataaaagagagtagttttaactttatttttatttgtttagagattttaagttggaacagtattttcccattgactacttttcattcttcactgtagttttaaagaagaactgtaaatgacggtgctatacaagtcaaaaaatacatgcctgcctcgtagtgaagttgtagctctccgtaatatgtatattttactcagttttcaacattttgtgaatgttgactacctgaagttcctttttagatgtgctattaacattctgttggattcagagggttccttgaaagttttatgtataaatatgtaaaataaaaattaaaactttgtttcatatcat

SEQ ID NO: 9986 - protein, 255 aa, Homo sapiens
MERSGQRVTTWDCDQGKHSDSAQKNERESIRQKLALGSFFDDGPGIYTSCSKSGKPSLSSRLQSGMNLQICFVNDSGSDKDSDADDSKTETSLDTPLSPMSKQSSSYSDRDTTEEESESLDDMDFLTRQKKLQAEAKMALAMAKPMAKMQVEVEKQNRKKSPVADLLPHMPHISECLMKRSLKPTDLRDMTIGQLQVIVNDLHSQIESLNEELVQLLLIRDELHTEQDAMLVDIEDLTRHAESQQKHMAEKMPAK

SEQ ID NO: 9987 - DNA, 1016 bp, Homo sapiens
aacattctttaaaacatacatgtcttgaacacagatttggaggtatccttgaggtaaattacagcttaccaaatgtaaataaccaaaaacacatcgatcatgagtgccagcatcactgggaactcttccgatatttctgagactcctaacttggtttaaggttagggcagtgcagaccacggtaatcaagagagtctaattttaaatttgttaactgtccattatgggatgggacaggtcttctcaacatgactccagcaagatccaggcttattaatgctccatggagggtgtccgcagcaagaagtcttcctgatgggttcagatgatttggattacaccccctccttaaggaactcagaaggaaaagcaacatataaaagactgagaaatcctcagaaatcaattaaacttagtttggcctagtgtcacccagacttacttgaccatgaaatcctcctgtcgcatgacactcatgaagagcccctgaaattaggatcatttcaatcctcaaagcatacccatttttcaaacgagaaatacaacttctagaatcacaaagccacaaaattggcaagggagatctaaaatcagatcttccggttccagcttcagggcccaattcataggactgcagctgaagaggacagttggcagtgaagatgagagctgatacctgggcaacagagcaagactctgccaaaaaaaaaaacaaaaacaaaaacaaaaaaaactacaaaacattgctaagagaaattataagaagaaagatctaaataaaggaattggaagactcagtattattaaaatagcaatgcccctcaacgtgatctatagattcaacataattcctataaaaattccagcaggcttttgggcaggaattgacaagctgatcctaaaatgtatatggaaatgcaaaggacctagaaaagcaaaaacaatcttaaaaaagaacaaagttggaaaacttaagacttcccaattttaaaacttactataaagctacattaatt

SEQ ID NO: 9988 - protein, 37 aa, Homo sapiens [sequence omitted]

SEQ ID NO: 9989 - DNA, 579 bp, Homo sapiens
ctataatataattggctgattgtgcgggtgatgagcgccccctcccccagcccggtcccagctccatgttcctaagcctgcctcactggtttcggagggctggagagcagctcagctcgctagctgcgcgcttcccggcacaggcagtgccactgcgcaggttgatcagcgaaacagcatccattttaatctgcggggagcccctgccttaccagggcgttctctccgcccgccggtggatgctccgcgcctgccctccgcagcctcgctcagcagtcctgcgttggggtctgcgccctaggatgcactgagatggtacatcaggataactgctcgtatcaggcacagaaaaatgagagagagtctatcagacagaagttggcacttggaagcttctttgatgatggcccaggaatttataccagctgtagcaaaagtgggaagccaagcctttcctcccgactgcagagtgggatgaacttgcagatatgctttgtcaacgacagtggcagtgataaggacagtgatgctgatgacagtaagactgaaaccagcttggacacccccttgtctcccatg

SEQ ID NO: 9990 - protein, 88 aa, Homo sapiens
MVHQDNCSYQAQKNERESIRQKLALGSFFDDGPGIYTSCSKSGKPSLSSRLQSGMNLQICFVNDSGSDKDSDADDSKTETSLDTPLSP

SEQ ID NO: 9991 - DNA, 980 bp, Homo sapiens
ctataatataattggctgattgtgcgggtgatgagcgccccctcccccagcccggtcccagctccatgttcctaagcctgcctcactggtttcggagggctggagagcagctcagctcgctagctgcgcgcttcccggcacaggcagtgccactgcgcaggttgatcagcgaaacagcatccattttaatctgcggggagcccctgccttaccagggcgttctctccgcccgccggtggatgctccgcgcctgccctccgcagcctcgctcagcagtcctgcgttggggtctgcgccctaggatgcactgagatggtacatcaggataactgctcgtatcaggcacagaaaaatgagagagagtctatcagacagaagttggcacttggaagcttctttgatgatggcccaggaatttataccagctgtagcaaaagtgggaagccaagcctttcctcccgactgcagagtgggatgaacttgcagatatgctttgtcaacgacagtggcagtgataaggacagtgatgctgatgacagtaagactgaaaccagcttggacacccccttgtctcccatgagcaaacagagttcttcctattctgatagagacactactgaagaggagtctgaatccttggatgacatggacttccttacaaggcaaaagaaattgcaagctgaagccaaaatggcccttgccatggccaaaccaatggccaaaatgcaagtagaagtggagaaacagaacaggaaaaagtctcccgtcgctgatcttgtaagcagcaaaggctgaaatgcaaggaagtgtttgggagccagaaatggttgacactgtcccagtcctttcccagaattatgcaaacttgtgtttctctaaggcggtttgtaaaaagtcctgtcattgagaaatgattaagtttgtttctttttccttcctactgtaggactgaaaaatacagaagcaatagatttcacaaa

SEQ ID NO: 9992 - protein, 160 aa, Homo sapiens
MVHQDNCSYQAQKNERESIRQKLALGSFFDDGPGIYTSCSKSGKPSLSSRLQSGMNLQICFVNDSGSDKDSDADDSKTETSLDTPLSPMSKQSSSYSDRDTTEEESESLDDMDFLTRQKKLQAEAKMALAMAKPMAKMQVEVEKQNRKKSPVADLVSSKG

SEQ ID NO: 9993 - DNA, 1196 bp, Homo sapiens
ctataatataattggctgattgtgcgggtgatgagcgccccctcccccagcccggtcccagctccatgttcctaagcctgcctcactggtttcggagggctggagagcagctcagctcgctagctgcgcgcttcccggcacaggcagtgccactgcgcaggttgatcagcgaaacagcatccattttaatctgcggggagcccctgccttaccagggcgttctctccgcccgccggtggatgctccgcgcctgccctccgcagcctcgctcagcagtcctgcgttggggtctgcgccctaggatgcactgagatggtacatcaggataactgctcgtatcaggcacagaaaaatgagagagagtctatcagacagaagttggcacttggaagcttctttgatgatggcccaggaatttataccagctgtagcaaaagtgggaagccaagcctttcctcccggcttgaatgaagagttggtccagctgcttctcatccgagatgagctgcacacagagcaggatgccatgctggtggacattgaagacttgaccagacatgctgaaagtcagcagaagcacatggcagagaaaatgcctgcaaagtgaaaagaagccattcaaccagagaacaagctagaatttattttgcttctgtggttgtaaaaatgctgttgctaaaggtggcgcagaaacaaatatcagtgttagtcattgataatgtctgaagcttaatgtccagtgattggcctttgcttcttaatttattttaattttttacttgtgccacttaatatcaggcattttaataaaatattgttacaaaaaatgtacagtactgacaccaccacaaatcatggttaataaaagagagtagttttaactttatttttatttgtttagagattttaagttggaacagtattttcccattgactacttttcattcttcactgtagttttaaagaagaactgtaaatgacggtgctatacaagtcaaaaaatacatgcctgcctcgtagtgaagttgtagctctccgtaatatgtatattttactcagttttcaacattttgtgaatgttgactacctgaagttcctttttagatgtgctattaacattctgttggattcagagggttccttgaaagttttatgtataaatatgtaaaataaaaattaaaactttgtttcatatc

SEQ ID NO: 9994 - protein, 84 aa, Homo sapiens
MRESLSDRSWHLEASLMMAQEFIPAVAKVGSQAFPPGLNEELVQLLLIRDELHTEQDAMLVDIEDLTRHAESQQKHMAEKMPAK

SEQ ID NO: 9995 - DNA, 1638 bp, Homo sapiens
ctataatataattggctgattgtgcgggtgatgagcgccccctcccccagcccggtcccagctccatgttcctaagcctgcctcactggtttcggagggctggagagcagctcagctcgctagctgcgcgcttcccggcacaggcagtgccactgcgcaggttgatcagcgaaacagcatccattttaatctgcggggagcccctgccttaccagggcgttctctccgcccgccggtggatgctccgcgcctgccctccgcagcctcgctcagcagtcctgcgttggggtctgcgccctaggatgcactgagatggtacatcaggataactgctcgtatcaggcacagaaaaatgagagagagtctatcagacagaagttggcacttggaagcttctttgatgatggcccaggaatttataccagctgtagcaaaagtgggaagccaagcctttcctcccgactgcagagtgggatgaacttgcagatatgctttgtcaacgacagtggcagtgataaggacagtgatgctgatgacagtaagactgaaaccagcttggacacccccttgtctcccatgagcaaacagagttcttcctattctgatagagacactactgaagaggagtctgaatccttggatgacatggacttccttacaaggcaaaagaaattgcaagctgaagccaaaatggcccttgccatggccaaaccaatggccaaaatgcaagtagaagtggagaaacagaacaggaaaaagtctcccgtcgctgatcttctgccacacatgcctcatataagtgaatgcttgatgaaaagaagtttaaaacccaccgacctgagagacatgactattgggcagctacaagtgatagtcaatgatctccattcccagatagaaagcttgaatgaagagttggtccagctgcttctcatccgagatgagctgcacacagagcaggatgccatgctggtggacattgaagacttgaccagacatgctgaaagtcagcagaagcacatggcagagaaaatgcctgcaaagtgaaaagaagccattcaaccagagaacaagctagaatttattttgcttctgtggttgtaaaaatgctgttgctaaaggtggcgcagaaacaaatatcagtgttagtcattgataatgtctgaagcttaatgtccagtgattggcctttgcttcttaatttattttaattttttacttgtgccacttaatatcaggcattttaataaaatattgttacaaaaaatgtacagtactgacaccaccacaaatcatggttaataaaagagagtagttttaactttatttttatttgtttagagattttaagttggaacagtattttcccattgactacttttcattcttcactgtagttttaaagaagaactgtaaatgacggtgctatacaagtcaaaaaatacatgcctgcctcgtagtgaagttgtagctctccgtaatatgtatattttactcagttttcaacattttgtgaatgttgactacctgaagttcctttttagatgtgctattaacattctgttggattcagagggttccttgaaagttttatgtataaatatgtaaaataaaaattaaaactttgtttcatatcat

SEQ ID NO: 9996 - protein, 244 aa, Homo sapiens
MVHQDNCSYQAQKNERESIRQKLALGSFFDDGPGIYTSCSKSGKPSLSSRLQSGMNLQICFVNDSGSDKDSDADDSKTETSLDTPLSPMSKQSSSYSDRDTTEEESESLDDMDFLTRQKKLQAEAKMALAMAKPMAKMQVEVEKQNRKKSPVADLLPHMPHISECLMKRSLKPTDLRDMTIGQLQVIVNDLHSQIESLNEELVQLLLIRDELHTEQDAMLVDIEDLTRHAESQQKHMAEKMPAK

SEQ ID NO: 9997 - DNA, 722 bp, Homo sapiens
aatctgcggggagcccctgccttaccagggcgttctctccgcccgccggtggatgctccgcgcctgccctccgcagcctcgctcagcagtcctgcgttggggtctgcgccctaggatgcactgagatggtacatcaggataactgctcgtatcagatggagtcttgctccgttgcccaggctggtgtgctgtggcgcaatcttggctcactgtaacctccacctcccgggttccagcgattctcccaccttagcctcctgagtagctgagattacacgcgtccaccaccatgcccagctaattttctgtatttttagtagaaacgggttttcaccatgttggccagactggtctcaaacttctgaccttaggtgatctgcccaccttagcctcccaaagtgctgggatcacagtcgtgagccaccgcgcctggccgacaacaggcttcttgaagacaaggggccttctttaaattttcacaagtctctgccttatacacagagtatgtgttcaataaatgtttgttggattgaattgcactttatgcaattgttgatgttctgagtccctaggatcagggtttcccatcgtaaccccagagataagctcagatccatacgttgtaacaaggagttggtgaagctgacctcagaagtccatgtacctggcttctcagcctcttggccagttgcccgcactttaaacatctcatgtgccagaat

SEQ ID NO: 9998 - protein, 48 aa, Homo sapiens
DALRWYIRITARIRWSLAPLPRLVCCGAILAHCNLHLPGSSDSPTLAS

SEQ ID NO: 9999 - DNA, 5976 bp, Homo sapiens
cacactcggccctgaacgcggagttgaatcagctggctgaagctgagtgcctctcttttcctttcttgggaacaggaaaggtgctgtggagaggaattggggcgggatcattcaggggaaggtgacagcagatggtgggaaggccggagtcagcaagccaagtgtcaggggcagagtgagcctcagaaaacagcagctgcccggtgccagagcaaggaaaggccagggaggctgggcggggcagtgtctgtgggacagagtggggcaagaacacacacggccgggcacagcctcttagccagctctccatgtcagtatgagcagtaaccagggaactgggcaattggcacatcagcctatcagaattcatgggaggttatttcttaagtgaaattctaaagagttaaaggatgaatttggacagtgatggaatggatgacatcatcagtcaagaatcctcattggatatggaggggaattataaaaaggcacagaaaaatgagagagagtctatcagacagaagttggcacttggaagcttctttgatgatggcccaggaatttataccagctgtagcaaaagtgggaagccaagcctttcctcccgactgcagagtgggatgaacttgcagatatgctttgtcaacgacagtggcagtgataaggacagtgatgctgatgacagtaagactgaaaccagcttggacacccccttgtctcccatggtgagtccaaacagcaccagctgaagctcggtgttgtgatttccgggccatttagcttcttttctgttgtaaggtgaatcaggaacaaacatttcagagattaaagaagaaaagtttcttggaattgcatgctcctaaaatttgacaatgattaaaaagtcaaagttgtaataaaatagagatatataagctttcttaaagttaataactattttcatattaaaccattagagaaatcaccagcctgggcaacatggcaaaaccctgtctctataaaaaaatacaaacattagctgatcatggtgcctatagtcccagctactcaggaggctgaggcgggaggatcagctgagcccaggagttcaaggctgcagtgagctatgatgacacctctgcactccagccggggcaacatagtgagaccctgtctctaacgagagagagtgtattagttcattttcatgttgccgataaagacatatccaagactgggcaatttacaaaagaaagaggtttaatggacttacagttccacatggctaatgaggccttgcaatcatggcggaaggcaaggaggagcaagtcacgtcttacatttttaaaaccatcatatctggtgagactcattcactatcacaagaacagtacaggaaagacccacccccataattcaattacctcccactgggttcctgccacgacacatgggaattgtgggagttacaattcaggatgagatttgggtgggtacacagccaaaccatatcagagagagagagagaaattagatatgctctaaaaattataaagagaaaataagctaaatccagttcttccctattgggcttagaaatattagctcatgtctttccttcccattacagaagttggctgaataatcatgggtgcctgttgctggaattctttcctctctgtgaggtctgtctatagccttttttaccaaagaccaacaaagaggaaactgttgtcgttgagtgcagtgcgacatcagaacatcactggatacatgagatcctgtccacgcaaagaacctacgtagggccttggcttcgagtcaatattttgttatgtctgttcacttcaggaaagttttgaggccaagaatcaaagacatatttcaaggttgttgtaaatatatttcccattattaactatactgctctctctgtttatgctaaaatctattttaaactagaccctttttctgttacttgagatttatcaactcaagtagcaagtcacattgagggagggaactctgagctgctctgagagaaggctcagaggatgttgtagcccatctctaagtggatgctagctggcatgcatggaaggctcaggctgctctttttccctttgcagagcaaacagagttcttcctattctgatagagacactactgaagaggagtctgaatccttggatgacatggacttccttacaaggcaaaagaaattgcaagctgaagccaaaatggcccttgccatggccaaaccaatggccaaaatgcaagtagaagtggagaaacagaacaggaaaaagtctcccgtcgctgatcttgtaagcagcaaaggctgaaatgcaaggaagtgtttgggagccagaaatggttgacactgtcccagtcctttcccagaattatgcaaacttgtgtttctctaaggcggtttgtaaaaagtcctgtcattgagaaatgattaagtttgtttctttttccttcctactgtaggactgaaaaatacagaagcaatagatttcacaaaagtaaagtttgctgttgattgatgtctactgtttcttagcaacaatattagctgccacgggaatatttaaattcctttgaagcgatctcaatctaagaacctattggtcttggcaaacttactattgctataattgtcattctcatatttcaataaagacaatatcacatagtgaataggagtcctggactttggagtttaagtctagctctgccattgacctgctatgaagttctaagcaagttacttaagtctcagttttctcatctataaaatggggatgataatgcctgtgtcagagtatgattgtgaggattcagtgagataaagtattcaaagcacatagcacagtgcttgtagcatggtataaattattaaatagtagctgatactaattttttccatgtcattgatattattgatgttccttgataattcatttgtggctataacattgactcacaacccatattaaagacgagtcaaaaagcttttgatgctggtagtgttgtgttttgatgccagttgcatattaggtaatgtagtgtggatgtagggccccacattgggaaagacacagactgggaaagcttttaatcactgaattgcagtgggtgggtgagtgggtcttttaagagaaaactgggtcttaacgttcagtgtgtttgtggctctgttcactcctccatttcttctcctttgtatcttcagctgccacacatgcctcatataagtgaatgcttgatgaaaagaagtttaaaacccaccgacctgagagacatgactattgggcagctacaagtgatagtcaatgatctccattcccagatagaaagcttgaatgaagagttggtccagctgcttctcatccgagatgagctgcacacagagcaggatgccatgctggtggacattgaagacttgaccaggtcagtgtggcttcactcttgccaaagaagaaaagcccagggtggtctgaaatctaagaattaggcaaaaactagctcaagagaacttcttcctctacttccataaataactcacctagccttttctggtgccagctgttcagatggaggggaagcagaattccattgtccttaccaaatgcatgctttttagcaaccatcccccccttgtgatgaattgtcagtgcattacttctcacatctccgcctaaatcaggtctagttctggttttggaggactttaccttgaaggactgtcccctgggaagctgggcataagccatgtcatgctggcatgtttccagcacaagcagccatgtgatgagttctccaaagcacaagctcttgtatgatccagttcttgatcgcctctgccatgcccagaaggcagggacactggcatctctctacagccacagtgccaccagattgttctcaccatggggaaactccaggacttgagtttttagctgggctttgctccaactgcctctttgtaaagaggtaaaaagaatgcttccctccctaggggacaaggaaactaggctaatgctggtcaaaattttgcacttctttgtagatttccttgcaggaaagcatgtcactgtaagtatataaagtacctggaatactgtaaacattcctatgagcacatatttactatggcatcttttctgagacagtccatatggaatctttaaaccaacagacagtaattgctattaatcccagaaacagtatttagagagtagaaggctctccaaagaaggaacacctcttggcacaatgatgtaaggagttaaccacatggtctacaacaatcccagagaagctcgaaaacatatgtagtgataataatgctcccagcacctaccatagacctcatctcaatgtgtaatgctgggtaaaataattgtctaatgctgcaatgatataaaaaatagttttggtagcaaaataaatgctggaaaaatatgtttaagctttcttttttaagacttacgggcagcactgttttgtatgttttacatattatattgccttatccctagccaaaaacaaaacaaaacagtaagccttctcatactctttgaacatatttgcctgcatctgaaatatcacaataacactcaaataatattattgccatctaaagatgtattcaggcactacaccaccagcaattataaaacatcccttttttgttagtttaagaagtttgcatgcaggtgttaagattatgggaaatcggtggtgaaatatacaatcagggcctacatttttttaaaaaaatatataaattcttgtaaactatgatttacctgtgacagcagagatcttttctctgtctctcagaatagtattgtcatttcttttttggcaagaagaagaggcccctcctcttctctctaagtgttaggctaatacttaggtttgcagtgtatgtttttataactttcagatggtgtgaccatcggaaacagggcaggcaaaaccatggagttaaaaggagaggagtcactaatttaaaggtgttggaggcattctttgaattggagcagtcctaccatgggccccaggggcatgatgtccttgcctagcctgcctcttggtgggaagaagcttctacatctgctcttggctgcagaaaagtaactttcctcattggagggacctgaggatacttaaacatccctaaaggcagcagccccagagtcctgcagccagatctcagaaggcggagggggtggctgtggggactgctgggacatgtggtccacctcttccctttacctgtacaactcctactattccagatgtccattcaaatcagtagttctcaatttgggttgcacaacagaaccatgtggggaggcttataaaatagtgatgcctggatcctaccccagatattcttatttaattatccttgtgggctagcgtgggcatgagaatttttttaaagctctgagataattctcacgcacagccaaatttgagaaccacaggtttggatgatgcttctttggagaagccctccctgacctccaaacacttggctctttagcattcattctccccttatatggactgtcagtgcattaaacttattacacctccatgtaaatcaggactgttcccaagggagttgaccctggtgtgtcagggtcattccatgctggcatgtttccagaacatgaacagccatgtcgtgggtctacaaaacagcaccagcaattatgtgacctgctttcgatcataagactgtgttaagaccttctcctcagtgttcctaacaacatcgcatctctgtcatgtggagcctagtggcactgtgttttatttgtctgctgtctctcccaacgtgactatgaattccctgaaaacagaggtgatgtcattttcattctttactgtgtccccagagcctagcacagggcctgccaggcacattgtaagccctcaatagcaattgttgttttaaaaaaaaaaaaaaaa

SEQ ID NO: 10000 - protein, 112 aa, Homo sapiens
MNLDSDGMDDIISQESSLDMEGNYKKAQKNERESIRQKLALGSFFDDGPGIYTSCSKSGKPSLSSRLQSGMNLQICFVNDSGSDKDSDADDSKTETSLDTPLSPMVSPNSTS

SEQ ID NO: 10001 - DNA, 867 bp, Homo sapiens
atcttcagctgccacacatgcctcatataagtgaatgcttgatgaaaagaagtttaaaacccaccgacctgagagacatgactattgggcagctacaagtgatagtcaatgatctccattcccagatagaaagcttgaatgaagagttggtccagctgcttctcatccgagatgagctgcacacagagcaggatgccatgctggtggacattgaagacttgaccagacatgctgaaagtcagcagaagcacatggcagagaaaatgcctgcaaagtgaaaagaagccattcaaccagagaacaagctagaatttattttgcttctgtggttgtaaaaatgctgttgctaaaggtggcgcagaaacaaatatcagtgttagtcattgataatgtctgaagcttaatgtccagtgattggcctttgcttcttaatttattttaattttttacttgtgccacttaatatcaggcattttaataaaatattgttacaaaaaatgtacagtactgacaccaccacaaatcatggttaataaaagagagtagttttaactttatttttatttgtttagagattttaagttggaacagtattttcccattgactacttttcattcttcactgtagttttaaagaagaactgtaaatgacggtgctatacaagtcaaaaaatacatgcctgcctcgtagtgaagttgtagctctccgtaatatgtatattttactcagttttcaacattttgtgaatgttgactacctgaagttcctttttagatgtgctattaacattctgttggattcagagggttccttgaaagttttatgtataaatatgtaaaataaaaattaaaactttgtttcatatc

SEQ ID NO: 10002 - protein, 86 aa, Homo sapiens
MPHISECLMKRSLKPTDLRDMTIGQLQVIVNDLHSQIESLNEELVQLLLIRDELHTEQDAMLVDIEDLTRHAESQQKHMAEKMPAK

SEQ ID NO: 10003 - DNA, 2422 bp, Homo sapiens
agctctttaggatcctccttgcttgataacagaatcactttctttcttacgtttgtcatccagaagtctaaagtcagtagcagtaatggaaagttgggctaatgtggagatattccaaacagagcaagagcaaatgggattcttggcttgtctctcatcgtgatcctgattgaagaccactggacacatctgtcaagactctaaccgcaatccattggaaatcactggagagccaaaggaaatgaagtctcagacatattgtccaggctggaatgtagcggctattcacaggcatgatcatagtgcactacagcctcaaactcctgggctcaagcaatcctcccatctcaatgtccggagtagctgggactacagatgtgtgttagcggctatggcagccatcttgtgaccaggaggaagcttctgagaatcacagagatgcaacctctgaagctgccaaaccactgccagcagctgcctaaccactgccagcagctgcctatctccagacatcttggttggtctaattgaaggcaatggagaagtaagtctttatggatcaaaatcttagctctagaaaaggcctaaggcaatagctaattgagactatgcatcactattaaggcatcttcactaaagggcgctgtggaaacgctgcctgagatgcagacacctgtcagaagggggctaaatttcaaacaaggaacgtggtgttgcatcacaataaatagatacggggtttcaccgtgttagccaggatggtctcgatctcctgacttcatgattcacatgcctcggcctcccaaagtgctgggattacagaacagaagaaacacacgtgttcttgtgtgtaaacccagtccatggaagagaccgtctgcttgtccctcctgatctctgggcccagacaaccagtagtcaccattccaagtgaggggtggctgcaactctacagccccgttcgtctctcctcactgtcaaagctgctgagaccccagactcgacacttgaaagaaacccatgtctgtgaagcacttgtggaccattcaagattgtggaagaatcactcaagagaaggagatagcaatatttgcagatatgcaaactggccccttgcatgcacatcctggagcacgtcctggagcctttagaggagacggctgctgctgttccagtctctccttaggcagacttgagtttctacccactcttcccaagcagccgcccctccgcacccgagcgagccaaagacctggcgggctgagtactcactgcgcgctggacacatgctgagccggcactgcagggacacagggcgagccgctggatgcagacctgtggccgcggcagttgggcttatcttgcccatgaagttgcctctgaagaaccaagtccaactgtgtatgctgagagatgtctggctacttcctgattgacagttctggcaaggtggcattgggccctggcttttcctctggaggcatcatcacttataggaaaatgtcccctgaagtccaaggatcaaagctgctggaacactgagaagctgaacaaaggagaactgtttctcatcaaacccagacttccagacttccaatagggtagaatgagcaagtcagcaaatcatcttccttggaaacagtgataaaactagatgacattgtcaacaacagccatttcagaaatctagaaaatgaccaaaggcaaacaacaaactgagaagcatttttttttccatgaaaaatcgctctatttctgcaaaaatagtgggagtctatggcttctcatccagggctgtttctctccccaccccagctcagtcagtacaaaggttctggcagcatgaggcagactgaacagacctgaagtttgattgctggaagaaactgactccaggtttggcagagggtgagaaacctactcccagccatgttgtctggtgacacagtgaccttagggacaagtgaatagggaaggccagtgattcattaacctgaggttgcagtcctggttggggaaagcatcagaatggcagataagctagaaatttagtagggatatgctggaaatgagacaaccccaaaggggcttgaccccaaagttgtccacacaccccagctgccttctgagcagatgtagggagagaccagagaaggcctaggctatccacacatctctggctaacccaggctgtaaacctgtggaggagacacaagaggtggattgattgctaatgggcatatgggggatcttactggttgataggaacattctcaaattggattgtggtgatgcttgcacaactctaagtttatcccaaattgctaaattttacactaaaaaggggtgaactttagggtatataaattatacatcaataaagttgtcataaagcattcacattctaataaatggctctaag

SEQ ID NO: 10004 - protein, 95 aa, Homo sapiens
MEETVCLSLLISGPRQPVVTIPSEGWLQLYSPVRLSSLSKLLRPQTRHLKETHVCEALVDHSRLWKNHSREGDSNICRYANWPLACTSWSTSWSL

SEQ ID NO: 10005 - DNA, 1528 bp, Homo sapiens
acggggcgtccggctaaggccggggacccagggtggtgggcggggtgtcccgcccgcctgtggaccccgcgcagtaactgcgaacatttcgctttcattttgggccgagctggaggcggcggggccgtcccggaacggctgcggccgggcaccccgggagttaatccgaaagcgccgcaagccccgcgggccggccgcaccgcacgtgtcaccgagaagctgatgtagagagagacacagaaggagacagaaagcaagagaccagagtcccgggaaagtcctgccgcgcctcgggacaattataaaaatgtggccccctgggtcagcctcccagccaccgccctcacctgccgcggccacaggtctgcatccagcggctcgccctgtgtccctgcagtgccggctcagcatgtgtccagcgcgcagcctcctccttgtggctaccctggtcctcctggaccacctcagtttggccagaaacctccccgtggccactccagacccaggaatgttcccatgccttcaccactcccaaaacctgctgagggccgtcagcaacatgctccagaaggccagacaaactctagaattttacccttgcacttctgaagagattgatcatgaagatatcacaaaagataaaaccagcacagtggaggcctgtttaccattggaattaaccaagaatgagagttgcctaaattccagagagacctctttcataactaatgggagttgcctggcctccagaaagacctcttttatgatggccctgtgccttagtagtatttatgaagacttgaagatgtaccaggtggagttcaagaccatgaatgcaaagcttctgatggatcctaagaggcagatctttctagatcaaaacatgctggcagttattgatgagctgatgcaggccctgaatttcaacagtgagactgtgccacaaaaatcctcccttgaagaaccggatttttataaaactaaaatcaagctctgcatacttcttcatgctttcagaattcgggcagtgactattgatagagtgatgagctatctgaatgcttcctaaaaagcgaggtccctccaaaccgttgtcatttttataaaactttgaaatgaggaaactttgataggatgtggattaagaactagggagggggaaagaaggatgggactattacatccacatgatacctctgatcaagtatttttgacatttactgtggataaattgtttttaagttttcatgaatgaattgctaagaagggaaaatatccatcctgaaggtgtttttcattcactttaatagaagggcaaatatttataagctatttctgtaccaaagtgtttgtggaaacaaacatgtaagcataacttattttaaaatatttatttatataacttggtaatcatgaaagcatctgagctaacttatatttatttatgttatatttattaaattatttatcaagtgtatttgaaaaatatttttaagtgttctaaaaataaaagtattgaattaaagtg

SEQ ID NO: 10006 - protein, 253 aa, Homo sapiens; identical to SEQ ID NO: 880

SEQ ID NO: 10007 - DNA, 1394 bp, Homo sapiens
tttcattttgggccgagctggaggcggcggggccgtcccggaacggctgcggccgggcaccccgggagttaatccgaaagcgccgcaagccccgcgggccggccgcaccgcacgtgtcaccgagaagctgatgtagagagagacacagaaggagacagaaagcaagagaccagagtcccgggaaagtcctgccgcgcctcgggacaattataaaaatgtggccccctgggtcagcctcccagccaccgccctcacctgccgcggccacaggtctgcatccagcggctcgccctgtgtccctgcagtgccggctcagcatgtgtccagcgcgcagcctcctccttgtggctaccctggtcctcctggaccacctcagtttggccagaaacctccccgtggccactccagacccaggaatgttcccatgccttcaccactcccaaaacctgctgagggccgtcagcaacatgctccagaaggccagacaaactctagaattttacccttgcacttctgaagagattgatcatgaagatatcacaaaagataaaaccagcacagtggaggcctgtttaccattggaattaaccaagaatgggagttgcctggcctccagaaagacctcttttatgatggccctgtgccttagtagtatttatgaagacttgaagatgtaccaggtggagttcaagaccatgaatgcaaagcttctgatggatcctaagaggcagatctttctagatcaaaacatgctggcagttattgatgagctgatgcaggccctgaatttcaacagtgagactgtgccacaaaaatcctcccttgaagaaccggatttttataaaactaaaatcaagctctgcatacttcttcatgctttcagaattcgggcagtgactattgatagagtgatgagctatctgaatgcttcctaaaaagcgaggtccctccaaaccgttgtcatttttataaaactttgaaatgaggaaactttgataggatgtggattaagaactagggagggggaaagaaggatgggactattacatccacatgatacctctgatcaagtatttttgacatttactgtggataaattgtttttaagttttcatgaatgaattgctaagaagggaaaatatccatcctgaaggtgtttttcattcactttaatagaagggcaaatatttataagctatttctgtaccaaagtgtttgtggaaacaaacatgtaagcataacttattttaaaatatttatttatataacttggtaatcatgaaagcatctgagctaacttatatttatttatgttatatttattaaattatttatcaagtgtatttgaaaaatatttttaagtgttctaaaaataaaagtattgaattaaagtg

SEQ ID NO: 10008 - protein, 239 aa, Homo sapiens
MWPPGSASQPPPSPAAATGLHPAARPVSLQCRLSMCPARSLLLVATLVLLDHLSLARNLPVATPDPGMFPCLHHSQNLLRAVSNMLQKARQTLEFYPCTSEEIDHEDITKDKTSTVEACLPLELTKNGSCLASRKTSFMMALCLSSIYEDLKMYQVEFKTMNAKLLMDPKRQIFLDQNMLAVIDELMQALNFNSETVPQKSSLEEPDFYKTKIKLCILLHAFRIRAVTIDRVMSYLNAS

SEQ ID NO: 10009 - DNA, 1511 bp, Homo sapiens
tttcattttgggccgagctggaggcggcggggccgtcccggaacggctgcggccgggcaccccgggagttaatccgaaagcgccgcaagccccgcgggccggccgcaccgcacgtgtcaccgagaagctgatgtagagagagacacagaaggagacagaaagcaagagaccagagtcccgggaaagtcctgccgcgcctcgggacaattataaaaatgtggccccctgggtcagcctcccagccaccgccctcacctgccgcggccacaggtctgcatccagcggctcgccctgtgtccctgcagtgccggctcagcatgtgtccagcgcgcagcctcctccttgtggctaccctggtcctcctggaccacctcagtttggccagaaacctccccgtggccactccagacccaggaatgttcccatgccttcaccactcccaaaacctgctgagggccgtcagcaacatgctccagaaggccagacaaactctagaattttacccttgcacttctgaagagattgatcatgaagatatcacaaaagataaaaccagcacagtggaggcctgtttaccattggaattaaccaagaatgagagttgcctaaattccagagagacctctttcataactgtaagtcaaaaaatgaaaagtttcagcctgtatgatgaattcatatcactgatgtctgattattttttcctctagaatgggagttgcctggcctccagaaagacctcttttatgatggccctgtgccttagtagtatttatgaagacttgaagatgtaccaggtggagttcaagaccatgaatgcaaagcttctgatggatcctaagaggcagatctttctagatcaaaacatgctggcagttattgatgagctgatgcaggccctgaatttcaacagtgagactgtgccacaaaaatcctcccttgaagaaccggatttttataaaactaaaatcaagctctgcatacttcttcatgctttcagaattcgggcagtgactattgatagagtgatgagctatctgaatgcttcctaaaaagcgaggtccctccaaaccgttgtcatttttataaaactttgaaatgaggaaactttgataggatgtggattaagaactagggagggggaaagaaggatgggactattacatccacatgatacctctgatcaagtatttttgacatttactgtggataaattgtttttaagttttcatgaatgaattgctaagaagggaaaatatccatcctgaaggtgtttttcattcactttaatagaagggcaaatatttataagctatttctgtaccaaagtgtttgtggaaacaaacatgtaagcataacttattttaaaatatttatttatataacttggtaatcatgaaagcatctgagctaacttatatttatttatgttatatttattaaattatttatcaagtgtatttgaaaaatatttttaagtgttctaaaaataaaagtattgaattaaagtg

SEQ ID NO: 10010 - protein, 164 aa, Homo sapiens
MWPPGSASQPPPSPAAATGLHPAARPVSLQCRLSMCPARSLLLVATLVLLDHLSLARNLPVATPDPGMFPCLHHSQNLLRAVSNMLQKARQTLEFYPCTSEEIDHEDITKDKTSTVEACLPLELTKNESCLNSRETSFITVSQKMKSFSLYDEFISLMSDYFFL

SEQ ID NO: 10011 - DNA, 1322 bp, Homo sapiens
tttcattttgggccgagctggaggcggcggggccgtcccggaacggctgcggccgggcaccccgggagttaatccgaaagcgccgcaagccccgcgggccggccgcaccgcacgtgtcaccgagaagctgatgtagagagagacacagaaggagacagaaagcaagagaccagagtcccgggaaagtcctgccgcgcctcgggacaattataaaaatgtggccccctgggtcagcctcccagccaccgccctcacctgccgcggccacaggtctgcatccagcggctcgccctgtgtccctgcagtgccggctcagcatgtgtccagcgcgcagcctcctccttgtggctaccctggtcctcctggaccacctcagtttggccagaaacctccccgtggccactccagacccaggaatgttcccatgccttcaccactcccaaaacctgctgagggccgtcagcaacatgctccagaagaatgagagttgcctaaattccagagagacctctttcataactaatgggagttgcctggcctccagaaagacctcttttatgatggccctgtgccttagtagtatttatgaagacttgaagatgtaccaggtggagttcaagaccatgaatgcaaagcttctgatggatcctaagaggcagatctttctagatcaaaacatgctggcagttattgatgagctgatgcaggccctgaatttcaacagtgagactgtgccacaaaaatcctcccttgaagaaccggatttttataaaactaaaatcaagctctgcatacttcttcatgctttcagaattcgggcagtgactattgatagagtgatgagctatctgaatgcttcctaaaaagcgaggtccctccaaaccgttgtcatttttataaaactttgaaatgaggaaactttgataggatgtggattaagaactagggagggggaaagaaggatgggactattacatccacatgatacctctgatcaagtatttttgacatttactgtggataaattgtttttaagttttcatgaatgaattgctaagaagggaaaatatccatcctgaaggtgtttttcattcactttaatagaagggcaaatatttataagctatttctgtaccaaagtgtttgtggaaacaaacatgtaagcataacttattttaaaatatttatttatataacttggtaatcatgaaagcatctgagctaacttatatttatttatgttatatttattaaattatttatcaagtgtatttgaaaaatatttttaagtgttctaaaaataaaagtattgaattaaagtg

SEQ ID NO: 10012 - protein, 215 aa, Homo sapiens
MWPPGSASQPPPSPAAATGLHPAARPVSLQCRLSMCPARSLLLVATLVLLDHLSLARNLPVATPDPGMFPCLHHSQNLLRAVSNMLQKNESCLNSRETSFITNGSCLASRKTSFMMALCLSSIYEDLKMYQVEFKTMNAKLLMDPKRQIFLDQNMLAVIDELMQALNFNSETVPQKSSLEEPDFYKTKIKLCILLHAFRIRAVTIDRVMSYLNAS

SEQ ID NO: 10013 - DNA, 1927 bp, Homo sapiens
tttcattttgggccgagctggaggcggcggggccgtcccggaacggctgcggccgggcaccccgggagttaatccgaaagcgccgcaagccccgcgggccggccgcaccgcacgtgtcaccgagaagctgatgtagagagagacacagaaggagacagaaagcaagagaccagagtcccgggaaagtcctgccgcgcctcgggacaattataaaaatgtggccccctgggtcagcctcccagccaccgccctcacctgccgcggccacaggtctgcatccagcggctcgccctgtgtccctgcagtgccggctcagcatgtgtccagcgcgcagcctcctccttgtggctaccctggtcctcctggaccacctcagtttggccagaaacctccccgtggccactccagacccaggaatgttcccatgccttcaccactcccaaaacctgctgagggccgtcagcaacatgctccagaaggccagacaaactctagaattttacccttgcacttctgaagagattgatcatgaagatatcacaaaagataaaaccagcacagtggaggcctgtttaccattggaattaaccaaggtataaaggattttcctcccagagcatgcagtgtggttaaaaactgtgcatcaaatctcacctgcttctaaaaattcacgtttctggtatccatcattatgggattttaactggtcctacttcagaagttagatttgggagaaaaattatttttaaaaaatggttttttttgcaacaatgtgaatacacttaacacttaaaaatagttcagatgctaaatattatgatatgtgtttttaccataataaaaaaaatttgagacctgaagagtcagaaagatttatactaagaattaatactttgatatatgattttttccctctagaatgagagttgcctaaattccagagagacctctttcataactgtaagtcaaaaaatgaaaagtttcagcctgtatgatgaattcatatcactgatgtctgattattttttcctctagaatgggagttgcctggcctccagaaagacctcttttatgatggtaagacacacagctctttcctcaaatgcaatgggggaaatgtttttagcccatctcaatggatacttccccatcttgtcatgtcacccaggccctgtgccttagtagtatttatgaagacttgaagatgtaccaggtggagttcaagaccatgaatgcaaagcttctgatggatcctaagaggcagatctttctagatcaaaacatgctggcagttattgatgagctgatgcaggccctgaatttcaacagtgagactgtgccacaaaaatcctcccttgaagaaccggatttttataaaactaaaatcaagctctgcatacttcttcatgctttcagaattcgggcagtgactattgatagagtgatgagctatctgaatgcttcctaaaaagcgaggtccctccaaaccgttgtcatttttataaaactttgaaatgaggaaactttgataggatgtggattaagaactagggagggggaaagaaggatgggactattacatccacatgatacctctgatcaagtatttttgacatttactgtggataaattgtttttaagttttcatgaatgaattgctaagaagggaaaatatccatcctgaaggtgtttttcattcactttaatagaagggcaaatatttataagctatttctgtaccaaagtgtttgtggaaacaaacatgtaagcataacttattttaaaatatttatttatataacttggtaatcatgaaagcatctgagctaacttatatttatttatgttatatttattaaattatttatcaagtgtatttgaaaaatatttttaagtgttctaaaaataaaagtattgaattaaagtg

SEQ ID NO: 10014 - protein, 127 aa, Homo sapiens
MWPPGSASQPPPSPAAATGLHPAARPVSLQCRLSMCPARSLLLVATLVLLDHLSLARNLPVATPDPGMFPCLHHSQNLLRAVSNMLQKARQTLEFYPCTSEEIDHEDITKDKTSTVEACLPLELTKV

SEQ ID NO: 10015 - DNA, 427 bp, Homo sapiens
gtggggctgagacttcgcgtcttaacaagctgctctcagttgatgctgatcctcatggtccaatgtatgacaatgctgttgaatgtgcctcttcatttcagcacactgccttcaggcagggaatgggccactcctggcaccctgcacattttagcatttgtttcctgtctctccccactagaatgcaagctgcagaggaattgtatccgtagcacctggcttcgcagaccaagagcaagtcggcacaccaggacaggcactcgcatgggtgcccagaagtttcaagatctgaccttggagagaccaggtccgggaggctgccgggaagtctccatcacaccggcctcagccgagtcacaggaacgcaggctctgccatgcccagaagcctgagatgcaacttcaaggacaacgggagccagaacgct

SEQ ID NO: 10016 - protein, 127 aa, Homo sapiens
MLILMVQCMTMLLNVPLHFSTLPSGREWATPGTLHILAFVSCLSPLECKLQRNCIRSTWLRRPRASRHTRTGTRMGAQKFQDLTLERPGPGGCREVSITPASAESQERRLCHAQKPEMQLQGQREPE

SEQ ID NO: 10017 - DNA, 538 bp, Homo sapiens
gtccacaggcttcgcagaccaagagcaagtcggcacaccaggacaggcactcgcatgggtgcccagaagtttcaagatctgaccttggagagaccaggtccgggaggctgccgggaagtctccatcacaccggcctcagccgagtcacaggaacgcaggctctgccatgcccagaagcctgagatgcaacttcaaggacaacgggagccagaacgcttgacctcacacggaaggtgactcctaaccaccaccacacttgacgtagcaccagcacacggagattaggcctacaccaatggctaattgagaccatgcatcactattaaggcatcttcagcaaaaggaactatggaagttctgcatgaaacatagacacctgttagaaaaggaactaaatttcaaaccgggaatgtggtgttgaatcacagcaaagtgtccagaaggaactcccaaagtactgttttccaaaatatagaatgatatagaagattgttttaggtggaattcctggaaataaatttttaaatgtttctttttg

SEQ ID NO: 10018 - protein, 60 aa, Homo sapiens [sequence omitted]

SEQ ID NO: 10019 - DNA, 1929 bp, Homo sapiens
aagctggtcctcaaagtaggagggaacgaagtcaccgaactctccatgggcagctcgaggcacgactccagcctcttcgaaattccaggggaagaaaaggggagaaaacggagaagagttaaggaggataaaaagaagcgagatcgagaccgggtggagaatgaggcagaaaaagacctccagtgtcacgcccctgtgagattagacttgccccctgagaagcctctcacaagctctttagccaaacaagaagtagaacagacaccccttcaagaagctttgaatcaactgatgagacaattgtagagaaaagatccaagtgctttcttttcatttcctgtgactgattttattgctcctggctactccatgatcattaaacacccaatggattttagtaccatgaaagaaaagatcaagaacaatgactatcagtccatagaagaactaaaggataacttcaaactaatgtgtactaatgccatgatttacaataaaccagagaccatttattataaagctgcaaagaagctgttgcactcagggatgaaaattcttagccaggaaagaattcagagcctgaagcagagcatagacttcatggctgacttgcagaaaactcgaaagcagaaagatggaacagacacctcacagagtggggaggacggaggctgctggcagagagagaggactctggagatgccgaagcacacgccttcaagagtcccagcaaagaaaaagaaaaagatacgcttgaagataagtttaaaagcaataatttagagagagagcaggagcatcttgaccgcattgtgaaggaatctggaggaaaactgaccaggcggcttgtgaacagtcagtgcgaatttgaaagaagaaaaccagatggaacaacgacgttgggacttctccatcctgtggatcccattgtaggagagccaggctactgccctgtgagactgggaatgacaactggaagacttcagtctggagtgaatactttgcaggggttcaaagaggataaaaggaacaaagtcactccagtgttatatttgaattatgggccctacggttcttatgcaccgcattatgactccacatttgcgaatatcagcaaggatgattctgatttaatctattcaacctatggggaagactctgatcttccaagcgttttcagcatccatgagtttttggccacgtgccaagattatccatatgtcatggcagatagtttactggatgttttaacaaaaggagggcattccaggaccctacaagagatggagatgtcattgcctgaagatgaaggccatactaagacacttgacacagcaaaaaaaaatggagattacagaagtagagcccccagggcgtttggagtccaatactcaagacaggctcatagcgctgaaagcagtaacaaattttggcgttccagttgaagtttttgactctgaagaagctgaaatattccagaagaaatttggtgagaccaccagattgctcagggaactccaggaagcccagaatgaacgtttgagcaccagaccccctcccaacatgatctgtctcttgggtccctcatacagagaaatgcatcttgctgaacaagtgaccaataaccttaaagaacttgcacagcaagtaactccaggtgatatcgtaagcatgtatggagttcgaaaagcaatgggtatttccattccttcccccgtcatggaaaacaactttgtggatttgacagaagacactgaaaaacctaaaaagacggatgttgctgagtgtggacctggtggaagttgaggctgcctggtatttgattatatattatgtacatactttttcattcttaacttagaaatgcttttcagaagatattaaatatttgtaaattgtgtttttaattaaactttggaacagtgaaaa

SEQ ID NO: 10020 - protein, 86 aa, Homo sapiens
MGSSRHDSSLFEIPGEEKGRKRRRVKEDKKKRDRDRVENEAEKDLQCHAPVRLDLPPEKPLTSSLAKQEVEQTPLQEALNQLMRQL

SEQ ID NO: 10021 - DNA, 4912 bp, Homo sapiens
acagtagaaagtcagaaggtcacaaagcttgcagggtaagtgacacaacttgaaactgcttggccctctttaaaaagaaataataaaatgggagagaatgaagcaagtttacctaacacgtctttgcaaggtaaaaagatggcctatcagaaggtccatgcagatcaaagagctccaggacactcacagtacttagacaatgatgaccttcaagccactgcccttgacttagagtgggacatggagaaggaactagaggagtctggttttgaccaattccagctagacggtgctgagaatcagaacctagggcattcagagactatagacctcaatcttgattccattcaaccagcaacttcacccaaaggaaggttccagagacttcaagaagaatctgactacattacccattatacacgatctgcaccaaagagcaatcgctgcaacttttgccacgtcttaaaaatactttgcacagccaccattttatttatttttgggattttgataggttattatgtacatacaaattgcccttcagatgctccatcttcaggaacagttgatcctcagttatatcaagagattctcaagacaatccaggcagaagatattaagaagtctttcagaaatttggtacaactatataaaaatgaagatgacatggaaatttcaaagaagattaagactcagtggacctctttgggcctagaagatgtacagtttgtaaattactctgtgctgcttgatctgccaggcccttctcccagcactgtgactctgagcagcagtggtcaatgctttcatcctaatggccagccttgcagtgaagaagccagaaaagatagcagccaagacctgctctattcatatgcagcctattctgccaaaggaactctcaaggctgaagtcatcgatgtgagttatggaatggcagatgatttaaaaaggattaggaaaataaaaaacgtaacaaatcagatcgcactcctgaaattaggaaaattgccactgctttataagctttcctcattggaaaaggctggatttggaggtgttcttctgtatatcgatccttgtgatttgccaaagactgtgaatcctagccatgataccttcatggtgtcactgaatccaggaggagacccttctacgcctggttacccaagtgtcgatgaaagttttagacaaagccgatcaaacctcacctctctattagtgcagcccatctctgcacccctcgttgcaaaactgatctcttcgccaaaagctagaaccaaaaatgaagcgtgtagctctctagagcttccaaataatgaaataagagtcgtcagcatgcaagttcagacagtcacaaaattgaaaacagttactaatgttgttggatttgtaatgggcttgacatctccagaccggtatatcatagttggcagccatcatcacactgcacacagttataatggacaagaatgggccagtagtactgcaataatcacagcgtttatccgtgccttgatgtcaaaagttaagagagggtggagaccagaccgaactattgttttctgttcttggggaggaacagcttttggcaatattggctcatatgaatggggagaggatttcaagaaggttcttcagaaaaatgttgtggcttatattagcctccacagtcccataagggggaactctagtctgtatcctgtagcatcaccatctcttcagcaactggtagtagagaaaaataatttcaactgtaccagaagagcccagtgcccagaaaccaatatcagttctatacagatacaaggtgatgctgattatttcatcaaccatcttggagttcccatcgtgcagtttgcttacgaggacatcaaaacattagagggtccaagttttctctccgaggcccgtttttctacacgagcaacaaaaattgaagaaatggatccctctttcaaccttcatgaaaccattactaagctctcaggagaagtgattttgcaaattgccaacgaacctgttctgccctttaatgcacttgatatagctttagaagttcaaaacaaccttaaaggtgatcaacccaacactcatcaactgttagccatggcgttacgcctgcgggagagtgctgaactttttcagtctgatgagatgcgacctgctaatgatcccaaggagagagcacccatccgcatccggatgctgaatgacattctccaagacatggagaaaagctttctggtaaagcaggcaccaccaggtttttatagaaacatcctctaccaccttgatgaaaagacaagccggttttcaatacttatagaggcttgggaacactgcaaaccccttgcatcaaatgagacccttcaagaagccctgtcagaggtgttgaacagcattaattcagctcaggtttacttcaaagcaggacttgatgtgttcaagagtgtcttggatgggaagaattgagaaaactctgagcatttttaaaagtttgtttacaattccacaagcaaaagctctaatttaaccagattttctgacattgaaggcttattttccccaatggctttttgacaagtataaagctattattacattgtattttttaaatgtaaatatagaaagaacattttgcacatttaatatttttcttatatctacatttctgaatatgtaaagcaagttattgaaataggacttaagaattacctattaaaaagaaatctgatatataaaaatatgtactattttaaggaaaaatttccaagaagttctggactatctttgttcctatggggagggcatataggaacacagtttattctctctgatagagctattaatgacttagtttctgtaaaagaaatggagagttgatatggttcagattaacttcactattaagtgttcaatatgaagaattcaagtattctgactgagtgattggttgacctaaaccactttgaatgtttctattttatgaaatgaagtttctcttcttaacacaactagatgtagtaatacactggttatgaaattgtatttttttaagtattaatgaaaaaagagccataagcattccaggagaaaatctcaagggagctacatagagcaatttaaatgcaaatttttttcctaacaacttacaaggtgactagctttgaaacccctaatttgcctcagttgattttctaagaatttcaggagtgatgtatgtcttaagagggagaaaaaaatatttcttattactttttctcttgtttctgttggaaacactgaagcagggactctaaaatgaaagcatctcacattggttttctttcttgtatcttttctgaaactccttgctgtaaggcagctttctcagagtactatatattttcaacagtaaagtagcagagtttctctttgaaacccaaaatgtcttctaaagaatcaaatttctatttctgcctctgacaaaaagaacttactatgaaagaaatagttgttttatcaataaaagccccttaatattatgaagaaacttttcatattttttcttctttatccttaattgtgactaagatggaaatctagaaaatattcatgcttctaagtttctgcagtgttactgtaagagagtgtctcgtctacacttcagttcttctctcatgtggaaaactaagctttttatattgacattgccattgaatagctctagcaactattattattcccccaaaccctaaaattctacctattaggtgtcaggttaaagttctaatttatctttagaaatttatgtgaaaaatggttttcctatactggataaagcaattccccttaggaaacatagcctcagagtatttcatataaattttctctatctaattcaaacatatctccccatgatacaccgccagagtgacattgcagacagtctgtgtatgtttaaattttcactttttatggatgagcataaacctagtcttagtttaaaggcaaactaaagttgaggggaaataattaatcaatactgattaattgatttataaggttcaacactgtctaccctaaataatttttatatgctcaaggcaaagcagggaatagaggcaattagctagataattcaagcagaaatccattttcatcgaaattgcctgtgtgcacatatttttagatgaaaaatgaaactaccttacaatattatttttttaaccaatgtatttgtttgcaaacatttgccatgttgaagagtgtgtataggaaaggtctagaaataaataggcttgtgcatacctaggcattcatgctctttcttcctcttcagagatcatcagaaaagaggtgggaatacacaagcaggtgcatgtaagcccaaaagctagaaagccttatatttaaccaaaggttgatgtgttcattccagttattcacttacagatgaaactaaaacaaataaaggcaagctattatcagtttggtagttcattattttagaacaaatttctaaattaatttattcccataacctacaatagcactgagaacagaaaacatgtttcttcttcattttgtttaaagattgcgtacctaggtaagtcacactgtatagataaaaaccttcttctgtattcctcacctctaaattatatgttatttgctatttgaaaactgtagttaactatggttttttattagtctattaaaagatacgtggagatattaaattatacctaaagcagacgtccaacaaattctgtacatgctgctttacatctttgcaacaaacctcttaactagcagcattatttctatagtgtgattacctgagggtgcctccaaatgtatatcatttcactcccctcccctccccacccccaatagattcaaataaataaaatcctgagcaaattaa

SEQ ID NO: 10022 - protein, 795 aa, Homo sapiens
MGENEASLPNTSLQGKKMAYQKVHADQRAPGHSQYLDNDDLQATALDLEWDMEKELEESGFDQFQLDGAENQNLGHSETIDLNLDSIQPATSPKGRFQRLQEESDYITHYTRSAPKSNRCNFCHVLKILCTATILFIFGILIGYYVHTNCPSDAPSSGTVDPQLYQEILKTIQAEDIKKSFRNLVQLYKNEDDMEISKKIKTQWTSLGLEDVQFVNYSVLLDLPGPSPSTVTLSSSGQCFHPNGQPCSEEARKDSSQDLLYSYAAYSAKGTLKAEVIDVSYGMADDLKRIRKIKNVTNQIALLKLGKLPLLYKLSSLEKAGFGGVLLYIDPCDLPKTVNPSHDTFMVSLNPGGDPSTPGYPSVDESFRQSRSNLTSLLVQPISAPLVAKLISSPKARTKNEACSSLELPNNEIRVVSMQVQTVTKLKTVTNVVGFVMGLTSPDRYIIVGSHHHTAHSYNGQEWASSTAIITAFIRALMSKVKRGWRPDRTIVFCSWGGTAFGNIGSYEWGEDFKKVLQKNVVAYISLHSPIRGNSSLYPVASPSLQQLVVEKNNFNCTRRAQCPETNISSIQIQGDADYFINHLGVPIVQFAYEDIKTLEGPSFLSEARFSTRATKIEEMDPSFNLHETITKLSGEVILQIANEPVLPFNALDIALEVQNNLKGDQPNTHQLLAMALRLRESAELFQSDEMRPANDPKERAPIRIRMLNDILQDMEKSFLVKQAPPGFYRNILYHLDEKTSRFSILIEAWEHCKPLASNETLQEALSEVLNSINSAQVYFKAGLDVFKSVLDGKN

SEQ ID NO: 10023 - DNA, 1688 bp, Homo sapiens
cagtagaaagtcagaaggtcacaaagcttgcagggtaagtgacacaacttgaaactgcttggccctctttaaaaagaaataataaaatgggagagaatgaagcaagtttacctaacacgtctttgcaaggtaaaaagatggcctatcagaaggtccatgcagatcaaagagctccaggacactcacagtacttagacaatgatgaccttcaagccactgcccttgacttagagtgggacatggagaaggaactagaggagtctggttttgaccaattccagctagacggtgctgagaatcagaacctagggcattcagagactatagacctcaatcttgattccattcaaccagcaacttcacccaaaggaaggttccagagacttcaagaagaatctgactacattacccattatacacgatctgcaccaaagagcaatcgctgcaacttttgccacgtcttaaaaatactttgcacagccaccattttatttatttttgggattttgataggttattatgtacatacaaattgcccttcagatgctccatcttcaggaacagttgatcctcagttatatcaagagattctcaagacaatccaggcagaagatattaagaagtctttcagaaatttggtacaactatataaaaatgaagatgacatggaaatttcaaagaagattaagactcagtggacctctttgggcctagaagatgtacagtttgtaaattactctgtgctgcttgatctgccaggcccttctcccagcactgtgactctgagcagcagtggtcaatgctttcatcctaatggccagccttgcagtgaagaagccagaaaagatagcagccaagacctgctctattcatatgcagcctattctgccaaaggaactctcaaggctgaagtcatcgatgtgagttatggaatggcagatgatttaaaaaggattaggaaaataaaaaacgtaacaaatcagatcgcactcctgaaattaggaaaattgccactgctttataaggttggtccagtgaatgttattcagtggtttggtcaatattttgccttgttttgttggaattatatgcttttgtgagtgtggagtgtgtgtgtgcatataggtgtgtgagagagagaaggggagaggaagaaagagaggcagagagtgtcacagaaagatggcttttccacattagaacattttaatttaagatatttaagaacaatatatttatgcccttatttctttagagagaaaataccttaagtcaggtaacactgagtttgtgggaccttaataaaattggcatactcttcataatggtacctatctggaatagtaaaaaatgagaaccaccctgtgttcatcttatgacatatgtgaaacttctaatctattatcaaatggactaattatcatgttctctatgttagacaagtatctagatgatttacaccctttagtgattattttgtcaactatacaactacagttactaactgtgatcaggattttaattaaaatataattgctaagagtagcagaattttgatttattttatttgaatggaagtttattaacactcatccacagatacacttatgtaattaagtttctgatgatgaaccagcacaatagacagccactactgctcattcttgcttcatttcctttttctattt

SEQ ID NO: 10024 - protein, 337 aa, Homo sapiens
MGENEASLPNTSLQGKKMAYQKVHADQRAPGHSQYLDNDDLQATALDLEWDMEKELEESGFDQFQLDGAENQNLGHSETIDLNLDSIQPATSPKGRFQRLQEESDYITHYTRSAPKSNRCNFCHVLKILCTATILFIFGILIGYYVHTNCPSDAPSSGTVDPQLYQEILKTIQAEDIKKSFRNLVQLYKNEDDMEISKKIKTQWTSLGLEDVQFVNYSVLLDLPGPSPSTVTLSSSGQCFHPNGQPCSEEARKDSSQDLLYSYAAYSAKGTLKAEVIDVSYGMADDLKRIRKIKNVTNQIALLKLGKLPLLYKVGPVNVIQWFGQYFALFCWNYMLL

SEQ ID NO: 10025 - DNA, 408 bp, Homo sapiens
cctatgacagacaaggcaagctctactctcagaagcaaaaattatatatctaggagtcagagtatgaatcaagaagaatggacttctgcttcttatctacctaatgccagataatgatgacagcaatgcattttctacattcatatcctcaatcatatgtttttgaatgcttactggaaaaccggtttaaaagaaaggtgactagttattggtcttgctctgacagccgtggaaaccatttgctgatgaaagcacaagcaacaacaacaaaaaagatgaataaactggatttcaacaaaaacacatttgtgcttcagagaacataatcaagaaagtgaaaaggcaacccaccaatgggagaacacagtttcaaaacatatatctaataaaatatttgagtccagatta

SEQ ID NO: 10026 - protein, 70 aa, Homo sapiens
MMTAMHFLHSYPQSYVFECLLENRFKRKVTSYWSCSDSRGNHLLMKAQATTTKKMNKLDFNKNTFVLQRT

SEQ ID NO: 10027 - DNA, 1574 bp, Homo sapiens
actttttacctcagggtcattagaaagccaccacagatctaggcatctaagcaggaataggagaggaaaggcaactgtagccacattaatcacttttatcaggaagataaatgcttttcccgaatctttcaacaggctttcattttacattgggcatatttttgtcatatagccttccctagctgcaagggaggcttttcaaacttctttatggaattcagcaagaaagtaaagaggataaaatgaagcacactggatgaatggtgtggcttgatgaaattaagaaatttggtacaactatataaaaatgaagatgacatggaaatttcaaagaagattaagactcagtggacctctttgggcctagaagatgtacagtttgtaaattactctgtgctgcttgatctgccaggcccttctcccagcactgtgactctgagcagcagtggtcaatgctttcatcctaatggccagccttgcagtgaagaagccagaaaagatagcagccaagacctgctctattcatatgcagcctattctgccaaaggaactctcaaggctgaagtcatcgatgtgagttatggaatggcagatgatttaaaaaggattaggaaaataaaaaacgtaacaaatcagatcgcactcctgaaattaggaaaattgccactgctttataagctttcctcattggaaaaggctggatttggaggtgttcttctgtatatcgatccttgtgatttgccaaagactgtgaatcctagccatgataccttcatggtgtcactgaatccaggaggagacccttctacgcctggttacccaagtgtcgaaataagagtcgtcagcatgcaagttcagacagtcacaaaattgaaaacagttactaatgttgttggatttgtaatgggcttgacatctccagaccggtatatcatagttggcagccatcatcacactgcacacagttataatggacaagaatgggccagtagtactgcaataatcacagcgtttatccgtgccttgatgtcaaaagttaagagagggtggagaccagaccgaactattgttttctgttcttggggaggaacagcttttggcaatattggctcatatgaatggggagaggatttcaagaaggttcttcagaaaaatgttgtggcttatattagcctccacagtcccataagggggaactctagtctgtatcctgtagcatcaccatctcttcagcaactggtagtagagaaaaataatttcaactgtaccagaagagcccagtgcccagaaaccaatatcagttctatacagatacaaggtgatgctgattatttcatcaaccatcttggagttcccatcgtgcagtttgcttacgaggacatcaaaacattagagggtccaagttttctctccgaggcccgtttttctacacgagcaacaaaaattgaagaaatggatccctctttcaaccttcatgaaaccattactaagtgaagaacacacatgctttcatagtcttggaatgtgtggtatgtactctatgattgctgaaataaagtgcttttgaaaatcct

SEQ ID NO: 10028 - protein, 406 aa, Homo sapiens
MKLRNLVQLYKNEDDMEISKKIKTQWTSLGLEDVQFVNYSVLLDLPGPSPSTVTLSSSGQCFHPNGQPCSEEARKDSSQDLLYSYAAYSAKGTLKAEVIDVSYGMADDLKRIRKIKNVTNQIALLKLGKLPLLYKLSSLEKAGFGGVLLYIDPCDLPKTVNPSHDTFMVSLNPGGDPSTPGYPSVEIRVVSMQVQTVTKLKTVTNVVGFVMGLTSPDRYIIVGSHHHTAHSYNGQEWASSTAIITAFIRALMSKVKRGWRPDRTIVFCSWGGTAFGNIGSYEWGEDFKKVLQKNVVAYISLHSPIRGNSSLYPVASPSLQQLVVEKNNFNCTRRAQCPETNISSIQIQGDADYFINHLGVPIVQFAYEDIKTLEGPSFLSEARFSTRATKIEEMDPSFNLHETITK

SEQ ID NO: 10029 - DNA, 907 bp, Homo sapiens
acttggtgaaattcctcagggattttgagacatcaaagcaatctctctagttctggaaagactgaatttgcagcatctgctgaaatgaggaataatcaatgttcaccagcggaaattgaaaagcaaagagatggggaagattccaaggatccactcaagttcctggtgtttttgtgaatgttctgtgtttaagacatgcttttgtttaggagaagacatgagctgagccaactgggataaagaagaggttgaaaatgcgtatggcttagacagagtaaagagttttagataaaatatcggggtaacttttagagtcttggcttaaggccaaagcttctgaatcaaggaaagagtgacagttgccttcctctatttttattaatatacaggtgtgttaccattattacctgccagaaagagcataatattaatccaatcaaattatatgagtcctacagtagaaatattgcagacatttaatattatattgaagtttaattaatggtaagacatttcaaggtggtaatagttatatgcagctctttggctaaaagtcaaagtgtgatatatacagaatagaaacgatgctggactgccagaaaatctgcctctccctcccactcccccaagatctattaggaacgagcatttactgttattatttcaaatatttatgcaaagtaattttaaatgatttaaacattccatatatcaatcaaagttaataataagttagattctgaaacatttgtgccattaacaacagtcagaaagataacattatttcattggtattaaatgaggcaatcaacagtttgatggaaaaaaaaaaaaaactaagtgtattttttaaaattacacttttacatagagttagaaaactagtccatagaaaggaaactgttga

SEQ ID NO: 10030 - protein, 30 aa, Homo sapiens
MRNNQCSPAEIEKQRDGEDSKDPLKFLVFL

SEQ ID NO: 10031 - DNA, 1222 bp, Homo sapiens
cggtgtagcacgatggaatctggtggcttaaacctagctgtccacatttcactatctgaagagcagaaaatgtgttaataggagcctggtgagtggaggagactgaagatggagagagagcctggacctcaacatgagcatctggagccatttggcagcattaggctgtgaccgcttagagaaccgaaaggtgcagagctttaaaggattatggagtctgaagaccaaatgggatgatggagaacagctattcagtggtacaaatgtaaatgctcccaggcccgggcagaaaagagaaaacatttccatggaagaggaaacaggaaattccaacagatcagcaacagttggagtgctaacctgtcactggaatgggaaaaaaaatgctgtcgttgacacatcttttccttgtttttgacacaaattagaaacaccacctggaacacagctgtgacttgataaacaagtgaaacattctttggtgtggtgaggggaaaacaaatttctcaaaggacacgcaccatggtgtatgagaggacactggagcccagccagcatctgacatgctgaattcaaagtgcaggtgaaagtaggacaactgattcacaagctgggatgcctgtgttgttgtttgccagtgtgcgtgtgtgtgttttcctggcacccttcattcattccccagcacagttgacatcaggttggaagcagtgagttctgagggagactgctagaggacccaacttggagaatcaacgatctgcgatgaagataatgaagataaagacaatgtcaatgtcagcgtccaaaatcataaggaccctttaagaagcttccagagcagaagtgactgtgcaagaagggccaataaagtctaggcaatgcacgaccaggcgcggtcgctcacgcctgtaatcccagcactttgggaggccgaggtggttggattacctgaggttaggagtttgagaccagcctgaccaacatagtttcaccccatctctactaaaaaaaaaaaaaaaaacaaaacaaaagttagccaggtgtggtgctgcacacctgtaatcccagctactctggaagctgaggcaggagaatcgcttgaacccaggaggcggaggtggcagtgagctgagattgcaccgctgcactccagcctgggcgacagagtgagactctgtctcaaaaataaataaataaataaataataaagtctaggcaatgc

SEQ ID NO: 10032 - protein, 94 aa, Homo sapiens [sequence omitted]

SEQ ID NO: 10033 - DNA, 647 bp, Homo sapiens
gccaccatccatgtaagatgtgacttgctcctccttgccttctgccatgattgtgaggcctccccagccacttggaactgaagcaaacactgctattgccacctttttgcagaggaaggtactgaggtgaagcgacttgcccaaaccctacaaaaagcactgtgccaggtgctggatttataaccacaaaaacagaggggcagaatgtctgcatttccagtgggcaagacagacaatgtgcctatctgtgcatttccttgtaaaatccagctttcgcaagagcatgaacaaatcagtttggcaagacctccccaccctcaacatctgatcacgtgtctcatcctccatgatgccacaggtggtcttcagggctgtctccatgaagtcatcaccagccttcccaggccaggactctccatgccatccttagcaaggagaagaaaacaaatacccggcatccatttccaggtcctgcatgatgtgatgtcagaagagaagacaggaatatatgaaacaggagcaatcacaagaacgtaacagaggacacaggtgtcatgttcatggcacagaacagaagccccatagagttcaaaagacgggatgactggagatatccttgacacattgagctaaaaaaaaaaactaaa

SEQ ID NO: 10034 - protein, 110 aa, Homo sapiens; identical to SEQ ID NO: 4486

SEQ ID NO: 10035 - DNA, 383 bp, Homo sapiens
agggcaggggaataaaagggatgggagtgaggttgctgggggcaactgaattcacactggcccagggtggtgggccagctccctcctctctttgctcctccaatatataggcacctggagccagagggtttgttagttttaagaccccacctacatttcctatcctgggttactgacactggcagggactgacttgtaatggcaggagctggctaatcagttgcaagttcctgacatctggtaatggagaggaacaaagagtgggaggccaaatagggaacagacaagccccatgcggggtaaagtgaaatagggcagaagtggctgggcaggaagaccgagaaacacacacatgacatgttcagacatatccacattctctc

SEQ ID NO: 10036 - protein, 53 aa, Homo sapiens [sequence omitted]

SEQ ID NO: 10037 - DNA, 925 bp, Homo sapiens
catccatgtaagatgtgacttgctcctccttgccttctgccatgattgtgaggcctccccagccacttggaactgaagcaaacactgctattgccacctttttgcagaggaaggtactgaggtgaagcgacttgcccaaaccctacaaaaaattggaaattttcaaaaaaaaaaaaaaaaaagggaaaaggaaggaagagagaaaaggaaattggcccttctgcacaaagaagttgagaagagtggtcttcaatgaatcaggcttgacctagtccttgcagatgagtaagacttccacagctaactatgtgaaagaagggtggaacgaggacagtcagcagcatctattcagaaggggggattccgggaacaaatgaagacaaacacaacttgtgcagttggaagatatgaagtggacaaggttttgccatggtgcccaagctgctctcaaactcctggactcaagcaatccacccacctcagcctcccaaagtgttgggattacaggtgtgagcactgaatcttggcctgaaacgcagccaagaacagattctttgtagcaataatacagcaaattccaacctgactctagtataatatcacataacagataaagaaggatatcaaaatattttacaccaaattatgtttctttgccatattttgaaatggtcccgcaaagccattttttgtggggaaacttttgcatctgtaaagaatctctgttaacttaacataactagatctttccccttccagccccctcaaccctgaagagattaactgagagtcaaataccttttaaaggtctaaataggaaacatttgccatctattgtctctaagggcagcaacctctgtgatatcttctactaataagaactttggtctccacaaccccttatcttaacccagacacttctttt

SEQ ID NO: 10038 - protein, 50 aa, Homo sapiens [sequence omitted]

SEQ ID NO: 10039 - DNA, 1044 bp, Homo sapiens
ttccacctccagcctgtgagatgcctgcagggagccatcctgagtcctccgaattgacacagtgtctttggggtaggaatttcccagtgaatgcttacttaaatgaattcaaaaagagaaaacatttccatggaagaggaaacaggaaattccaacagatcagcaacagttggagtgctaacctgtcactggaatgggaaaaaaaatgctgtcgttgacacatcttttccttgtttttgacacaaattagaaacaccacctggaacacagctgtgacttgataaacaagtgaaacattctttggtgtggtgaggggaaaacaaatttctcaaaggacacgcaccatggtgtatgagaggacactggagcccagccagcatctgacatgctgaattcaaagtgcaggtgaaagtaggacaactgattcacaagctgggatgcctgtgttgttgtttgccagtgtgcgtgtgtgtgttttcctggcacccttcattcattccccagcacagttgacatcaggttggaagcagtgagttctgagggagactgctagaggacccaacttggagaatcaacgatctgcgatgaagataatgaagataaagacaatgtcaatgtcagcgtccaaaatcataaggaccctttaagaagcttccagagcagaagtgactgtgcaagaagggccaataaagtctaggcaatgcacgaccaggcgcggtcgctcacgcctgtaatcccagcactttgggaggccgaggtggttggattacctgaggttaggagtttgagaccagcctgaccaacatagtttcaccccatctctactaaaaaaaaaaaaaaaaacaaaacaaaagttagccaggtgtggtgctgcacacctgtaatcccagctactctggaagctgaggcaggagaatcgcttgaacccaggaggcggaggtggcagtgagctgagattgcaccgctgcactccagcctgggcgacagagtgagactctgtctcaaaaataaataaataaataaataataaagtctaggcaatgc

SEQ ID NO: 10040 - protein, 65 aa, Homo sapiens
MPAGSHPESSELTQCLWGRNFPVNAYLNEFKKRKHFHGRGNRKFQQISNSWSANLSLEWEKKCCR

SEQ ID NO: 10041 - DNA, 1183 bp, Homo sapiens
gccaccatccatgtaagatgtgacttgctcctccttgccttctgccatgattgtgaggcctccccagccacttggaactgaagcaaacactgctattgccacctttttgcagaggaaggtactgaggtgaagcgacttgcccaaaccctacaaaaataactggccattgcatcaacagcagtgtcaagagcatcatagcatcggatgatgatggacagatgcctctgctgcagagttatgcccccgccccaacactcaattggcaatcatctggggaagtctgtcacaatggtccctgtccacctttcttttagtggtttcagcatctgtcaaaggttcttatttgaatttccatcctatcaagggctgcaaaatggtgactttctgaccgtattattgcatctacattcacagctgacattcttcaataaagaaaagttttccttcatcaagtagaactatttagttatgctgaaattcagtatcttctagaaagacattaaatctttaattatttttaattctcaattctcagaataaccaattcatgtaataatcacctccagtgatggcaaatgagttttgttttggaagacattctcttttctagttatgtacttgcggagttttatatattcatagtcatttttaaatgctcaggttgtctcacacttgccactgtatactcttcaactagaatgctacttaacccagattaaaatccacgtttcccgtgtagtaactgagtgactcttgcttctgtgcctctgtctctcagaaataaaactggaattcaaaattctatagagcttataagatggttgtagtaattaaatgagacaggtcagctaccaggcttagcgaaggccataaacaaagaaagaatgtgacaaatgttagttgctcctattttcatatcatcaccatctaatgctaagtcttcactagggaaggaattagggtctggagatgcggtggtaaagggaagagcaagggtctcaaatgctttagagagaagattctcacccagaacagtgacacatgagggctttgcagggccaggaacaggtaaagaaactaggaacctggtgaagggaagaaggcaggaggcagaataaaatattcctggaaaaaaattatttttgtttgtttcacagttttctcagggcctattctattccaa

SEQ ID NO: 10042 - protein, 83 aa, Homo sapiens
MMMDRCLCCRVMPPPQHSIGNHLGKSVTMVPVHLSFSGFSICQRFLFEFPSYQGLQNGDFLTVLLHLHSQLTFFNKEKFSFIK

SEQ ID NO: 10043 - DNA, 581 bp, Homo sapiens
atacaaccttagagataatgaagtctattgcacagaaagaaactggaatcaggctgtttattgactgcagagaagtagcgtctcttgaatggttaatggcaattgttaattagattgcttttcctacactgccctgtgtggtggtggatggcatacgtggtaatctgagtgtggtaagcatgaaaagcacagaatgtgtgaaagcagcaacaaacttcacatccatcaaattcttaacatgaaccaggttctttgcttacattcgcataggcatatcggtctggttttacttgtcaggagggactgaagaaagcacaggacgtaagttcctccaagagcattcttggagcagcatctcatcgctgtccttgggtgtagcctcccttttgtgaggttcactccctcagctggaggatgaaccacagtgctgctgcagacctagctgatgtcacagttgttcaaaaggttcctcttgaagaatgaaatccttgggctgccattaggaactgcatgcagttaagccgtataacctctctgatttttagtttctccatctattttataaaataaaacattgaact

SEQ ID NO: 10044 - protein, 37 aa, Homo sapiens
MCESSNKLHIHQILNMNQVLCLHSHRHIGLVLLVRRD

SEQ ID NO: 10045 - DNA, 637 bp, Homo sapiens
gtgtagcctcccttttgtgaggttcactccctcagctggaggatgaaccacagtgctgctgcagacctagctgatgtcacagttgttcaaaaggctgaagtacagtgatgccatctcgactcactgcaacctccgcctcccaggttcaagtgactctcctgcctcagcctcccgagtagctgggactacaggcatgcggcaccatgcccagctaatttttgtatcattagtagagacagggtttcaccatgttggtcaggctggtctcaaactcctgaccttgtgatctgcccaccttggcctcccaaagtgctgggattacagacgcgagccaccgtgcctggcctcaactattcttttacatataatgttcagcattcaataaaaaattgcaagacgtgaagaaactggaaagtgttaaccataatcaagaggaaaaaatgcagtagaagcagatcaacacatcccagatgttacaactttcaaaaaatgaacgttaacactaccatgtaaatatactaaagtattaatgggaaaagtggaaagtattaatggaataggtagggggtgttagcagaaaatggaaactctaaaaagaaacaaatgaaaatattataaataaaaaaatgaatatagt

SEQ ID NO: 10046 - protein, 70 aa, Homo sapiens
MSQLFKRLKYSDAISTHCNLRLPGSSDSPASASRVAGTTGMRHHAQLIFVSLVETGFHHVGQAGLKLLTL

SEQ ID NO: 10047 - DNA, 2957 bp, Homo sapiens
aaaggtacttagacatgttccccacaggatgtgttaaggtgttggccaatcatcaaatattgtcactccaaagaacacatttaacagccgggaagaaaattgtaggaaaagagagcactttggcacggaaggggtctatcgccctggttggagtgcagcagtgtaatcatagctcactgctgccatgaacttctgggctcaagcgatcctcccacctcagcctccctgtgtgctgggattaaaagtgtgagccaccgtgcctcatcgtaagggtcttaaaagaaaccctatttcatactttcttgatgcacttgatatggattatataaatctatggacaaaaatgacatcagtacaatggaatattggagttttctaccataatctctgcatagtgcactgattttgacaatcacctatggatgaaaatacatttgccagagtctaggagttaaatggaaaagttaacagcacaccgttggagaaaaatatctgggagtagatgcattcaagggagtaagaagaacaattacctgcatcacctcacccccagggtccacttcttagtgccaagatagactcccttcagcaggcaatttctcccatggggaaaaggagagtataatgagtgagtatccagcttttccagctgtgtgaggcacatcccaagaagcccatctttctttcactcaactcagaatattgagggtattagcatggctaagtggctgggacagggcagtagcaggaaagaaaggagaggactcacagcaaccaggacttgaaactcagtacagggtacatatcctttgaagcatttcacagagcccatcaggaggcccacccatgaaccacttgggacaccatatctgtagcatctccctgcaactggcccataggagcccccgatgttttgtgcatattccccttccctttctcctatagtcagttgcctgcacatgcactccagatggtgagtgtgagcatttacctacagcttttgagtacatgcagtcagcaggctcaactttgaaggattgggaggaatacaaaattgagcatttcagggcactgtcctagaggaaacaaacagaaagctttcaggacccagtttggttttgtggatttaagagaagacacacaatcatcagaatttcttctccacccatccaagaagtgtggattgggtgaatccatagaaaagatctgagagagcctcagattccctataggctcactgttgaagatatttctctcaaatccagtcagtaaagactagagaaagtgactctttcttcaaatgtgaagacagcagtgcaagactttgaggaacatgaaaaatcaaggacacctagtaccaccaaaggaacataattttctggtacccaaccacaaagaaatggagatacacaaattgtctgacaaagaattcacaacaattgttttaaggaagtcagtaagctacaagagaacacagagaacttaatgatattaagaaagcgacacatgaacaaaataagatgttcaacaaaaagatagaaattattaaaaacaaccatgattttcgagctgagaatacaatgaatgaaatggaaaacacaatagagtttcaatagcagacttgatcaagcagaagaaagggtctgtcaactcaaatactagtcatttgaaattattcagtaaaagaaataaaaaggaatgaaaaatgcttatgcgattgatgcaacaccatgaagagtagtcatatatgcactatgggagtctcagaaaaagaaagagataaaggggaagaaaactaacttaaagaactagatcagtctctccttatctgtagttttgctttccttggtttcaggtacagtacaatgatatgttttaagagacagacaatgaaagagaacatgcaaatattgacataatttttattacagtatattgtcatagtttttctattttgttattagttgttattctcttactgtgcctaatttatacattaaactttatcataggaatagtggtggtggcctgtctggagtggccactgccaggatgccagctgcagcaggggaggtgtagctggggctgtgcactccgcagagctggggggggccaggaacaggtgatcctagtgggagccctatatgctactgagttagtggggtgggagcctgtgctcccaggcatagctgcagctgcccagccatggctccagccctaggcatacctgtgctctcaggggccctggaagtcccctgcccttacaggcttggaagtgcctgctcccattccctggcctctttccactgctggcacctgctctgtggcagagcaaagttgtggatgtgttgtgatagctgagcctgggagctgttgtgacgtggtcaggtgtgtgtgttcagggcagttctgatacaccagactccccactgcctttgccccctctggaaactgcttctgaggctgaaactttggatattaatgagcaaggatggtgggggaggccaggacggctgagggcagctaggtgtgggcctgtggacaccccttagtgcggacagtctgggtgctgtggatggcatgttgatggcagcgagaggcagacatgttcctaggtgggaacgggtgggtccctggtgaaacctcaccttcaagccagggacagcttgaagcatgggggcctggctgccagttccggttgcagtctgtgacctggagtgaaaacttcattgatgtctttcagccaattggatggtgctttttccagacccacaaatggctgcccatggaccaagcagtatgtacttcctccattctgagcccatgaaaaccccagactcagtcagactctgacactcatcaggatgacaagcctgcaaataggatctacccattttgggtatgcactccactgagagctattctgtcactcaataaagctcctttctgccttgctc

SEQ ID NO: 10048 - protein, 57 aa, Homo sapiens
MFPTGCVKVLANHQILSLQRTHLTAGKKIVGKESTLARKGSIALVGVQQCNHSSLLP

SEQ ID NO: 10049 - DNA, 190 bp, Homo sapiens
aagaaattgatgctgcaggagagagggaataattgccgaagcaaagatcttgaggcctgcttccactgagggactggaggctccttgagcaaaattatctacctcttcacctttggatctttcacagttcccagttcggtgtactacagattgtacttgctaaataaaaaatcattgtcatggtttacct

SEQ ID NO: 10050 - protein, 37 aa, Homo sapiens
GLLPLRDWRLLEQNYLPLHLWIFHSSQFGVLQIVLAK

SEQ ID NO: 10051 - DNA, 938 bp, Homo sapiens
agcagattacccaggccttgcacctggatcaatgggctgccctaatgaaggatatcaaaaatgaaggggcagctaaagaaaaataaaagacacctcagaaagtagcctgcctctttgacaagggacatgccttcagaggaacataacagaaacctctgagaattgtcaacaataaaaagactgagcaacaagggaaactggtaggaagccaaaggttttaagaggtgagagtggagaaatgctgtgcttttattgatcctctccaaaggaacacctttaaaaaagcatgatataaattggcactaatcctcataagagaagaatgtcagccaagccagtgaaggaattttggagttcgctttgaagacttatgcactctccagctggtcacagacactacactcacccattttgtaaatacacttttttttgttttgttttttaagcttctcacttcagtatctaccagacaggcttgtgcaaggagtgaactagtattgtatctgttaatttctttgcaggcaaaaatcaagttaccaggaaaatattttttaaaaaccacgaacagtctaagagcactgaacattttgaatcatttgccttttctcaacactggattttaagcaaggaacaagactattccagttctaaatgctttaatgaacaaggggtattgggttttagcatcaacatgatctatcctcactctgaagctttaacttgagtagctgctgtgctttgtaaagcttcaatccaattcatttgataactacaattaccaaatctgggcattgctgactacacagttcaaaaaaacagcatggagggaagacctgctgagaaccttagaatctatcgataagctcttgaaatggtttaaagtaataaaccacttcaattgaaagggcaataaaatgtttttcgtgtatatatgtaca

SEQ ID NO: 10052 - protein, 93 aa, Homo sapiens
RNFGVRFEDLCTLQLVTDTTLTHFVNTLFFVLFFKLLTSVSTRQACARSELVLYLLISLQAKIKLPGKYFLKTTNSLRALNILNHLPFLNTGF

SEQ ID NO: 10053 - DNA, 602 bp, Homo sapiens
ccctaatgaaggatatcaaaaatgaaggggcagctaaagaaaaataaaagacacctcagaaagtagcctgcctctttgacaagggacatgccttcagaggaacataacagaaacctctgagaattgtcaacaataaaaagactgagcaacaagggaaactggtaggaagccaaaggttttaagaggcaaaaatcaagttaccaggaaaatattttttaaaaaccacgaacagtctaagagcactgaacattttgaatcatttgccttttctcaacactggattttaagcaaggaacaagactattccagttctaaatgctttaatgaacaaggggtattgggttttagcatcaacatgatctatcctcactctgaagctttaacttgagtagctgctgtgctttgtaaagcttcaatccaattcatttgataactacaattaccaaatctgggcattgctgactacacagttcaaaaaaacagcatggagggaagacctgctgagaaccttagaatctatcgataagctcttgaaatggtttaaagtaataaaccacttcaattgaaagggcaataaaatgtttttcgtgtatatatgtaca

SEQ ID NO: 10054 - protein, 34 aa, Homo sapiens
EAKIKLPGKYFLKTTNSLRALNILNHLPFLNTGF

SEQ ID NO: 10055 - DNA, 660 bp, Homo sapiens
ggttgtgctgtctgtgtacttccggcagcctccagacagtttcttccgcttcctgtaccacccggctcaagtagcggacacggaacagggaactatcagcccgtcggcctccgggccctgcattctctagccatggaccgggaccttttgcggcagtcgctaaattgccacgggtcgtctttgctctctctacttcggagcgaacagcaggacaatccacacttccgtagcctcctggggtcggccgccgagccagcccggggcccgccgccccagcacccgttgcagggcagaaaagagaagagagttgacaacatcgagatacagaaattcatctccaaaaaagcggatctgctttttgcactttcctggaaatcagatgcacctgcaacttctgaaattaatgaagacagtgaagatcattatgcaatcatgccacctttagagcaattcatggagatacctagtatggatcggagagagctgtttttccgagatattgagcgtggtgatatagtgattggaagaattagttctattcgggaattcggttttttcatggtgttgatctgtttaggaagtggtatcatgagagatatagcccacttagaaatcacagttgttcaactactagctgtttcataccaaacaactaagata

SEQ ID NO: 10056 - protein, 175 aa, Homo sapiens
MDRDLLRQSLNCHGSSLLSLLRSEQQDNPHFRSLLGSAAEPARGPPPQHPLQGRKEKRVDNIEIQKFISKKADLLFALSWKSDAPATSEINEDSEDHYAIMPPLEQFMEIPSMDRRELFFRDIERGDIVIGRISSIREFGFFMVLICLGSGIMRDIAHLEITVVQLLAVSYQTTK

SEQ ID NO: 10057 - DNA, 4208 bp, Homo sapiens
ggttgtgctgtctgtgtacttccggcagcctccagacagtttcttccgcttcctgtaccacccggctcaagtagcggacacggaacagggaactatcagcccgtcggcctccgggccctgcattctctagccatggaccgggaccttttgcggcagtcgctaaattgccacgggtcgtctttgctctctctacttcggagcgaacagcaggacaatccacacttccgtagcctcctggggtcggccgccgagccagcccggggcccgccgccccagcacccgttgcagggcagaaaagagaagagagttgacaacatcgagatacagaaattcatctccaaaaaagcggatctgctttttgcactttcctggaaatcagatgcacctgcaacttctgaaattaatgaagacagtgaagatcattatgcaatcatgccacctttagagcaattcatggagatacctagtatggatcggagagagctgtttttccgagatattgagcgtggtgatatagtgattggaagaattagttctattcgggaattcggttttttcatggtgttgatctgtttaggaagtggtatcatgagagatatagcccacttagaaatcacagctctttgtcccttaagagatgtgccttctcacagtaaccatggggatcctttatcatattaccaaactggtgacatcattcgagctggaatcaaggatattgacagataccatgaaaagctagcagtatctctgtatagctcttctcttccaccacacctatctggtattaaattaggtgtaattagctctgaagagcttcctttatactacaggagaagtgttgagctaaatagcaattctttggagtcctatgaaaatgtcatgcagagttccttgggatttgttaatccaggagtagttgaattccttctagaaaaactaggaatagatgaatctaatccaccatctttaatgagaggcctacaaagcaaaaatttctctgaagatgattttgcttctgcattgagaaaaaaacaatccgcatcttgggctttaaaatgtgtgaagatcggagttgactattttaaagttggacgccatgtggatgctatgaatgaatacaataaagctttggaaatagacaaacaaaacgtggaagctttggtagctcgtggagcattatatgcgacaaaaggaagtttgaacaaagcaatagaagattttgagcttgcattagaaaactgtccaactcacagaaatgcaagaaaatacctctgccagacacttgtagagagaggaggacagttagaagaagaagaaaagtttttaaatgctgaaagttactataagaaagctttggctttggatgagacttttaaagatgcagaggatgctttgcagaaacttcataaatatatgcaggtgattccttatttcctcttagaaatttagtgatatttgaaataatgcccaaacttaattttctcctgaggaaaactattctacattacttaagtaaggcattatgaaaagtttctttttaggtatagtttttcctaattgggtttgacattgcttcatagtgcctctgtttttgtccataatcgaaagtaaagatagctgtgagaaaactattacctaaatttggtatgttgttttgagaaatgtccttatagggagctcacctggtggtttttaaattattgttgctactataattgagctaattataaaaacctttttgagacatattttaaattgtcttttcctgtaatactgatgatgatgttttctcatgcattttcttctgaattggaccattgctgctgtgtctgtgacatctggtgctgctcatccccatccacaaactggaaaatgatttcctatgtaatcatgcatccaactgggctgtgctatttttttaaatgaaatctttggaattaagagaaaaacaagctgaaaaggaagaaaagcagaaaacaaagaaaatagaaacaagtgcagaaaagttgcgtaagctcttaaaagaagagaagaggtaaactataatattcagtatttttaaacttaaggcaactactgaattgaacccaaagtgccatactggaggtaaagtaaataaaaatatgaaagtatttcaagtgccaatcagtgactgttaagaatctttagcaaatatgtgttccatgtattttcttattaaagagatgaagtggaatttaaggctagaattctacaaaaaaagagtatcttagaattaaaatatagaataagttactttaattatgttttaggaagaaatattttagaactagagcagtggttctcaactaggggtggatttattcacccggggacatttgacaagatgtggagacatttttgattgccataactgatagggtgctactgcatctagtgtataatggtcagggatgctcttaaacattctgtaatgcacaggtcagctcccacccgcacccccaccccctaccaagaattatttggctgaaaataccaataatcaggtgaagaaaccatgaactagaggtagccaaataaaaaagttgagttctcctttatgtgttcagtagtcttaagtttttaaggtagtgttgaaaaaagtctgtctttcagagatgatggatttgcttacaatgatacctgtctgcaagcattttttcccccaaaagtgcttaatagtaaaattagatcttgtagtagccgagattattgtatcatttatctgaaccacagcttttataaaatctttaaaggaaacaaatagggcccacatctttatgaataatttagaaacatttttgtatatatatgacaaatgaactgttttttttaggctaaagaagaaaagaagaaaatcaacttcttcttcaagtgtttcttctgctgatgaatcagtgtcttcatcatcatcctcttcctcttctggtcacaaaaggcataagaaacataagaggaaccgttcagagtcttctcgcagttccagaaggcattcatctagggcatcctcaaatcagatagatcagaataggaaagatgagtgctacccagttccagctaatacttcagcatcttttcttaaccataaacaagaagtggagaaactactggggaagcaggataggttacagtatgaaaagacacagataaaagagaaagatagatgccctctctcttcatcttcacttgaaataccggatgattttggaggtaggtctgaagatccaagagatttttataacagctataaaacccaagcaggtagtagcaaaacagaaaagccatataaatcagaaagacatttttccagtagaagaaattcctcagattccttctgtaggaattcagaggacaagatttatggttataggagatttgaaaaggatatagagggaagaaaagagcactatagaaggtgggaaccaggttctgtgaggcattctacctcaccagcaagctcagaatactcttggaagtcagttgagaaatacaaaaaatacgctcactctggatcacgtgatttcagtagacatgagcaaagataccgtttaaatacaaatcaaggagaatatgaaagagaggacaattatggggaggatatcaaaacagaggttccagaagaagatgcactaagtagcaaagaacactcagaaagcagtgttaagaaaaatttacctcagaatttactgaatatatttaatcagatagctgaatttgaaaaagaaaaaggaaataagtcaaaaaattaatacaccaaggatatcggcaccattacacaaaatgccattaagtgaagtttttggttgtattagtcataacagttgagtgcagaaatctctgcttctaaaattatttgtagagattacaggaaacaaatgcttttaagtaagtttttctcaaattttgtttcagttctaggtcccttgtcacagcttggtttttagactttttatgtatatgtttatgtacagtatattactcttgacagtttgaatttcttcacctaaagataattctctgaaagtactgtttcttcattctattgcggtatatgagaattcctgggtgcatcttattctgctgtttgagagaaaaatttgtgcattgaacacttggatcatttttataaaaattaatttcattttcttttctgttaaattaaaaatcgtcagcttttgaaagattat

SEQ ID NO: 10058 - protein, 439 aa, Homo sapiens
MDRDLLRQSLNCHGSSLLSLLRSEQQDNPHFRSLLGSAAEPARGPPPQHPLQGRKEKRVDNIEIQKFISKKADLLFALSWKSDAPATSEINEDSEDHYAIMPPLEQFMEIPSMDRRELFFRDIERGDIVIGRISSIREFGFFMVLICLGSGIMRDIAHLEITALCPLRDVPSHSNHGDPLSYYQTGDIIRAGIKDIDRYHEKLAVSLYSSSLPPHLSGIKLGVISSEELPLYYRRSVELNSNSLESYENVMQSSLGFVNPGVVEFLLEKLGIDESNPPSLMRGLQSKNFSEDDFASALRKKQSASWALKCVKIGVDYFKVGRHVDAMNEYNKALEIDKQNVEALVARGALYATKGSLNKAIEDFELALENCPTHRNARKYLCQTLVERGGQLEEEEKFLNAESYYKKALALDETFKDAEDALQKLHKYMQVIPYFLLEI

SEQ ID NO: 10059 - DNA, 2883 bp, Homo sapiens
ggttgtgctgtctgtgtacttccggcagcctccagacagtttcttccgcttcctgtaccacccggctcaagtagcggacacggaacagggaactatcagcccgtcggcctccgggccctgcattctctagccatggaccgggaccttttgcggcagtcgctaaattgccacgggtcgtctttgctctctctacttcggagcgaacagcaggacaatccacacttccgtagcctcctggggtcggccgccgagccagcccggggcccgccgccccagcacccgttgcagggcagaaaagagaagagagttgacaacatcgagatacagaaattcatctccaaaaaagcggatctgctttttgcactttcctggaaatcagatgcacctgcaacttctgaaattaatgaagacagtgaagatcattatgcaatcatgccacctttagagcaattcatggagatacctagtatggatcggagagagctgtttttccgagatattgagcgtggtgatatagtgattggaagaattagttctattcgggaattcggttttttcatggtgttgatctgtttaggaagtggtatcatgagagatatagcccacttagaaatcacagctctttgtcccttaagagatgtgccttctcacagtaaccatggggatcctttatcatattaccaaactggtgacatcattcgagctggaatcaaggatattgacagataccatgaaaagctagcagtatctctgtatagctcttctcttccaccacacctatctggtattaaattaggtgtaattagctctgaagagcttcctttatactacaggagaagtgttgagctaaatagcaattctttggagtcctatgaaaatgtcatgcagagttccttgggatttgttaatccaggagtagttgaattccttctagaaaaactaggaatagatgaatctaatccaccatctttaatgagaggcctacaaagcaaaaatttctctgaagatgattttgcttctgcattgagaaaaaaacaatccgcatcttgggctttaaaatgtgtgaagatcggagttgactattttaaagttggacgccatgtggatgctatgaatgaatacaataaagctttggaaatagacaaacaaaacgtggaagctttggtagctcgtggagcattatatgcgacaaaaggaagtttgaacaaagcaatagaagattttgagcttgcattagaaaactgtccaactcacagaaatgcaagaaaatacctctgccagacacttgtagagagaggaggacagttagaagaagaagaaaagtttttaaatgctgaaagttactataagaaagctttggctttggatgagacttttaaagatgcagaggatgctttgcagaaacttcataaatatatgcagaaatctttggaattaagagaaaaacaagctgaaaaggaagaaaagcagaaaacaaagaaaatagaaacaagtgcagaaaagttgcgtaagctcttaaaagaagagaagaggctaaagaagaaaagaagaaaatcaacttcttcttcaagtgtttcttctgctgatgaatcagtgtcttcatcatcatcctcttcctcttctggtcacaaaaggcataagaaacataagaggaaccgttcagagtcttctcgcagttccagaaggcattcatctagggcatcctcaaatcagatagatcagaataggaaagatgagtgctacccagttccagctaatacttcagcatcttttcttaaccataaacaagaagtggagaaactactggggaagcaggataggttacagtatgaaaagacacagataaaagagaaagatagatgccctctctcttcatcttcacttgaaataccggatgattttggaggtaggtctgaagatccaagagatttttataacagctataaaacccaagcaggtagtagcaaaacagaaaagccatataaatcagaaagacatttttccagtagaagaaattcctcagattccttctgtaggaattcagaggacaagatttatggttataggagatttgaaaaggatatagagggaagaaaagagcactatagaaggtgggaaccaggttctgtgaggcattctacctcaccagcaagctcagaatactcttggaagtcagttgagaaatacaaaaaatacgctcactctggatcacgtgatttcagtagacatgagcaaagataccgtttaaatacaaatcaaggagaatatgaaagagaggacaattatggggaggatatcaaaacagaggttccagaagaagatgcactaagtagcaaagaacactcagaaagcagtgttaagaaaaatttacctcagaatttactgaatatatttaatcagatagctgaatttgaaaaagaaaaaggaaataagtcaaaaaattaatacaccaaggatatcggcaccattacacaaaatgccattaagtgaagtttttggttgtattagtcataacagttgagtgcagaaatctctgcttctaaaattatttgtagagattacaggaaacaaatgcttttaagtaagtttttctcaaattttgtttcagttctaggtcccttgtcacagcttggtttttagactttttatgtatatgtttatgtacagtatattactcttgacagtttgaatttcttcacctaaagataattctctgaaagtactgtttcttcattctattgcggtatatgagaattcctgggtgcatcttattctgctgtttgagagaaaaatttgtgcattgaacacttggatcatttttataaaaattaatttcattttcttttctgttaaattaaaaatcgtcagcttttgaaagattat

SEQ ID NO: 10060 - protein, 770 aa, Homo sapiens; identical to SEQ ID NO: 886

SEQ ID NO: 10061 - DNA, 4637 bp, Homo sapiens
ggttgtgctgtctgtgtacttccggcagcctccagacagtttcttccgcttcctgtaccacccggctcaagtagcggacacggaacagggaactatcagcccgtcggcctccgggccctgcattctctagccatggaccgggaccttttgcggcagtcgctaaattgccacgggtcgtctttgctctctctacttcggagcgaacagcaggacaatccacacttccgtagcctcctggggtcggccgccgagccagcccggggcccgccgccccagcacccgttgcagggcagaaaagagaagagagttgacaacatcgagatacagaaattcatctccaaaaaagcggatctgctttttgcactttcctggaaatcagatgcacctgcaacttctgaaattaatgaagacagtgaagatcattatgcaatcatgccacctttagagcaattcatggagatacctagtatggatcggagagagctgtttttccgagatattgagcgtggtgatatagtgattggaagaattagttctattcgggaattcggttttttcatggtgttgatctgtttaggaagtggtatcatgagagatatagcccacttagaaatcacagctctttgtcccttaagagatgtgccttctcacagtaaccatggggatcctttatcatattaccaaactggtgacatcattcgagctggaatcaaggatattgacagataccatgaaaagctagcagtatctctgtatagctcttctcttccaccacacctatctggtattaaattaggtgtaattagctctgaagagcttcctttatactacaggagaagtgttgagctaaatagcaattctttggagtcctatgaaaatgtcatgcagagttccttgggatttgttaatccaggagtagttgaattccttctagaaaaactaggaatagatgaatctaatccaccatctttaatgagaggcctacaaagcaaaaatttctctgaagatgattttgcttctgcattgagaaaaaaacaatccgcatcttgggctttaaaatgtgtgaagatcggagttgactattttaaagttggacgccatgtggatgctatgaatgaatacaataaagctttggaaatagacaaacaaaacgtggaagctttggtagctcgtggagcattatatgcgacaaaaggaagtttgaacaaagcaatagaagattttgagcttgcattagaaaactgtccaactcacagaaatgcaagaaaatacctctgccagacacttgtagagagaggaggacagttagaagaagaagaaaagtttttaaatgctgaaagttactataagaaagctttggctttggatgagacttttaaagatgcagaggatgctttgcagaaacttcataaatatatgcaggtgattccttatttcctcttagaaatttagtgatatttgaaataatgcccaaacttaattttctcctgaggaaaactattctacattacttaagtaaggcattatgaaaagtttctttttaggtatagtttttcctaattgggtttgacattgcttcatagtgcctctgtttttgtccataatcgaaagtaaagatagctgtgagaaaactattacctaaatttggtatgttgttttgagaaatgtccttatagggagctcacctggtggtttttaaattattgttgctactataattgagctaattataaaaacctttttgagacatattttaaattgtcttttcctgtaatactgatgatgatgttttctcatgcattttcttctgaattggaccattgctgctgtgtctgtgacatctggtgctgctcatccccatccacaaactggaaaatgatttcctatgtaatcatgcatccaactgggctgtgctatttttttaaatggtttgtatttgaacatggtgattcctccttcacttcaccttaacggaatgtctttatttgaattttatttgtaaaatgtgtcctgtttaaatttttcaatctttaaaaataatttttatgtactttttttttttttttaacctttcttgcactctgggtcatgggtaccactgcaatggcttcccctttttttatgggataccaactgcaatatggtcctcaatgctgttctggccatttcaatgactaatgccaaacatctgtatgactaatttttttatgttaaaaaaatactgtttaatgctggctctatggtgatttggttttactaaattgggtttctcgttgggggtggtcttttgaatactgggttttatatattctgctatttttaacgtgtggtttttttcgatatctgggttctaaaagaaatctttggaattaagagaaaaacaagctgaaaaggaagaaaagcagaaaacaaagaaaatagaaacaagtgcagaaaagttgcgtaagctcttaaaagaagagaagaggtaaactataatattcagtatttttaaacttaaggcaactactgaattgaacccaaagtgccatactggaggtaaagtaaataaaaatatgaaagtatttcaagtgccaatcagtgactgttaagaatctttagcaaatatgtgttccatgtattttcttattaaagagatgaagtggaatttaaggctagaattctacaaaaaaagagtatcttagaattaaaatatagaataagttactttaattatgttttaggaagaaatattttagaactagagcagtggttctcaactaggggtggatttattcacccggggacatttgacaagatgtggagacatttttgattgccataactgatagggtgctactgcatctagtgtataatggtcagggatgctcttaaacattctgtaatgcacaggtcagctcccacccgcacccccaccccctaccaagaattatttggctgaaaataccaataatcaggtgaagaaaccatgaactagaggtagccaaataaaaaagttgagttctcctttatgtgttcagtagtcttaagtttttaaggtagtgttgaaaaaagtctgtctttcagagatgatggatttgcttacaatgatacctgtctgcaagcattttttcccccaaaagtgcttaatagtaaaattagatcttgtagtagccgagattattgtatcatttatctgaaccacagcttttataaaatctttaaaggaaacaaatagggcccacatctttatgaataatttagaaacatttttgtatatatatgacaaatgaactgttttttttaggctaaagaagaaaagaagaaaatcaacttcttcttcaagtgtttcttctgctgatgaatcagtgtcttcatcatcatcctcttcctcttctggtcacaaaaggcataagaaacataagaggaaccgttcagagtcttctcgcagttccagaaggcattcatctagggcatcctcaaatcagatagatcagaataggaaagatgagtgctacccagttccagctaatacttcagcatcttttcttaaccataaacaagaagtggagaaactactggggaagcaggataggttacagtatgaaaagacacagataaaagagaaagatagatgccctctctcttcatcttcacttgaaataccggatgattttggaggtaggtctgaagatccaagagatttttataacagctataaaacccaagcaggtagtagcaaaacagaaaagccatataaatcagaaagacatttttccagtagaagaaattcctcagattccttctgtaggaattcagaggacaagatttatggttataggagatttgaaaaggatatagagggaagaaaagagcactatagaaggtgggaaccaggttctgtgaggcattctacctcaccagcaagctcagaatactcttggaagtcagttgagaaatacaaaaaatacgctcactctggatcacgtgatttcagtagacatgagcaaagataccgtttaaatacaaatcaaggagaatatgaaagagaggacaattatggggaggatatcaaaacagaggttccagaagaagatgcactaagtagcaaagaacactcagaaagcagtgttaagaaaaatttacctcagaatttactgaatatatttaatcagatagctgaatttgaaaaagaaaaaggaaataagtcaaaaaattaatacaccaaggatatcggcaccattacacaaaatgccattaagtgaagtttttggttgtattagtcataacagttgagtgcagaaatctctgcttctaaaattatttgtagagattacaggaaacaaatgcttttaagtaagtttttctcaaattttgtttcagttctaggtcccttgtcacagcttggtttttagactttttatgtatatgtttatgtacagtatattactcttgacagtttgaatttcttcacctaaagataattctctgaaagtactgtttcttcattctattgcggtatatgagaattcctgggtgcatcttattctgctgtttgagagaaaaatttgtgcattgaacacttggatcatttttataaaaattaatttcattttcttttctgttaaattaaaaatcgtcagcttttgaaagattat

SEQ ID NO: 10062 - protein, 439 aa, Homo sapiens; identical to SEQ ID NO: 10058

SEQ ID NO: 10063 - DNA, 4357 bp, Homo sapiens
ggttgtgctgtctgtgtacttccggcagcctccagacagtttcttccgcttcctgtaccacccggctcaagtagcggacacggaacagggaactatcagcccgtcggcctccgggccctgcattctctagccatggaccgggaccttttgcggcagtcgctaaattgccacgggtcgtctttgctctctctacttcggagcgaacagcaggacaatccacacttccgtagcctcctggggtcggccgccgagccagcccggggcccgccgccccagcacccgttgcagggcagaaaagagaagagagttgacaacatcgagatacagaaattcatctccaaaaaagcggatctgctttttgcactttcctggaaatcagatgcacctgcaacttctgaaattaatgaagacagtgaagatcattatgcaatcatgccacctttagagcaattcatggagatacctagtatggatcggagagagctgtttttccgagatattgagcgtggtgatatagtgattggaagaattagttctattcgggaattcggttttttcatggtgttgatctgtttaggaagtggtatcatgagagatatagcccacttagaaatcacagctctttgtcccttaagagatgtgccttctcacagtaaccatggggatcctttatcatattaccaaactggtgacatcattcgagctggaatcaaggatattgacagataccatgaaaagctagcagtatctctgtatagctcttctcttccaccacacctatctggtattaaattaggtgtaattagctctgaagagcttcctttatactacaggagaagtgttgagctaaatagcaattctttggagtcctatgaaaatgtcatgcagagttccttgggatttgttaatccaggagtagttgaattccttctagaaaaactaggaatagatgaatctaatccaccatctttaatgagaggcctacaaagcaaaaatttctctgaagatgattttgcttctgcattgagaaaaaaacaatccgcatcttgggctttaaaatgtgtgaagatcggagttgactattttaaagttggacgccatgtggatgctatgaatgaatacaataaagctttggaaatagacaaacaaaacgtggaagctttggtagctcgtggagcattatatgcgacaaaaggaagtttgaacaaagcaatagaagattttgagcttgcattagaaaactgtccaactcacagaaatgcaagaaaatacctctgccagacacttgtagagagaggaggacagttagaagaagaagaaaagtttttaaatgctgaaagttactataagaaagctttggctttggatgagacttttaaagatgcagaggatgctttgcagaaacttcataaatatatgcaggtgattccttatttcctcttagaaatttagtgatatttgaaataatgcccaaacttaattttctcctgaggaaaactattctacattacttaagtaaggcattatgaaaagtttctttttaggtatagtttttcctaattgggtttgacattgcttcatagtgcctctgtttttgtccataatcgaaagtaaagatagctgtgagaaaactattacctaaatttggtatgttgttttgagaaatgtccttatagggagctcacctggtggtttttaaattattgttgctactataattgagctaattataaaaacctttttgagacatattttaaattgtcttttcctgtaatactgatgatgatgttttctcatgcattttcttctgaattggaccattgctgctgtgtctgtgacatctggtgctgctcatccccatccacaaactggaaaatgatttcctatgtaatcatgcatccaactgggctgtgctatttttttaaatgaaatctttggaattaagagaaaaacaagctgaaaaggaagaaaagcagaaaacaaagaaaatagaaacaagtgcagaaaagttgcgtaagctcttaaaagaagagaagaggtaaactataatattcagtatttttaaacttaaggcaactactgaattgaacccaaagtgccatactggaggtaaagtaaataaaaatatgaaagtatttcaagtgccaatcagtgactgttaagaatctttagcaaatatgtgttccatgtattttcttattaaagagatgaagtggaatttaaggctagaattctacaaaaaaagagtatcttagaattaaaatatagaataagttactttaattatgttttaggaagaaatattttagaactagagcagtggttctcaactaggggtggatttattcacccggggacatttgacaagatgtggagacatttttgattgccataactgatagggtgctactgcatctagtgtataatggtcagggatgctcttaaacattctgtaatgcacaggtcagctcccacccgcacccccaccccctaccaagaattatttggctgaaaataccaataatcaggtgaagaaaccatgaactagaggtagccaaataaaaaagttgagttctcctttatgtgttcagtagtcttaagtttttaaggtagtgttgaaaaaagtctgtctttcagagatgatggatttgcttacaatgatacctgtctgcaagcattttttcccccaaaagtgcttaatagtaaaattagatcttgtagtagccgagattattgtatcatttatctgaaccacagcttttataaaatctttaaaggaaacaaatagggcccacatctttatgaataatttagaaacatttttgtatatatatgacaaatgaactgttttttttaggctaaagaagaaaagaagaaaatcaacttcttcttcaagtgtttcttctgctgatgaatcagtgtcttcatcatcatcctcttcctcttctggtcacaaaaggcataagaaacataagaggaaccgttcagagtcttctcgcagttccagaaggcattcatctagggcatcctcaaatcagatagatcagaataggaaagatgagtgctacccagttccagctaatacttcagcatcttttcttaaccataaacaagaagtggagaaactactggggaagcaggataggttacagtatgaaaagacacagataaaagagaaagatagatgccctctctcttcatcttcacttgaaataccggatgattttggaggtaggtctgaagatccaagagatttttataacagctataaaacccaagcaggtagtagcaaaacagaaaagccatataaatcagaaagacatttttccagtagaagaaattcctcagattccttctgtaggaattcagaggacaagatttatggttataggagatttgaaaaggatatagagggaagaaaagagcactatagaaggtgggaaccaggttctgtgaggcattctacctcaccagcaagctcagaatactcttggaagtcagttgagaaatacaaaaaatacgctcactctggatcacgtgatttcagtagacatgagcaaagataccgtttaaatacaaatcaaggagaatatgaaagagaggacaattatggggaggatatcaaaacagaggttccagaagaagatgcactaagtagcaaagaacactcagaaagcagtgttaagaaaaatttacctcagaatttactgaatatatttaatcagatagctgaatttgaaaaagaaaaaggaaataagtcaaaaaattaatacaccaaggatatcggcaccattacacaaaatgccattaagtgaagtttttggttgtattagtcataacagttgagtgcagaaatctctgcttctaaaattatttgtagagattacaggaaacaaatgcttttaagtaagtttttctcaaattttgtttcagttctaggtcccttgtcacagcttggtttttagactttttatgtatatgtttatgtacagtatattactcttgacagtttgaatttcttcacctaaagataattctctgaaagtactgtttcttcattctattgcggtatatgagaattcctgggtgcatcttattctgctgtttgagagaaaaatttgtgcattgaacacttggatcatttttataaaaattaatttcattttcttttctgttaaattaaaaatcgtcagcttttgaaagattatatgttcgaatgtttcttgaacacttttatatttatcagtttaaatattacattttttgcccaattttttttaaaatttttaaatggtagattatatgtcttaattttcctctaaagcccaatttgattaaaagtggtttgtgaacagtc

SEQ ID NO: 10064 - protein, 439 aa, Homo sapiens; identical to SEQ ID NO: 10058

SEQ ID NO: 10065 - DNA, 3032 bp, Homo sapiens
ggttgtgctgtctgtgtacttccggcagcctccagacagtttcttccgcttcctgtaccacccggctcaagtagcggacacggaacagggaactatcagcccgtcggcctccgggccctgcattctctagccatggaccgggaccttttgcggcagtcgctaaattgccacgggtcgtctttgctctctctacttcggagcgaacagcaggacaatccacacttccgtagcctcctggggtcggccgccgagccagcccggggcccgccgccccagcacccgttgcagggcagaaaagagaagagagttgacaacatcgagatacagaaattcatctccaaaaaagcggatctgctttttgcactttcctggaaatcagatgcacctgcaacttctgaaattaatgaagacagtgaagatcattatgcaatcatgccacctttagagcaattcatggagatacctagtatggatcggagagagctgtttttccgagatattgagcgtggtgatatagtgattggaagaattagttctattcgggaattcggttttttcatggtgttgatctgtttaggaagtggtatcatgagagatatagcccacttagaaatcacagctctttgtcccttaagagatgtgccttctcacagtaaccatggggatcctttatcatattaccaaactggtgacatcattcgagctggaatcaaggatattgacagataccatgaaaagctagcagtatctctgtatagctcttctcttccaccacacctatctggtattaaattaggtgtaattagctctgaagagcttcctttatactacaggagaagtgttgagctaaatagcaattctttggagtcctatgaaaatgtcatgcagagttccttgggatttgttaatccaggagtagttgaattccttctagaaaaactaggaatagatgaatctaatccaccatctttaatgagaggcctacaaagcaaaaatttctctgaagatgattttgcttctgcattgagaaaaaaacaatccgcatcttgggctttaaaatgtgtgaagatcggagttgactattttaaagttggacgccatgtggatgctatgaatgaatacaataaagctttggaaatagacaaacaaaacgtggaagctttggtagctcgtggagcattatatgcgacaaaaggaagtttgaacaaagcaatagaagattttgagcttgcattagaaaactgtccaactcacagaaatgcaagaaaatacctctgccagacacttgtagagagaggaggacagttagaagaagaagaaaagtttttaaatgctgaaagttactataagaaagctttggctttggatgagacttttaaagatgcagaggatgctttgcagaaacttcataaatatatgcagaaatctttggaattaagagaaaaacaagctgaaaaggaagaaaagcagaaaacaaagaaaatagaaacaagtgcagaaaagttgcgtaagctcttaaaagaagagaagaggctaaagaagaaaagaagaaaatcaacttcttcttcaagtgtttcttctgctgatgaatcagtgtcttcatcatcatcctcttcctcttctggtcacaaaaggcataagaaacataagaggaaccgttcagagtcttctcgcagttccagaaggcattcatctagggcatcctcaaatcagatagatcagaataggaaagatgagtgctacccagttccagctaatacttcagcatcttttcttaaccataaacaagaagtggagaaactactggggaagcaggataggttacagtatgaaaagacacagataaaagagaaagatagatgccctctctcttcatcttcacttgaaataccggatgattttggaggtaggtctgaagatccaagagatttttataacagctataaaacccaagcaggtagtagcaaaacagaaaagccatataaatcagaaagacatttttccagtagaagaaattcctcagattccttctgtaggaattcagaggacaagatttatggttataggagatttgaaaaggatatagagggaagaaaagagcactatagaaggtgggaaccaggttctgtgaggcattctacctcaccagcaagctcagaatactcttggaagtcagttgagaaatacaaaaaatacgctcactctggatcacgtgatttcagtagacatgagcaaagataccgtttaaatacaaatcaaggagaatatgaaagagaggacaattatggggaggatatcaaaacagaggttccagaagaagatgcactaagtagcaaagaacactcagaaagcagtgttaagaaaaatttacctcagaatttactgaatatatttaatcagatagctgaatttgaaaaagaaaaaggaaataagtcaaaaaattaatacaccaaggatatcggcaccattacacaaaatgccattaagtgaagtttttggttgtattagtcataacagttgagtgcagaaatctctgcttctaaaattatttgtagagattacaggaaacaaatgcttttaagtaagtttttctcaaattttgtttcagttctaggtcccttgtcacagcttggtttttagactttttatgtatatgtttatgtacagtatattactcttgacagtttgaatttcttcacctaaagataattctctgaaagtactgtttcttcattctattgcggtatatgagaattcctgggtgcatcttattctgctgtttgagagaaaaatttgtgcattgaacacttggatcatttttataaaaattaatttcattttcttttctgttaaattaaaaatcgtcagcttttgaaagattatatgttcgaatgtttcttgaacacttttatatttatcagtttaaatattacattttttgcccaattttttttaaaatttttaaatggtagattatatgtcttaattttcctctaaagcccaatttgattaaaagtggtttgtgaacagtc

SEQ ID NO: 10066 - protein, 770 aa, Homo sapiens; identical to SEQ ID NO: 886

SEQ ID NO: 10067 - DNA, 4786 bp, Homo sapiens
ggttgtgctgtctgtgtacttccggcagcctccagacagtttcttccgcttcctgtaccacccggctcaagtagcggacacggaacagggaactatcagcccgtcggcctccgggccctgcattctctagccatggaccgggaccttttgcggcagtcgctaaattgccacgggtcgtctttgctctctctacttcggagcgaacagcaggacaatccacacttccgtagcctcctggggtcggccgccgagccagcccggggcccgccgccccagcacccgttgcagggcagaaaagagaagagagttgacaacatcgagatacagaaattcatctccaaaaaagcggatctgctttttgcactttcctggaaatcagatgcacctgcaacttctgaaattaatgaagacagtgaagatcattatgcaatcatgccacctttagagcaattcatggagatacctagtatggatcggagagagctgtttttccgagatattgagcgtggtgatatagtgattggaagaattagttctattcgggaattcggttttttcatggtgttgatctgtttaggaagtggtatcatgagagatatagcccacttagaaatcacagctctttgtcccttaagagatgtgccttctcacagtaaccatggggatcctttatcatattaccaaactggtgacatcattcgagctggaatcaaggatattgacagataccatgaaaagctagcagtatctctgtatagctcttctcttccaccacacctatctggtattaaattaggtgtaattagctctgaagagcttcctttatactacaggagaagtgttgagctaaatagcaattctttggagtcctatgaaaatgtcatgcagagttccttgggatttgttaatccaggagtagttgaattccttctagaaaaactaggaatagatgaatctaatccaccatctttaatgagaggcctacaaagcaaaaatttctctgaagatgattttgcttctgcattgagaaaaaaacaatccgcatcttgggctttaaaatgtgtgaagatcggagttgactattttaaagttggacgccatgtggatgctatgaatgaatacaataaagctttggaaatagacaaacaaaacgtggaagctttggtagctcgtggagcattatatgcgacaaaaggaagtttgaacaaagcaatagaagattttgagcttgcattagaaaactgtccaactcacagaaatgcaagaaaatacctctgccagacacttgtagagagaggaggacagttagaagaagaagaaaagtttttaaatgctgaaagttactataagaaagctttggctttggatgagacttttaaagatgcagaggatgctttgcagaaacttcataaatatatgcaggtgattccttatttcctcttagaaatttagtgatatttgaaataatgcccaaacttaattttctcctgaggaaaactattctacattacttaagtaaggcattatgaaaagtttctttttaggtatagtttttcctaattgggtttgacattgcttcatagtgcctctgtttttgtccataatcgaaagtaaagatagctgtgagaaaactattacctaaatttggtatgttgttttgagaaatgtccttatagggagctcacctggtggtttttaaattattgttgctactataattgagctaattataaaaacctttttgagacatattttaaattgtcttttcctgtaatactgatgatgatgttttctcatgcattttcttctgaattggaccattgctgctgtgtctgtgacatctggtgctgctcatccccatccacaaactggaaaatgatttcctatgtaatcatgcatccaactgggctgtgctatttttttaaatggtttgtatttgaacatggtgattcctccttcacttcaccttaacggaatgtctttatttgaattttatttgtaaaatgtgtcctgtttaaatttttcaatctttaaaaataatttttatgtactttttttttttttttaacctttcttgcactctgggtcatgggtaccactgcaatggcttcccctttttttatgggataccaactgcaatatggtcctcaatgctgttctggccatttcaatgactaatgccaaacatctgtatgactaatttttttatgttaaaaaaatactgtttaatgctggctctatggtgatttggttttactaaattgggtttctcgttgggggtggtcttttgaatactgggttttatatattctgctatttttaacgtgtggtttttttcgatatctgggttctaaaagaaatctttggaattaagagaaaaacaagctgaaaaggaagaaaagcagaaaacaaagaaaatagaaacaagtgcagaaaagttgcgtaagctcttaaaagaagagaagaggtaaactataatattcagtatttttaaacttaaggcaactactgaattgaacccaaagtgccatactggaggtaaagtaaataaaaatatgaaagtatttcaagtgccaatcagtgactgttaagaatctttagcaaatatgtgttccatgtattttcttattaaagagatgaagtggaatttaaggctagaattctacaaaaaaagagtatcttagaattaaaatatagaataagttactttaattatgttttaggaagaaatattttagaactagagcagtggttctcaactaggggtggatttattcacccggggacatttgacaagatgtggagacatttttgattgccataactgatagggtgctactgcatctagtgtataatggtcagggatgctcttaaacattctgtaatgcacaggtcagctcccacccgcacccccaccccctaccaagaattatttggctgaaaataccaataatcaggtgaagaaaccatgaactagaggtagccaaataaaaaagttgagttctcctttatgtgttcagtagtcttaagtttttaaggtagtgttgaaaaaagtctgtctttcagagatgatggatttgcttacaatgatacctgtctgcaagcattttttcccccaaaagtgcttaatagtaaaattagatcttgtagtagccgagattattgtatcatttatctgaaccacagcttttataaaatctttaaaggaaacaaatagggcccacatctttatgaataatttagaaacatttttgtatatatatgacaaatgaactgttttttttaggctaaagaagaaaagaagaaaatcaacttcttcttcaagtgtttcttctgctgatgaatcagtgtcttcatcatcatcctcttcctcttctggtcacaaaaggcataagaaacataagaggaaccgttcagagtcttctcgcagttccagaaggcattcatctagggcatcctcaaatcagatagatcagaataggaaagatgagtgctacccagttccagctaatacttcagcatcttttcttaaccataaacaagaagtggagaaactactggggaagcaggataggttacagtatgaaaagacacagataaaagagaaagatagatgccctctctcttcatcttcacttgaaataccggatgattttggaggtaggtctgaagatccaagagatttttataacagctataaaacccaagcaggtagtagcaaaacagaaaagccatataaatcagaaagacatttttccagtagaagaaattcctcagattccttctgtaggaattcagaggacaagatttatggttataggagatttgaaaaggatatagagggaagaaaagagcactatagaaggtgggaaccaggttctgtgaggcattctacctcaccagcaagctcagaatactcttggaagtcagttgagaaatacaaaaaatacgctcactctggatcacgtgatttcagtagacatgagcaaagataccgtttaaatacaaatcaaggagaatatgaaagagaggacaattatggggaggatatcaaaacagaggttccagaagaagatgcactaagtagcaaagaacactcagaaagcagtgttaagaaaaatttacctcagaatttactgaatatatttaatcagatagctgaatttgaaaaagaaaaaggaaataagtcaaaaaattaatacaccaaggatatcggcaccattacacaaaatgccattaagtgaagtttttggttgtattagtcataacagttgagtgcagaaatctctgcttctaaaattatttgtagagattacaggaaacaaatgcttttaagtaagtttttctcaaattttgtttcagttctaggtcccttgtcacagcttggtttttagactttttatgtatatgtttatgtacagtatattactcttgacagtttgaatttcttcacctaaagataattctctgaaagtactgtttcttcattctattgcggtatatgagaattcctgggtgcatcttattctgctgtttgagagaaaaatttgtgcattgaacacttggatcatttttataaaaattaatttcattttcttttctgttaaattaaaaatcgtcagcttttgaaagattatatgttcgaatgtttcttgaacacttttatatttatcagtttaaatattacattttttgcccaattttttttaaaatttttaaatggtagattatatgtcttaattttcctctaaagcccaatttgattaaaagtggtttgtgaacagtc

SEQ ID NO: 10068 - protein, 439 aa, Homo sapiens; identical to SEQ ID NO: 10058

SEQ ID NO: 10069 - DNA, 2355 bp, Homo sapiens
ggttgtgctgtctgtgtacttccggcagcctccagacagtttcttccgcttcctgtaccacccggctcaagtagcggacacggaacagggaactatcagcccgtcggcctccgggccctgcattctctagccatggaccgggaccttttgcggcagtcgctaaattgccacgggtcgtctttgctctctctacttcggagcgaacagcaggacaatccacacttccgtagcctcctggggtcggccgccgagccagcccggggcccgccgccccagcacccgttgcagggcagaaaagagaagagagttgacaacatcgagatacagaaattcatctccaaaaaagcggatctgctttttgcactttcctggaaatcagatgcacctgcaacttctgaaattaatgaagacagtgaagatcattatgcaatcatgccacctttagagcaattcatggagatacctagtatggatcggagagagctgtttttccgagatattgagcgtggtgatatagtgattggaagaattagttctattcgggaattcggttttttcatggtgttgatctgtttaggaagtggtatcatgagagatatagcccacttagaaatcacagctctttgtcccttaagagatgtgccttctcacagtaaccatggggatcctttatcatattaccaaactggtgacatcattcgagctggaatcaaggatattgacagataccatgaaaagctagcagtatctctgtatagctcttctcttccaccacacctatctggtattaaattaggtgtaattagctctgaagagcttcctttatactacaggagaagtgttgagctaaatagcaattctttggagtcctatgaaaatgtcatgcagagttccttgggatttgttaatccaggagtagttgaattccttctagaaaaactaggaatagatgaatctaatccaccatctttaatgagaggcctacaaagcaaaaatttctctgaagatgattttgcttctgcattgagaaaaaaacaatccgcatcttgggctttaaaatgtgtgaagatcggagttgactattttaaagttggacgccatgtggatgctatgaatgaatacaataaagctttggaaatagacaaacaaaacgtggaagctttggtagctcgtggagcattatatgcgacaaaaggaagtttgaacaaagcaatagaagattttgagcttgcattagaaaactgtccaactcacagaaatgcaagaaaatacctctgccagacacttgtagagagaggaggacagttagaagaagaagaaaagtttttaaatgctgaaagttactataagaaagctttggctttggatgagacttttaaagatgcagaggatgctttgcagaaacttcataaatatatgcagaaatctttggaattaagagaaaaacaagctgaaaaggaagaaaagcagaaaacaaagaaaatagaaacaagtgcagaaaagttgcgtaagctcttaaaagaagagaagaggctaaagaagaaaagaagaaaatcaacttcttcttcaagtgtttcttctgctgatgaatcagtgtcttcatcatcatcctcttcctcttctggtcacaaaaggcataagaaacataagaggaaccgttcagagtcttctcgcagttccagaaggcattcatctagggcatcctcaaatcagatagatcagaataggaaagatgagtgctacccagttccagctaatacttcagcatcttttcttaaccataaacaagaagtggagaaactactggggaagcaggataggttacagtatgaaaagacacagataaaagagaaagatagatgccctctctcttcatcttcacttgaaataccggatgattttggagtgtactcctatttatttaaaaagttaactataaaacagcctcaggcaggtccttcaggagatattccagaagagggcattgttatcatagatgacagctccattcatgttactgaccctgaagaccttcaagtgggacaagatatggaggtggaagacagtggtattgatgatcctgaccacgggtaggcttaggtttatgtgtgtgtatgtgtcttagtttttaacaaaaaaattaaaaagtaaaaaaactaaaaatagaaaaatgcttagagaataaggatataaagaatatttttgtgcagttgaacaatgagtgcttaagctaaatgtcatcacaaaagagtaaaaaaattttacaaaattaaaaatgtttaaagttaaaaagctctaggaagctaaggtcaatttattattggagaaataaaattatttttatgaatttactgt

SEQ ID NO: 10070 - protein, 653 aa, Homo sapiens
MDRDLLRQSLNCHGSSLLSLLRSEQQDNPHFRSLLGSAAEPARGPPPQHPLQGRKEKRVDNIEIQKFISKKADLLFALSWKSDAPATSEINEDSEDHYAIMPPLEQFMEIPSMDRRELFFRDIERGDIVIGRISSIREFGFFMVLICLGSGIMRDIAHLEITALCPLRDVPSHSNHGDPLSYYQTGDIIRAGIKDIDRYHEKLAVSLYSSSLPPHLSGIKLGVISSEELPLYYRRSVELNSNSLESYENVMQSSLGFVNPGVVEFLLEKLGIDESNPPSLMRGLQSKNFSEDDFASALRKKQSASWALKCVKIGVDYFKVGRHVDAMNEYNKALEIDKQNVEALVARGALYATKGSLNKAIEDFELALENCPTHRNARKYLCQTLVERGGQLEEEEKFLNAESYYKKALALDETFKDAEDALQKLHKYMQKSLELREKQAEKEEKQKTKKIETSAEKLRKLLKEEKRLKKKRRKSTSSSSVSSADESVSSSSSSSSSGHKRHKKHKRNRSESSRSSRRHSSRASSNQIDQNRKDECYPVPANTSASFLNHKQEVEKLLGKQDRLQYEKTQIKEKDRCPLSSSSLEIPDDFGVYSYLFKKLTIKQPQAGPSGDIPEEGIVIIDDSSIHVTDPEDLQVGQDMEVEDSGIDDPDHG

SEQ ID NO: 10071 - DNA, 7060 bp, Homo sapiens
ggctcaagtagcggacacggaacagggaactatcagcccgtcggcctccgggccctgcattctctagccatggaccgggaccttttgcggcagtcgctaaattgccacgggtcgtctttgctctctctacttcggagcgaacagcaggacaatccacacttccgtagcctcctggggtcggccgccgagccagcccggggcccgccgccccagcacccgttgcagggcagaaaagagaagagagttgacaacatcgagatacagaaattcatctccaaaaaagcggatctgctttttgcactttcctggaaatcagatgcacctgcaacttctgaaattaatgaagacagtgaagatcattatgcaatcatgccacctttagagcaattcatggagatacctagtatggatcggagagagctgtttttccgagatattgagcgtggtgatatagtgattggaagaattagttctattcgggaattcggttttttcatggtgttgatctgtttaggaagtggtatcatgagagatatagcccacttagaaatcacagtaagttatttttgttacttggattgcttctgtttttgttaacgcatctcaatgcaagaactatatctttgcatgcagttgtgctcaagtatacctgccaagatgcttttggaaattaaatgttaattggagaaaaatagtttaaaaaaattagtgtaagttacccagtttctccctccatttctggtttttgggattttttaaatttaaactggttggcaggcacagtgttcttttctaaatgctcaaagaggtatcagtggacgtggtgaggttgattgatattcagacttatttcttgtagttgaacatatgtattcttaattagttaatatttggcattgtatattttcatgtggataatttggagagaagtttcatttatatatttacaataattaaatgtaagtggtttgtacattatattaagatactttgcccaagatggatagtcctgaatttaaactaatgtgtcacgataaaagattgggtatttgccatctatccaggcagataaaaaggaagaaaagcagaaggtattacagattggataacagacaaaatactttggagaattggcatttcattttcactggaatccttataccttttagacaaattttagtttgtttttgatgcatgttgtatactgtcataagccatcatatttggttcctaaactaatggaaagtttcatgagattttagttttttaactgaaccagcaaacatattttactgtgtttggacacggaaattacttttaactaaatccttatttaaatttttactttaggttgttcaactactagctgtttcataccaaacaactaagataaaagaagacactgttcttatcaaagcttgaaatgtctggtgttttaaaatacttctcattacaggctctttgtcccttaagagatgtgccttctcacagtaaccatggggatcctttatcatattaccaaactggtgacatcattcgaggtgattagtttcatcatactaataaaaaagtaatgattgttgaatttttgtttttattaatttaaaaaaatacagtctaagagggtagtgtttgggaaagtttatattttttatgttagtttacattttcttactaatcagcttagttctctttttttttttcttaagctggaatcaaggatattgacagataccatgaaaagctagcagtatctctgtatagctcttctcttccaccacacctatctggtattaaattaggtgtaattagctctgaagagcttcctttatactacaggtaatttatccgtattatttcaacaacagttcattacaaaagtctcttggattgaggaataccacatttttataacggttaaattacttcagacttggtaaaaggaaaccatatcataatattgccacaccatcttatgcaaaaaatggaattagtatttaaacctcaaatgatattatttctttactagaaatggaatgtcaaattagtcattttacaatttttgtgtttgtatttttttaaggagaagtgttgagctaaatagcaattctttggagtcctatgaaaatgtcatgcagagttccttgggatttgttaatccaggagtagttgaattccttctagaaaaactaggaatagatgaatctaatccaccatctttaatgagaggcctacaaaggtatagtacatcagtattactcttagatggtgaggggagtggcagtaagctcagaagctgcgtttagctgaaggacgtattttaccatcctaagccacctagtagcaggcatatgccaaaggttgaatgaaccaggtgatcccatcttctggactggactgtcttatcagtgattaatatgtgtaccatgtaaccaagtagagaaggatgcagaaactttttataagaattttgtgtgtatgctaaagaaaaatactgggtttttttgttttttgtttttgttttttgagtcggagtctcactgtgtcacccaggctggagtgcagtggcgctatctcagctcactgcaagctctgcccctgggttcacgccattctcctgcctcagcctcccaagtagctgggactacaggtgcccgccaccacgcctggctaatttttttttctttgatttttagtagagttggggtttcaccgtgttagccaggatggtctcaatctcctgacctcgtgatccacccgcctcgacctcccaaagtgttgggattacaggcgtgagccaccgcacctggccaagaaaaatactgtttaacaataataatcatttcgaaagttcaaagattttggtatgtaaatagaatgcagatttcttgcttgggattcatactttcactgtcgagtgcctgtcaagcagagttaagtatagttacttaaaaaatatttgtggtttaactttttaatttttattttctttaatagcaaaaatttctctgaagatgattttgcttctgcattgagaaaaaaacaatccgcatcttgggctttaaaatggtatgaagactgtctttcaacaattgcattatatctagtctaaaagcttagggcaaggcaagcatgcttatatcatcaataagacaaatttgagatgcattaaagtgatgcctttttgacatgagcttttcttttatagatgtaagtagtcttacattttacacttaacagataagttttactcagcatttcagttttctcaaaaggaattagtatattgatatctaggtttcaccaatatttgttgtgaaaatgtccaaaggcagaagaacgttccttaggtatattgtgagtactctgaaaactaaatattttgccaagtttgatgacatttgcttttaaaacttattcacactaacattttatttagatattgtttgaagtgtttgtgatgctttacaaatgtcttttttagtgtgaagatcggagttgactattttaaagttggacgccatgtggatgctatgaatgaatacaataaagctttggaaatagacaaacaaaacgtggaagctttggtagctcgtggagcattatatgcgacaaaaggaagtttgaacaaagcaatagaagattttgagcttgcattagaaaactgtccaactcacagaaatgcaagaaaatacctctgccagacacttgtagagagaggaggacagttagaagaagaagaaaagtttttaaatgctgaaagttactataagaaagctttggctttggatgagacttttaaagatgcagaggatgctttgcagaaacttcataaatatatgcaggtgattccttatttcctcttagaaatttagtgatatttgaaataatgcccaaacttaattttctcctgaggaaaactattctacattacttaagtaaggcattatgaaaagtttctttttaggtatagtttttcctaattgggtttgacattgcttcatagtgcctctgtttttgtccataatcgaaagtaaagatagctgtgagaaaactattacctaaatttggtatgttgttttgagaaatgtccttatagggagctcacctggtggtttttaaattattgttgctactataattgagctaattataaaaacctttttgagacatattttaaattgtcttttcctgtaatactgatgatgatgttttctcatgcattttcttctgaattggaccattgctgctgtgtctgtgacatctggtgctgctcatccccatccacaaactggaaaatgatttcctatgtaatcatgcatccaactgggctgtgctatttttttaaatggtttgtatttgaacatggtgattcctccttcacttcaccttaacggaatgtctttatttgaattttatttgtaaaatgtgtcctgtttaaatttttcaatctttaaaaataatttttatgtactttttttttttttttaacctttcttgcactctgggtcatgggtaccactgcaatggcttcccctttttttatgggataccaactgcaatatggtcctcaatgctgttctggccatttcaatgactaatgccaaacatctgtatgactaatttttttatgttaaaaaaatactgtttaatgctggctctatggtgatttggttttactaaattgggtttctcgttgggggtggtcttttgaatactgggttttatatattctgctatttttaacgtgtggtttttttcgatatctgggttctaaaagaaatctttggaattaagagaaaaacaagctgaaaaggaagaaaagcagaaaacaaagaaaatagaaacaagtgcagaaaagttgcgtaagctcttaaaagaagagaagaggtaaactataatattcagtatttttaaacttaaggcaactactgaattgaacccaaagtgccatactggaggtaaagtaaataaaaatatgaaagtatttcaagtgccaatcagtgactgttaagaatctttagcaaatatgtgttccatgtattttcttattaaagagatgaagtggaatttaaggctagaattctacaaaaaaagagtatcttagaattaaaatatagaataagttactttaattatgttttaggaagaaatattttagaactagagcagtggttctcaactaggggtggatttattcacccggggacatttgacaagatgtggagacatttttgattgccataactgatagggtgctactgcatctagtgtataatggtcagggatgctcttaaacattctgtaatgcacaggtcagctcccacccgcacccccaccccctaccaagaattatttggctgaaaataccaataatcaggtgaagaaaccatgaactagaggtagccaaataaaaaagttgagttctcctttatgtgttcagtagtcttaagtttttaaggtagtgttgaaaaaagtctgtctttcagagatgatggatttgcttacaatgatacctgtctgcaagcattttttcccccaaaagtgcttaatagtaaaattagatcttgtagtagccgagattattgtatcatttatctgaaccacagcttttataaaatctttaaaggaaacaaatagggcccacatctttatgaataatttagaaacatttttgtatatatatgacaaatgaactgttttttttaggctaaagaagaaaagaagaaaatcaacttcttcttcaagtgtttcttctgctgatgaatcagtgtcttcatcatcatcctcttcctcttctggtcacaaaaggcataagaaacataagaggaaccgttcagagtcttctcgcagttccagaaggcattcatctagggcatcctcaaatcagatagatcagaataggaaagatgagtgctacccagttccagctaatacttcagcatcttttcttaaccataaacaagaagtggagaaactactggggaagcaggataggttacagtatgaaaagacacagataaaagagaaagatagatgccctctctcttcatcttcacttgaaataccggatgattttggaggtaggtctgaagatccaagagatttttataacagctataaaacccaagcaggtagtagcaaaacagaaaagccatataaatcagaaagacatttttccagtagaagaaattcctcagattccttctgtaggaattcagaggacaagatttatggttataggagatttgaaaaggatatagagggaagaaaagagcactatagaaggtgggaaccaggttctgtgaggcattctacctcaccagcaagctcagaatactcttggaagtcagttgagaaatacaaaaaatacgctcactctggatcacgtgatttcagtagacatgagcaaagataccgtttaaatacaaatcaaggagaatatgaaagagaggacaattatggggaggatatcaaaacagaggttccagaagaagatgcactaagtagcaaagaacactcagaaagcagtgttaagaaaaatttacctcagaatttactgaatatatttaatcagatagctgaatttgaaaaagaaaaaggaaataagtcaaaaaattaatacaccaaggatatcggcaccattacacaaaatgccattaagtgaagtttttggttgtattagtcataacagttgagtgcagaaatctctgcttctaaaattatttgtagagattacaggaaacaaatgcttttaagtaagtttttctcaaattttgtttcagttctaggtcccttgtcacagcttggtttttagactttttatgtatatgtttatgtacagtatattactcttgacagtttgaatttcttcacctaaagataattctctgaaagtactgtttcttcattctattgcggtatatgagaattcctgggtgcatcttattctgctgtttgagagaaaaatttgtgcattgaacacttggatcatttttataaaaattaatttcattttcttttctgttaaattaaaaatcgtcagcttttgaaagattat

SEQ ID NO: 10072 - protein, 175 aa, Homo sapiens
MDRDLLRQSLNCHGSSLLSLLRSEQQDNPHFRSLLGSAAEPARGPPPQHPLQGRKEKRVDNIEIQKFISKKADLLFALSWKSDAPATSEINEDSEDHYAIMPPLEQFMEIPSMDRRELFFRDIERGDIVIGRISSIREFGFFMVLICLGSGIMRDIAHLEITVSYFCYLDCFCFC

SEQ ID NO: 10073 - DNA, 3233 bp, Homo sapiens
atggaatacattttcccaaacactggtgttctctggagcaatcggaggatcgtgtggtttacttccagccagctgccccgtggtcctccagccagctccgggggccacagttttcacacgctccgggagcgatccgagagccgccttttcgtggaaagttacgctgccgcctggcaacccccgggaacgtcgggaggggcaagttgctgctcatccctcagtgctcaaggacgcgggaaggttgctagggctcccccggcaattgccgcggcactgtgcaggtgcctgggcttgacgcgggtgctgctcacccgctgtacaagaaggcggatctttgctctgtatcttctctatccgtttgcagtcatgagtagcgaattcctggctgagctgcactgggaggatgggttcgccatcccggtggcgaacgaggagaacaagctactggaagatcagttgtcaaagctgaaggatgaaagagcaagcttgcaagatgagttacgtgagtatgaagagcgaattaattctatgacttctcacttcaaaaatgttaagcaagagctctcaattacacagtctctttgcaaagcaagggagcgtgagactgaaagtgaagaacattttaaggccattgctcaaagagaattgggacgagtgaaagatgaaattcaacggctggaaaatgagatggcttcaatactggaaaagaaaagtgataaagaaaatggcatatttaaagccactcaaaaattggatggtttgaaatgtcaaatgaactgggaccagcaagcattggaggcctggttagaagaatcagctcataaagatagtgatgctctcactctccagaagtatgcacaacaagatgataataaaatcaggttagaattggataaagcagcacaagattttcgtaagattcataatgaaagacaagaactcattaaacaatgggagaacacaatagaacagatgcagaagagggatggagacatagataactgtgctttggaattagcaaggataaagcaggaaacgagagaaaaagaaaatttggttaaagaaaagatcaagtttttggaaagtgagattgggaataacacagagtttgagaaaagaatttctgtggctgatcgtaaacttttaaaatgtagaacggcatatcaggaccatgaaactagtagaattcagctgaagggtgagctggattctttaaaagccactgtgaatagaacttccagtgatttagaagctctgaggaaaaatatttccaagataaagaaggacattcatgaagaaacagcaaggttacaaaaaactaaaaatcataatgagataatacaaacaaaattaaaggagataactgagaaaaccatgtctgtagaagagaaagctactaatttggaagatatgctaaaggaggaggaaaaagatgtgaaggaagtagatgttcaactgaacctcataaaaggtgtgctgtttaagaaagctcaggagttacagactgagacaatgaaagaaaaagctgttttatcagaaattgaaggaactcgttcctctctgaaacatctcaaccatcagttacaaaaactggattttgaaaccttgaagcagcaagaaattatgtacagccaggattttcacattcaacaagtggaacggagaatgtcacggttaaagggagaaattaattcagaagaaaaacaagcgcttgaagcaaaaattgttgaacttaggaaattgttgatatccttactatctgggacttgcgtagaatcaaacaatgaactccaatatgggagtggtaaaccatgtgatgaactgaatgatctttattttatcaagaaggcacatagtaaaaacagtgatgaaaaacagtcccttatgaccaaaataaatgaactaaaccttttcatcgacagatcagagaaagaacttgataaagccaaaggttttaagcaggatttgatgatagaggacaatcttttaaaacttgaagttaagcgtactcgagaaatgcttcacagtaaggcagaagaagttctttccctagaaaaaagaaaacagcaattatacacagcaatggaagagcgaactgaagaaatcaaggttcataaaacaatgcttgcgtcacaaataagatatgttgatcaagaacgggaaaacataagcactgagtttcgcgagcggctaagtaaaattgagaagctgaagaatagatatgaaattctgactgttgttatgctgcctcctgaaggagaagaggagaaaacacaggcctattatgtaataaaggctgctcaagaaaaagaagaacttcaaagggaaggtgactgtttggatgccaagatcaacaaagctgaaaaagaaatctacgctctagaaaatacccttcaagtgctgaacagctgtaacaacaattataagcaatcttttaaaaaagtgactccatctagtgatgagtatgagctaaaaattcaactagaagaacaaaaaagagctgttgatgaaaaatacagatacaaacaaagacaaatcagagaacttcaagaagacatccagagcatggaaaatacattagatgttatagaacatttggcaaataatgttaaagaaaagttatcagagaagcaggcttattcatttcaactaagtaaagaaacggaggagcagaagccaaaattagaaagagtgaccaaacagtgtgcaaaactcacaaaggaaatccgtcttttgaaagacacaaaagatgaaacaatggaagaacaagacatcaaacttcgtgaaatgaaacagtttcacaaagttattgatgaaatgttagttgatatcatagaagaaaatactgagatccgtattatccttcaaacatactttcaacagagtgggttagaactacctacagctagcacaaaaggcagtcgtcagagctctagatctccttcacatacttcactatcagcaaggtcatctaggagtacaagtacatctacttctcagtcttcaattaaagtactggagcttaaattcccggcctcctcttcactaaaataggaaaaaggcatagcaaagtcaagaataaggtgggcgaaaaaaaagaagttgcaggtgcatctgatttccaggaaagtgcaaaaagcagatccgcttttttggagatgaatttctgtatctcgatgttgtcaactctcttctcttttcttaaaaagaaaaaaatatatatgaaaattggg

SEQ ID NO: 10074 - protein, 1017 aa, Homo sapiens
MEYIFPNTGVLWSNRRIVWFTSSQLPRGPPASSGGHSFHTLRERSESRLFVESYAAAWQPPGTSGGASCCSSLSAQGRGKVARAPPAIAAALCRCLGLTRVLLTRCTRRRIFALYLLYPFAVMSSEFLAELHWEDGFAIPVANEENKLLEDQLSKLKDERASLQDELREYEERINSMTSHFKNVKQELSITQSLCKARERETESEEHFKAIAQRELGRVKDEIQRLENEMASILEKKSDKENGIFKATQKLDGLKCQMNWDQQALEAWLEESAHKDSDALTLQKYAQQDDNKIRLELDKAAQDFRKIHNERQELIKQWENTIEQMQKRDGDIDNCALELARIKQETREKENLVKEKIKFLESEIGNNTEFEKRISVADRKLLKCRTAYQDHETSRIQLKGELDSLKATVNRTSSDLEALRKNISKIKKDIHEETARLQKTKNHNEIIQTKLKEITEKTMSVEEKATNLEDMLKEEEKDVKEVDVQLNLIKGVLFKKAQELQTETMKEKAVLSEIEGTRSSLKHLNHQLQKLDFETLKQQEIMYSQDFHIQQVERRMSRLKGEINSEEKQALEAKIVELRKLLISLLSGTCVESNNELQYGSGKPCDELNDLYFIKKAHSKNSDEKQSLMTKINELNLFIDRSEKELDKAKGFKQDLMIEDNLLKLEVKRTREMLHSKAEEVLSLEKRKQQLYTAMEERTEEIKVHKTMLASQIRYVDQERENISTEFRERLSKIEKLKNRYEILTVVMLPPEGEEEKTQAYYVIKAAQEKEELQREGDCLDAKINKAEKEIYALENTLQVLNSCNNNYKQSFKKVTPSSDEYELKIQLEEQKRAVDEKYRYKQRQIRELQEDIQSMENTLDVIEHLANNVKEKLSEKQAYSFQLSKETEEQKPKLERVTKQCAKLTKEIRLLKDTKDETMEEQDIKLREMKQFHKVIDEMLVDIIEENTEIRIILQTYFQQSGLELPTASTKGSRQSSRSPSHTSLSARSSRSTSTSTSQSSIKVLELKFPASSSLK

SEQ ID NO: 10075 - DNA, 666 bp, Homo sapiens
actcaactgttatgactaatacaaccaaaaacttcacttaatggcattttgtgtaatggtgccgatatccttggtgtattaattttttgacttatttcctttttctttttcaaattcagctatctgattaaatatattcagtaaattctgaggtaaattttttttgttttctgcttttcttccttttcagcttgtttttctcttaattccaaagatttcttttagaacccagatatcgaaaaaaaccacacgttaaaaatagcagaatatataaaacccagtattcaaaagaccacccccaacgagaaacccaatttagtaaaaccaaatcaccatagagccagcattaaacagtatttttttaacataaaaaaattagtcatacagatgtttggcattagtcattgaaatggccagaacagcattgaggaccatattgcagttggtatcccataaaaaaaggggaagccattgcagtggtacccatgacccagagtgcaagaaaggttaaaaaaaaaaaaaaagtacataaaaattatttttaaagattgaaaaatttaaacaggacacattttacaaataaaattcaaataaagacattccgttaaggtgaagtgaaggaggaatcaccatgttcaaatacaaaccatttaaaaaaatagcaca

SEQ ID NO: 10076 - protein, 33 aa, Homo sapiens
MARTALRTILQLVSHKKRGSHCSGTHDPECKKG

SEQ ID NO: 10077 - DNA, 4565 bp, Homo sapiens
atggaatacattttcccaaacactggtgttctctggagcaatcggaggatcgtgtggtttacttccagccagctgccccgtggtcctccagccagctccgggggccacagttttcacacgctccgggagcgatccgagagccgccttttcgtggaaagttacgctgccgcctggcaacccccgggaacgtcgggaggggcaagttgctgctcatccctcagtgctcaaggacgcgggaaggttgctagggctcccccggcaattgccgcggcactgtgcaggtgcctgggcttgacgcgggtgctgctcacccgctgtacaagaaggcggatctttgctctgtatcttctctatccgtttgcagtcatgagtagcgaattcctggctgagctgcactgggaggatgggttcgccatcccggtggcgaacgaggagaacaagctactggaagatcagttgtcaaagctgaaggatgaaagagcaagcttgcaagatgagttacgtgagtatgaagagcgaattaattctatgacttctcacttcaaaaatgttaagcaagagctctcaattacacagtctctttgcaaagcaagggagcgtgagactgaaagtgaagaacattttaaggccattgctcaaagagaattgggacgagtgaaagatgaaattcaacggctggaaaatgagatggcttcaatactggaaaagaaaagtgataaagaaaatggcatatttaaagccactcaaaaattggatggtttgaaatgtcaaatgaactgggaccagcaagcattggaggcctggttagaagaatcagctcataaagatagtgatgctctcactctccagaagtatgcacaacaagatgataataaaatcaggttagaattggataaagcagcacaagattttcgtaagattcataatgaaagacaagaactcattaaacaatgggagaacacaatagaacagatgcagaagagggatggagacatagataactgtgctttggaattagcaaggataaagcaggaaacgagagaaaaagaaaatttggttaaagaaaagatcaagtttttggaaagtgagattgggaataacacagagtttgagaaaagaatttctgtggctgatcgtaaacttttaaaatgtagaacggcatatcaggaccatgaaactagtagaattcagctgaagggtgagctggattctttaaaagccactgtgaatagaacttccagtgatttagaagctctgaggaaaaatatttccaagataaagaaggacattcatgaagaaacagcaaggttacaaaaaactaaaaatcataatgagataatacaaacaaaattaaaggagataactgagaaaaccatgtctgtagaagagaaagctactaatttggaagatatgctaaaggaggaggaaaaagatgtgaaggaagtagatgttcaactgaacctcataaaaggtgtgctgtttaagaaagctcaggagttacagactgagacaatgaaagaaaaagctgttttatcagaaattgaaggaactcgttcctctctgaaacatctcaaccatcagttacaaaaactggattttgaaaccttgaagcagcaagaaattatgtacagccaggattttcacattcaacaagtggaacggagaatgtcacggttaaagggagaaattaattcagaagaaaaacaagcgcttgaagcaaaaattgttgaacttaggaaattgttgatatccttactatctgggacttgcgtagaatcaaacaatgaactccaatatgggagtggtaaaccatgtgatgaactgaatgatctttattttatcaagaaggcacatagtaaaaacagtgatgaaaaacagtcccttatgaccaaaataaatgaactaaaccttttcatcgacagatcagagaaagaacttgataaagccaaaggttttaagcaggatttgatgatagaggacaatcttttaaaacttgaagttaagcgtactcgagaaatgcttcacagtaaggcagaagaagttctttccctagaaaaaagaaaacagcaattatacacagcaatggaagagcgaactgaagaaatcaaggttcataaaacaatgcttgcgtcacaaataagatatgttgatcaagaacgggaaaacataagcactgagtttcgcgagcggctaagtaaaattgagaagctgaagaatagatatgaaattctgactgttgttatgctgcctcctgaaggagaagaggagaaaacacaggcctattatgtaataaaggctgctcaagaaaaagaagaacttcaaagggaaggtgactgtttggatgccaagatcaacaaagctgaaaaagaaatctacgctctagaaaatacccttcaagtgctgaacagctgtaacaacaattataagcaatcttttaaaaaagtgactccatctagtgatgagtatgagctaaaaattcaactagaagaacaaaaaagagctgttgatgaaaaatacagatacaaacaaagacaaatcagagaacttcaagaagacatccagagcatggaaaatacattagatgttatagaacatttggcaaataatgttaaagaaaagttatcagagaagcaggcttattcatttcaactaagtaaagaaacggaggagcagaagccaaaattagaaagagtgaccaaacagtgtgcaaaactcacaaaggaaatccgtcttttgaaagacacaaaagatgaaacaatggaagaacaagacatcaaacttcgtgaaatgaaacagtttcacaaagttattgatgaaatgttagttgatatcatagaagaaaatactgagatccgtattatccttcaaacatactttcaacagagtgggttagaactacctacagctagcacaaaaggcagtcgtcagagctctagatctccttcacatacttcactatcagcaagaaataggaaaaaggcatagcaaagtcaagaataaggtgggcgaaaaaaaaggatgccctagatgaatgccttctggaactgcgagaagactctgaacggttcctcttatgtttcttatgccttttgtgaccagaagaggaagaggatgatgatgaagacactgattcatcagcagaagaaacacttgaagaagaagttgattttcttcttttcttctttagcctaaaaaaaacagttcatttgtcatatatatacaaaaatgtttctaaattattcataaagatgtgggccctatttgtttcctttaaagattttataaaagctgtggttcagataaatgatacaataatctcggctactacaagatctaattttactattaagcacttttgggggaaaaaatgcttgcagacaggtatcattgtaagcaaatccatcatctctgaaagacagacttttttcaacactaccttaaaaacttaagactactgaacacataaaggagaactcaacttttttatttggctacctctagttcatggtttcttcacctgattattggtattttcagccaaataattcttggtagggggtgggggtgcgggtgggagctgacctgtgcattacagaatgtttaagagcatccctgaccattatacactagatgcagtagcaccctatcagttatggcaatcaaaaatgtctccacatcttgtcaaatgtccccgggtgaataaatccacccctagttgagaaccactgctctagttctaaaatatttcttcctaaaacataattaaagtaacttattctatattttaattctaagatactctttttttgtagaattctagccttaaattccacttcatctctttaataagaaaatacatggaacacatatttgctaaagattcttaacagtcactgattggcacttgaaatactttcatatttttatttactttacctccagtatggcactttgggttcaattcagtagttgccttaagtttaaaaatactgaatattatagtttacctcttctcttcttttaagagcttacgcaacttttctgcacttgtttctattttctttgttttctgcttttcttccttttcagcttgtttttctcttaattccaaagatttcttttagaacccagatatcgaaaaaaaccacacgttaaaaatagcagaatatataaaacccagtattcaaaagaccacccccaacgagaaacccaatttagtaaaaccaaatcaccatagagccagcattaaacagtatttttttaacataaaaaaattagtcatacagatgtttggcattagtcattgaaatggccagaacagcattgaggaccatattgcagttggtatcccataaaaaaaggggaagccattgcagtggtacccatgacccagagtgcaagaaaggttaaaaaaaaaaaaaaagtacataaaaattatttttaaagattgaaaaatttaaacaggacacattttacaaataaaattcaaataaagacattccgttaaggtgaagtgaaggaggaatcaccatgttcaaatacaaaccatttaaaaaaatagcaca

SEQ ID NO: 10078 - protein, 994 aa, Homo sapiens
MEYIFPNTGVLWSNRRIVWFTSSQLPRGPPASSGGHSFHTLRERSESRLFVESYAAAWQPPGTSGGASCCSSLSAQGRGKVARAPPAIAAALCRCLGLTRVLLTRCTRRRIFALYLLYPFAVMSSEFLAELHWEDGFAIPVANEENKLLEDQLSKLKDERASLQDELREYEERINSMTSHFKNVKQELSITQSLCKARERETESEEHFKAIAQRELGRVKDEIQRLENEMASILEKKSDKENGIFKATQKLDGLKCQMNWDQQALEAWLEESAHKDSDALTLQKYAQQDDNKIRLELDKAAQDFRKIHNERQELIKQWENTIEQMQKRDGDIDNCALELARIKQETREKENLVKEKIKFLESEIGNNTEFEKRISVADRKLLKCRTAYQDHETSRIQLKGELDSLKATVNRTSSDLEALRKNISKIKKDIHEETARLQKTKNHNEIIQTKLKEITEKTMSVEEKATNLEDMLKEEEKDVKEVDVQLNLIKGVLFKKAQELQTETMKEKAVLSEIEGTRSSLKHLNHQLQKLDFETLKQQEIMYSQDFHIQQVERRMSRLKGEINSEEKQALEAKIVELRKLLISLLSGTCVESNNELQYGSGKPCDELNDLYFIKKAHSKNSDEKQSLMTKINELNLFIDRSEKELDKAKGFKQDLMIEDNLLKLEVKRTREMLHSKAEEVLSLEKRKQQLYTAMEERTEEIKVHKTMLASQIRYVDQERENISTEFRERLSKIEKLKNRYEILTVVMLPPEGEEEKTQAYYVIKAAQEKEELQREGDCLDAKINKAEKEIYALENTLQVLNSCNNNYKQSFKKVTPSSDEYELKIQLEEQKRAVDEKYRYKQRQIRELQEDIQSMENTLDVIEHLANNVKEKLSEKQAYSFQLSKETEEQKPKLERVTKQCAKLTKEIRLLKDTKDETMEEQDIKLREMKQFHKVIDEMLVDIIEENTEIRIILQTYFQQSGLELPTASTKGSRQSSRSPSHTSLSARNRKKA

SEQ ID NO: 10079 - DNA, 4430 bp, Homo sapiens
tctttatacttttgtattgtttaattttttttaacagttgtcttgttttttcttctgcagtgaaaataatggtgacaagaagcccactgcctgattcacataagcaaggcatgctgcagggaagacagggttcttattaatatttcctttcatgtgcttacatatgagttacagttgctaatcctttcccacagtttagcacctagttaaaagaaagggcttcggaatcaggtaagtgtagattaaagttataacggcaaattgctgaacctttggaagcctcggtttttccacctggaaaatggatttttatcttacaggactgtcgtgaggattgatgagctaacattcctaaatcagggagtttgaagtctggcccagggtattttcctcctttcctgaaataatgtgtagttctgaccaagtgagaagaatcataagaatatgggattttgaaaaacatgaaaacatcctaagaaataccaggaaggagtcccacagtgaagcacaaatgaaactcaagatgactgcctaaaataagaaatcatggatcttaggagaaagggggcaaggaagtaaatcaaaggacaaagctgaagaccaagtggaccgaaaagaagatggaatacattttcccaaacactggtgttctctggagcaatcggaggatcgtgtggtttacttccagccagctgccccgtggtcctccagccagctccgggggccacagttttcacacgctccgggagcgatccgagagccgccttttcgtggaaagttacgctgccgcctggcaacccccgggaacgtcgggaggggcaagttgctgctcatccctcagtgctcaagtcatgagtagcgaattcctggctgagctgcactgggaggatgggttcgccatcccggtggcgaacgaggagaacaagctactggaagatcagttgtcaaagctgaaggatgaaagagcaagcttgcaagatgagttacgtgagtatgaagagcgaattaattctatgacttctcacttcaaaaatgttaagcaagagctctcaattacacagtctctttgcaaagcaagggagcgtgagactgaaagtgaagaacattttaaggccattgctcaaagagaattgggacgagtgaaagatgaaattcaacggctggaaaatgagatggcttcaatactggaaaagaaaagtgataaagaaaatggcatatttaaagccactcaaaaattggatggtttgaaatgtcaaatgaactgggaccagcaagcattggaggcctggttagaagaatcagctcataaagatagtgatgctctcactctccagaagtatgcacaacaagatgataataaaatcagggcactgactctgcaattagaaagactaactttggaatgtaatcagaaaagaaagatacttgacaacgaacttacagagactataagcgcacagttagaattggataaagcagcacaagattttcgtaagattcataatgaaagacaagaactcattaaacaatgggagaacacaatagaacagatgcagaagagggatggagacatagataactgtgctttggaattagcaaggataaagcaggaaacgagagaaaaagaaaatttggttaaagaaaagatcaagtttttggaaagtgagattgggaataacacagagtttgagaaaagaatttctgtggctgatcgtaaacttttaaaatgtagaacggcatatcaggaccatgaaactagtagaattcagctgaagggtgagctggattctttaaaagccactgtgaatagaacttccagtgatttagaagctctgaggaaaaatatttccaagataaagaaggacattcatgaagaaacagcaaggttacaaaaaactaaaaatcataatgagataatacaaacaaaattaaaggagataactgagaaaaccatgtctgtagaagagaaagctactaatttggaagatatgctaaaggaggaggaaaaagatgtgaaggaagtagatgttcaactgaacctcataaaaggtgtgctgtttaagaaagctcaggagttacagactgagacaatgaaagaaaaagctgttttatcagaaattgaaggaactcgttcctctctgaaacatctcaaccatcagttacaaaaactggattttgaaaccttgaagcagcaagaaattatgtacagccaggattttcacattcaacaagtggaacggagaatgtcacggttaaagggagaaattaattcagaagaaaaacaagcgcttgaagcaaaaattgttgaacttaggaagtctttggaagagaaaaaatctacatgtggccttttggaaacacagatcaagaagcttcataatgatctttattttatcaagaaggcacatagtaaaaacagtgatgaaaaacagtcccttatgaccaaaataaatgaactaaaccttttcatcgacagatcagagaaagaacttgataaagccaaaggttttaagcaggatttgatgatagaggacaatcttttaaaacttgaagttaagcgtactcgagaaatgcttcacagtaaggcagaagaagttctttccctagaaaaaagaaaacagcaattatacacagcaatggaagagcgaactgaagaaatcaaggttcataaaacaatgcttgcgtcacaaataagatatgttgatcaagaacgggaaaacataagcactgagtttcgcgagcggctaagtaaaattgagaagctgaagaatagatatgaaattctgactgttgttatgctgcctcctgaaggagaagaggagaaaacacaggcctattatgtaataaaggtgatgagtatgagctaaaaattcaactagaagaacaaaaaagagctgttgatgaaaaatacagatacaaacaaagacaaatcagagaacttcaagaagacatccagagcatggaaaatacattagatgttatagaacatttggcaaataatgttaaagaaaagttatcagagaagcaggcttattcatttcaactaagtaaagaaacggaggagcagaagccaaaattagaaagagtgaccaaacagtgtgcaaaactcacaaaggaaatccgtcttttgaaagacacaaaagatgaaacaatggaagaacaagacatcaaacttcgtgaaatgaaacagtttcacaaagttattgatgaaatgttagttgatatcatagaagaaaatactgagatccgtattatccttcaaacatactttcaacagagtgggttagaactacctacagctagcacaaaaggcagtcgtcagagctctagatctccttcacatacttcactatcagcaaggtcatctaggagtacaagtacatctacttctcagtcttcaattaaagtactggagcttaaattcccggcctcctcttcactagtaggcagcccttctaggccatctagtgctagtagtagctctagtaatgttaagagcaaaaagagcagcaaataaacattttaatctcttctgaaaaagttgtaaacacaaaaacaaaaatatactttaaaatacaaaacgacccaacacattttatctagtggaaagtgtaaaaacttagtggtaagtgtaaaaactgatagttttaaaaaaaaaggaacgttctcattttctctactgttttcttcatactgaagaaattaatagcagattcttgacaaggctacatgttatacaagcataggaaaaatgctgtatttcactgtaattctgatgttcgtagtgttagaaaatagtttgcttcattatttcacgaaactacactcacttctaatgtaacaatctttcaagaagaaatttctaaagatttactgtactattatgagcgtattgcaatgtgaaaatctcatttaccctacaagacaccaaaattaggttttctttattcaaagtaactatttctcagacttttggggagaaaaattgttaaaggcagtttcttcttttgctataatttttaaccaaaaaatagcatcaacccctacccaccccacccccccaaaaaaaaaccggtaagagaaacactgtatatcaattttaaaatgcagcataaatttagaaaaatcacttctgaccttgaaataaatcacttctgaccttgaaataaacgcattaaagatttgctttcagatacagccaaccaagtataaacaattttgaaattttcttgatttaataaacgatttaatgaaagctaggtatgacttgatttgcaatagaaatttcatttacagttggaggtagactgccaaatgtagtagtttttccagttaacacttcattataacatgtgcccaacactttgtactcttggaatagagtgtggaatattataaaactggattttaaataaatgtattagaattca

SEQ ID NO: 10080 - protein, 748 aa, Homo sapiens
MEYIFPNTGVLWSNRRIVWFTSSQLPRGPPASSGGHSFHTLRERSESRLFVESYAAAWQPPGTSGGASCCSSLSAQVMSSEFLAELHWEDGFAIPVANEENKLLEDQLSKLKDERASLQDELREYEERINSMTSHFKNVKQELSITQSLCKARERETESEEHFKAIAQRELGRVKDEIQRLENEMASILEKKSDKENGIFKATQKLDGLKCQMNWDQQALEAWLEESAHKDSDALTLQKYAQQDDNKIRALTLQLERLTLECNQKRKILDNELTETISAQLELDKAAQDFRKIHNERQELIKQWENTIEQMQKRDGDIDNCALELARIKQETREKENLVKEKIKFLESEIGNNTEFEKRISVADRKLLKCRTAYQDHETSRIQLKGELDSLKATVNRTSSDLEALRKNISKIKKDIHEETARLQKTKNHNEIIQTKLKEITEKTMSVEEKATNLEDMLKEEEKDVKEVDVQLNLIKGVLFKKAQELQTETMKEKAVLSEIEGTRSSLKHLNHQLQKLDFETLKQQEIMYSQDFHIQQVERRMSRLKGEINSEEKQALEAKIVELRKSLEEKKSTCGLLETQIKKLHNDLYFIKKAHSKNSDEKQSLMTKINELNLFIDRSEKELDKAKGFKQDLMIEDNLLKLEVKRTREMLHSKAEEVLSLEKRKQQLYTAMEERTEEIKVHKTMLASQIRYVDQERENISTEFRERLSKIEKLKNRYEILTVVMLPPEGEEEKTQAYYVIKVMSMS

SEQ ID NO: 10081 - DNA, 3141 bp, Homo sapiens
atggaatacattttcccaaacactggtgttctctggagcaatcggaggatcgtgtggtttacttccagccagctgccccgtggtcctccagccagctccgggggccacagttttcacacgctccgggagcgatccgagagccgccttttcgtggaaagttacgctgccgcctggcaacccccgggaacgtcgggaggggcaagttgctgctcatccctcagtgctcaaggacgcgggaaggttgctagggctcccccggcaattgccgcggcactgtgcaggtgcctgggcttgacgcgggtgctgctcacccgctgtacaagaaggcggatctttgctctgtatcttctctatccgtttgcagtcatgagtagcgaattcctggctgagctgcactgggaggatgggttcgccatcccggtggcgaacgaggagaacaagctactggaagatcagttgtcaaagctgaaggatgaaagagcaagcttgcaagatgagttacgtgagtatgaagagcgaattaattctatgacttctcacttcaaaaatgttaagcaagagctctcaattacacagtctctttgcaaagcaagggagcgtgagactgaaagtgaagaacattttaaggccattgctcaaagagaattgggacgagtgaaagatgaaattcaacggctggaaaatgagatggcttcaatactggaaaagaaaagtgataaagaaaatggcatatttaaagccactcaaaaattggatggtttgaaatgtcaaatgaactgggaccagcaagcattggaggcctggttagaagaatcagctcataaagatagtgatgctctcactctccagaagtatgcacaacaagatgataataaaatcaggttagaattggataaagcagcacaagattttcgtaagattcataatgaaagacaagaactcattaaacaatgggagaacacaatagaacagatgcagaagagggatggagacatagataactgtgctttggaattagcaaggataaagcaggaaacgagagaaaaagaaaatttggttaaagaaaagatcaagtttttggaaagtgagattgggaataacacagagtttgagaaaagaatttctgtggctgatcgtaaacttttaaaatgtagaacggcatatcaggaccatgaaactagtagaattcagctgaagggtgagctggattctttaaaagccactgtgaatagaacttccagtgatttagaagctctgaggaaaaatatttccaagataaagaaggacattcatgaagaaacagcaaggttacaaaaaactaaaaatcataatgagataatacaaacaaaattaaaggagataactgagaaaaccatgtctgtagaagagaaagctactaatttggaagatatgctaaaggaggaggaaaaagatgtgaaggaagtagatgttcaactgaacctcataaaaggtgtgctgtttaagaaagctcaggagttacagactgagacaatgaaagaaaaagctgttttatcagaaattgaaggaactcgttcctctctgaaacatctcaaccatcagttacaaaaactggattttgaaaccttgaagcagcaagaaattatgtacagccaggattttcacattcaacaagtggaacggagaatgtcacggttaaagggagaaattaattcagaagaaaaacaagcgcttgaagcaaaaattgttgaacttaggaaattgttgatatccttactatctgggacttgcgtagaatcaaacaatgaactccaatatgggagtggtaaaccatgtgatgaactgaatgatctttattttatcaagaaggcacatagtaaaaacagtgatgaaaaacagtcccttatgaccaaaataaatgaactaaaccttttcatcgacagatcagagaaagaacttgataaagccaaaggttttaagcaggatttgatgatagaggacaatcttttaaaacttgaagttaagcgtactcgagaaatgcttcacagtaaggcagaagaagttctttccctagaaaaaagaaaacagcaattatacacagcaatggaagagcgaactgaagaaatcaaggttcataaaacaatgcttgcgtcacaaataagatatgttgatcaagaacgggaaaacataagcactgagtttcgcgagcggctaagtaaaattgagaagctgaagaatagatatgaaattctgactgttgttatgctgcctcctgaaggagaagaggagaaaacacaggcctattatgtaataaaggctgctcaagaaaaagaagaacttcaaagggaaggtgactgtttggatgccaagatcaacaaagctgaaaaagaaatctacgctctagaaaatacccttcaagtgctgaacagctgtaacaacaattataagcaatcttttaaaaaagtgactccatctagtgatgagtatgagctaaaaattcaactagaagaacaaaaaagagctgttgatgaaaaatacagatacaaacaaagacaaatcagagaacttcaagaagacatccagagcatggaaaatacattagatgttatagaacatttggcaaataatgttaaagaaaagttatcagagaagcaggcttattcatttcaactaagtaaagaaacggaggagcagaagccaaaattagaaagagtgaccaaacagtgtgcaaaactcacaaaggaaatccgtcttttgaaagacacaaaagatgaaacaatggaagaacaagacatcaaacttcgtgaaatgaaacagtttcacaaagttattgatgaaatgttagttgatatcatagaagaaaatactgagatccgtattatccttcaaacatactttcaacagagtgggttagaactacctacagctagcacaaaaggcagtcgtcagagctctagatctccttcacatacttcactatcagcaaggtcatctaggagtacaagtacatctacttctcagtcttcaattaaagtactggagcttaaattcccggcctcctcttcactagtaggcagcccttctaggccatctagtgctagtagtagctctagtaatgttaagagcaaaaagagcagcaaataaacattttaatctcttctg

SEQ ID NO: 10082 - protein, 1040 aa, Homo sapiens
MEYIFPNTGVLWSNRRIVWFTSSQLPRGPPASSGGHSFHTLRERSESRLFVESYAAAWQPPGTSGGASCCSSLSAQGRGKVARAPPAIAAALCRCLGLTRVLLTRCTRRRIFALYLLYPFAVMSSEFLAELHWEDGFAIPVANEENKLLEDQLSKLKDERASLQDELREYEERINSMTSHFKNVKQELSITQSLCKARERETESEEHFKAIAQRELGRVKDEIQRLENEMASILEKKSDKENGIFKATQKLDGLKCQMNWDQQALEAWLEESAHKDSDALTLQKYAQQDDNKIRLELDKAAQDFRKIHNERQELIKQWENTIEQMQKRDGDIDNCALELARIKQETREKENLVKEKIKFLESEIGNNTEFEKRISVADRKLLKCRTAYQDHETSRIQLKGELDSLKATVNRTSSDLEALRKNISKIKKDIHEETARLQKTKNHNEIIQTKLKEITEKTMSVEEKATNLEDMLKEEEKDVKEVDVQLNLIKGVLFKKAQELQTETMKEKAVLSEIEGTRSSLKHLNHQLQKLDFETLKQQEIMYSQDFHIQQVERRMSRLKGEINSEEKQALEAKIVELRKLLISLLSGTCVESNNELQYGSGKPCDELNDLYFIKKAHSKNSDEKQSLMTKINELNLFIDRSEKELDKAKGFKQDLMIEDNLLKLEVKRTREMLHSKAEEVLSLEKRKQQLYTAMEERTEEIKVHKTMLASQIRYVDQERENISTEFRERLSKIEKLKNRYEILTVVMLPPEGEEEKTQAYYVIKAAQEKEELQREGDCLDAKINKAEKEIYALENTLQVLNSCNNNYKQSFKKVTPSSDEYELKIQLEEQKRAVDEKYRYKQRQIRELQEDIQSMENTLDVIEHLANNVKEKLSEKQAYSFQLSKETEEQKPKLERVTKQCAKLTKEIRLLKDTKDETMEEQDIKLREMKQFHKVIDEMLVDIIEENTEIRIILQTYFQQSGLELPTASTKGSRQSSRSPSHTSLSARSSRSTSTSTSQSSIKVLELKFPASSSLVGSPSRPSSASSSSSNVKSKKSSK

SEQ ID NO: 10083 - DNA, 734 bp, Homo sapiens
agggctcccccggcaattgccgcggcactgtgcaggtgcctgggcttgacgcgggtgctgctcacccgctgtacaagaaggcggatctttgctctgtatcttctctatccgtttgcagtcatgagtagcgaattcctggctgagctgcactgggaggatgggttcgccatcccggtggcgaacgaggagaacaagctactggaagatcagttgtcaaagctgaaggatgaaagagcaagcttgcaagatgagttacgtgagtatgaagagcgaattaattctatgacttctcacttcaaaaatgttaagcaagagctctcaattacacagtctctttgcaaagcaagggagcgtgagactgaaagtgaagaacattttaaggccattgctcaaagagaattgggacgagtgaaagatgaaattcaacggctggaaaatgagatggcttcaatactggaaaagaaaagtgataaagaaaatggcatatttaaagccactcaaaaattggatggtttgaaatgtcaaatgaactgggaccagcaagcattggaggcctggttagaagaatcagctcataaagatagtgatgctctcactctccagaagtatgcacaacaagatgataataaaatcagggcactgactctgcaattagaaagactaactttggaatgtaatcagaaaagaaagatacttgacaacgaacttacagagactataagcgcacaggttag

SEQ ID NO: 10084 - protein, 203 aa, Homo sapiens
MSSEFLAELHWEDGFAIPVANEENKLLEDQLSKLKDERASLQDELREYEERINSMTSHFKNVKQELSITQSLCKARERETESEEHFKAIAQRELGRVKDEIQRLENEMASILEKKSDKENGIFKATQKLDGLKCQMNWDQQALEAWLEESAHKDSDALTLQKYAQQDDNKIRALTLQLERLTLECNQKRKILDNELTETISAQ

SEQ ID NO: 10085 - DNA, 794 bp, Homo sapiens
ctagtttttgcctccactaccttactgatcatgcatttgcaagattaagtatttccaatatttattattataaaccacatattatatctttgttactatcgctgtagtatatgacctggaacggctagactaagagtatcactccatcacccaggctggagcacagtggtgcaacctcagctcactgcaagctctgcctcctgggttcgagtgattcatgtgcctcagcctcccaagaagctggaattacagagtaatcaaaaagaggagccgactagacacagccaggaagagcttctcccaccggaagaccagaccagcaagaaagttggcaccctccaagcaggttgttgaaaggaaggccttgaatgtggacagaggacgatgcagatgaggaaagactagaaggttctgtacctgttaacagtggctgatcctagaagagtgaaatttaggcaggtagttggaaagaacacagcacagaaaactttaggatgaattttcctagcagccattctgtatcgtcaaagttgtcaaagctgaaggatgaaagagcaagcttgcaagatgagttacgtgagtatgaagagcgaattaattctatgacttctcacttcaaaaatgttaagcaagagctctcaattacacagtctctttgcaaagcaagggagcgtgagactgaaagtgaagaacattttaaggccattgctcaaagagaattgggacgagtgaaagatgaaattcaacggctggaaaatgagatggcttcaatactggaaaagaaaagtgataaa

SEQ ID NO: 10086 - protein, 99 aa, Homo sapiens
MNFPSSHSVSSKLSKLKDERASLQDELREYEERINSMTSHFKNVKQELSITQSLCKARERETESEEHFKAIAQRELGRVKDEIQRLENEMASILEKKSD

SEQ ID NO: 10087 - DNA, 285 bp, Homo sapiens
cctccggcaccactcccatacttgcatttttctttgcatttttgtttgctaacatttaaagtgtggaatttcgcataaacgtctgtatttcctctgcttgaaaaagggctttgactccaacctctgaaaatgcttcaattcaatgaaactaatggcactttggtctctggaattagatcctgttatcaatgacttccacatggaaagatcattccaaaatgtgtaattaaccaagaaaatgcaaataaaccaatttgtacctgctatttagaggtaagacacaga

SEQ ID NO: 10088 - protein, 30 aa, Homo sapiens
LPHGKIIPKCVINQENANKPICTCYLEVRH

SEQ ID NO: 10089 - DNA, 2873 bp, Homo sapiens
gcacgctctgccgccaggagtggcaggaggcgagctgagtgaaatgagctgctccagttcccgcccacgaagggggttaagatgaagggaacaatcctgtctcatctgggggcctgtccaggatatgaaaaacaagtatcactccatcacccaggctggagcacagtggtgcaacctcagctcactgcaagctctgcctcctgggttcgagtgattcatgtgcctcagcctcccaagaagctggaattacagactctacccaacaacagcagaatacacattttcttcaggttgaccaagagcattaaccaagagtaatcaaaaagaggagccgactagacacagccaggaagagcttctcccaccggaagaccagaccagcaagaaagttggcaccctccaagcaggttgttgaaaggaaggccttgaatgtggacagaggacgatgcagatgaggaaagactagaaggttctgtacctgttaacagtggctgatcctagaagagtgaaatttaggcaggtagttggaaagaacacagcacagaaaactttaggatgaattttcctagcagccattctgtatcgtcaaagccttcaatccctgaggagagagttaatggcacacaggagtggggtgatttgggcaatgagtgcttcttcctttcaacctgttgctgcctaacacaaggacaattggtcttccaccctcttcacagttcattcagtcattgtccctgtctcccaggtgagttgagtgaaaataatggtgacaagaagcccactgcctgattcacataagcaaggcatgctgcagggaagacagggttcttattaatatttcctttcatgtgcttacatatgagttacagttgctaatcctttcccacagtttagcacctagttaaaagaaagggcttcggaatcaggtaagtgtagattaaagttataacggcaaattgctgaacctttggaagcctcggtttttccacctggaaaatggatttttatcttacaggactgtcgtgaggattgatgagctaacattcctaaatcagggagtttgaagtctggcccaggatcgtctagattttgacgttctccttgtctttgctgtgtacccctgggagaaacaaagggtgagaagaaacaagggaaaggagaaacatttgtgttttccaacttttcagtgttgatcagccagcgggaataaagagaagatgtgtaagatggagggcaaaagagattcccagaagctgctgcagatctcttccagttgcatttcgaaagccattacttaagtgtatattcacacctagctgcaagaaaggctgggattgtattctgtattctgggcagtgatgtgtccagctgagcactggagttttattaataaggaagaaggtattttcctcctttcctgaaataatgtgtagttctgaccaagtgagaagaatcataagaatatgggattttgaaaaacatgaaaacatcctaagaaataccaggaaggagtcccacagtgaagcacaaatgaaactcaagatgactgcctaaaataagaaatcatggatcttaggagaaagggggcaaggaagtaaatcaaaggacaaagctgaagaccaagtggaccgaaaagaagatggaatacattttcccaaacactggtgttctctggagttggcttatcaacatcttgtgtaatagtcatataattgtccctcatttctatctcctcctaaaactagagaaatggcctattaattttagaaggtgtataattatcacaaagccctcagattaaggtccaggacacagaatggaatatatgagcacgcagaaatgtatacctttagattgaacttggatgatttaccttttgactgtcaccaccagcaaatcctgaaattggatctcttgaaacttatggttttctttcagcagcataggagttaagttttcttctaacttgccctaggttctctcaggaactgggaaagcagttctcccaaatcccaagtaaggtattcaagacaacataaggcagagctaaattcttctgttgaagaatttaacatgactcaaaccataaggaaatctaaagaaggctgccaaactatttcgctgctgccctcccccaccaaaaaagagataaaaatgttagatttacaaagcaaactacagtgtatggaatatatatatctatatatagagagatatatatacacacacacaatttttttaacctaccactttgtcttatttgcatgagcacaaatcgctttcaacttaatgccagagaaaaaggcaacattccccgtgatgacttgctgaaaagctcactgtatttgtttgataatggattttagttcattgtcatgtacttcactcttcatcagcaggagcacttcagggtaaagaaacaggcttttaccacactggaacaaaagctatataaggaaaaaaaaatcctgagcagatggaatattatttgcatttgcacaaatagtgctttttagcacaattcatattactccattgtgagctaaagtaagccacatgtgtctacagcatgctgcagacgcagaatcggctttttgtttgtcagactcagaggtcccaaccttatgatatctttgtacttgtatatccattagttttatttcagttacttatcagaagggaaaagaaaaaaatggcactatgcagttaagaggaccattgcatggagggctaaattaactattttttattttcatgaatgaggatcaaataggtttcagatgtctcgacatctatctggagatctagatgatgatataaaattaaaatgcagaatgtaagtgtaataaaatttgtttctccatgattacatt

SEQ ID NO: 10090 - protein, 78 aa, Homo sapiens; identical to SEQ ID NO: 4488

SEQ ID NO: 10091 - DNA, 1043 bp, Homo sapiens
agtttcagtcagagtacgtacttccttgagattactacttggaagttgagaagcctgaagctcctgggaaacctagtttttgcctccactaccttactgatcatgcatttgcaagattaagtatttccaatatttattattataaaccacatattatatctttgttactatcgctgtagtatatgacctggaacggctagactaagagtaatcaaaaagaggagccgactagacacagccaggaagagcttctcccaccggaagaccagaccagcaagaaagttggcaccctccaagcaggttgttgaaaggaaggccttgaatgtggacagaggacgatgcagatgtttctcaattttttttcttagaatatgggattttgaaaaacatgaaaacatcctaagaaataccaggaaggagtcccacagtgaagcacaaatgaaactcaagatgactgcctaaaataagaaatcatggatcttaggagaaagggggcaaggaagtaaatcaaaggacaaagctgaagaccaagtggaccgaaaagaagatggaatacattttcccaaacactggtgttctctggagttggcttatcaacatcttgtgtaatagtcatataattgtccctcatttctatctcctcctaaaactagagaaatggcctattaattttagaaggtgtataattatcacaaagccctcagattaaggtccaggacacagaatggaatatatgagcacgcagaaatgtatacctttagattgaacttggatgatttaccttttgactgtcaccaccagcaaatcctgaaattggatctcttgaaacttatggttttctttcagcagcataggagttaagttttcttctaacttgccctaggttctctcaggaactgggaaagcagttctcccaaatcccaagtaaggtattcaagacaacataaggcagagctaaattcttctgttgaagaatttaacatgactcaaaccataaggaaatctaaagaaggctgccaaactatttcgctgctgccctcccc

SEQ ID NO: 10092 - protein, 53 aa, Homo sapiens
MEYIFPNTGVLWSWLINILCNSHIIVPHFYLLLKLEKWPINFRRCIIITKPSD

SEQ ID NO: 10093 - DNA, 576 bp, Homo sapiens
atgtggccagcaggactggttgtgttccaggggctggacttccagagagcagaatacaaagcagccatagttcacaatgttgattctgatgacctcattaacattggatccaatgacattgaggtactaaagaaaattgacattctatctgtctctattggtgaatcatcagctaattctctgaaagatgaattcatgtatgaaaaaggggaccaccttatcttagttccagaatttagtcttcctttggaatgctgcctaattcccttccttatcatagtgagtatctgtctcatcttgatagtcattttcatgatcacaaaatttttccaggatagacatagagctagaagaaacagactttgtaaagatcaacttaagaaactccctgtacataaattcaagaaaggagatgagtatgatgtatgtgccatttgttcagatgagtaggaagatggagacaagctcagaatccttccctgttcccatgcttatcactgcaagtgtgtagacccttggctaactaaaaccaaaaaaacctgtcctgtgtgcaagcaaaaatttccttctcaaggc

SEQ ID NO: 10094 - protein, 149 aa, Homo sapiens
MWPAGLVVFQGLDFQRAEYKAAIVHNVDSDDLINIGSNDIEVLKKIDILSVSIGESSANSLKDEFMYEKGDHLILVPEFSLPLECCLIPFLIIVSICLILIVIFMITKFFQDRHRARRNRLCKDQLKKLPVHKFKKGDEYDVCAICSDE

SEQ ID NO: 10095 - DNA, 1479 bp, Homo sapiens
atgggccagcttcttactgctccatttcccatgaagttaaaacaccaaaacctcaggaagcccgggaagttctccaaactggtcctgctcacggcctccaaccaagatgaggttggggtgggcttcaagccccaggaagtgcactgtgtcttgtccctggagatggccggccccgccaccctcgccagcaccttgcatatcctgccagctgaggagcagggaggggagaaggctgtcggggacaaggtgtactggaagtgccgccagcatgctgagctgggctgccggggccaggccatcacccgaggtctgcgggccacagtgatgcggggctgctgccaagcgcccgatgagcaaggcctggagccctggcgccagagggagaagctgcccagcctggccctgccagaggtcttgggacatccccggggtcctgagggctctggaagccgagtggaggagccgctggagagggggggcctgtggcagtgccccaaggagccggagccagagcccacccctgggctagcccggccccttgagttcctgaggacgtgctacggggatagcttcctggtgcacgagtcgttcctctacaagcgggagaaggccgtgggggagaaggcgtattggacctgccgggaccacgcgctgcacagctgccggagccgggccatcacccagggacagcaggtgaccgtgatgcgtggccactgctacccgcccgacgtggagggcctggaggcccggcggcagcaggagaaggccatggagacgctgcaggctgtgcaggccggccctgggagccaagtggacactctcctccaaggcgtgaacagttttctctgcctcaggggccccggccccctgactctcaccaggccccggcccagaaagcgagcgaaggtcgaagaccaggagctgccaacccatccccaagccctggaaggattcctggacgaggaccaggacatggatgccgaccccggaagccctgagttcctgcggaccccgctggagggcagcttcctggtatacgagtccttcctctataagcaggtgtattggacctcccgggaccaggtccgcatgggctgccgcagcctcgccatcacccagggccggcgggccatggtgatgcgcaggcactgccgcccaccggacgtgggtggcctggaggcactgcggcagcgggagcacttctccatcttggcgcagaaggagaaggcggccggggagaaggtgtactggatgtgccgggatcaggctcggctgggctgccacagccatgccatcacccagggccagcgggttatggtcatgcgcagccgctgccaccagcccaacctggatggcctagaggccttgaggcagcgggagcggctccccagcatggcccagcaggaggacccagaaaagattcaagttcaactgtgcttcaagacatgttttcctgaaagccagccgatttatgggtaa

SEQ ID NO: 10096 - protein, 492 aa, Homo sapiens
MGQLLTAPFPMKLKHQNLRKPGKFSKLVLLTASNQDEVGVGFKPQEVHCVLSLEMAGPATLASTLHILPAEEQGGEKAVGDKVYWKCRQHAELGCRGQAITRGLRATVMRGCCQAPDEQGLEPWRQREKLPSLALPEVLGHPRGPEGSGSRVEEPLERGGLWQCPKEPEPEPTPGLARPLEFLRTCYGDSFLVHESFLYKREKAVGEKAYWTCRDHALHSCRSRAITQGQQVTVMRGHCYPPDVEGLEARRQQEKAMETLQAVQAGPGSQVDTLLQGVNSFLCLRGPGPLTLTRPRPRKRAKVEDQELPTHPQALEGFLDEDQDMDADPGSPEFLRTPLEGSFLVYESFLYKQVYWTSRDQVRMGCRSLAITQGRRAMVMRRHCRPPDVGGLEALRQREHFSILAQKEKAAGEKVYWMCRDQARLGCHSHAITQGQRVMVMRSRCHQPNLDGLEALRQRERLPSMAQQEDPEKIQVQLCFKTCFPESQPIYG

SEQ ID NO: 10097 - DNA, 525 bp, Homo sapiens
ctgcattcactcaatggcttcttgctgccaattaaaactgtaagtgtgcagggtgactgtcgttcctacagttacgtgtgtggcatctccagtaaagatgaacctgactaggaatcacttatttttctggctaggcttatgcctcgcatgtgtcacaacgttaacagagttatttgtatatttggcccaccagttaaagaacctcctacagatgttactcccactttcttgacaacaggggtgctcagtactttacgccaagctgattttgaggcccataacattctcagggagtctgggtatgctgggaaaatcagccagatgccggtgattttgacacctttattactagtgactccctgactggtatacctgcaacacctggcaatgagatccctgtagaggtggtattaaagatggtcactgagattaagaagattcctggtatttctcgaattatgtatgacttaacatcaaagcccccaggaactactgagtgggagtaataaacttcttgttctatta

SEQ ID NO: 10098 - protein, 74 aa, Homo sapiens
MPRMCHNVNRVICIFGPPVKEPPTDVTPTFLTTGVLSTLRQADFEAHNILRESGYAGKISQMPVILTPLLLVTP

SEQ ID NO: 10099 - DNA, 3855 bp, Homo sapiens
gacagccccgtggggccagccagcgctgggccaggagcggccacctggttcctgcgtgctacggccctgtgggcctgggagctgcctctgaggaacacgccgcagggccaggcatgtgaggtctctgcgggtcatggagaacctccctgccgtgaccactgaggagccgacccccatggggaggggtcctgtgggaccctcaggaggtggcagcacccgggaccaggtccggactgtggtcatgaggccctctgtgagctgggagaaagcggggcccgaggaggccaaggcgccagtgagaggcgacctgaccctgcagctgctggctgtgcggaggaagagcagactgcgggaccccggcctacagcagaccctccggggccagctccgcctgctggagaatgatagccgggagatggcccgcgtgcttggggaattatcagccaggctgctgtccatccacagtgaccaggaccggatcgtggtgacgtttaagacttttgaagaaatctggaagttttccacctaccatgctctcggcttcactcatcactgcctggcaaacctgctcatggaccaggccttctggctgctcttgcccagtgaggaggaggagacggccatccaagtccatgtggatgagaacgccttaaggctgacccacgagagcctcctcatccaagaaggtgggctcttaggatcccccaggaccccatcgacgatgccatgggtggccctgtgatgcccggcaacccgctgatggctgtgggcctggcctcggcattggcagacttccagggctcggggcccgaagagatgaccttccgaggtggcgacctcatcgagatccttggggcgcaggtgcccagcctgccctggtgcgtgggccgacacgcagcctcgggccgggtggggtttgtgcggagcagcctcatcagcatgcagggccccgtgtccgagttggaaagtgcgatttttctcaatgaggaagaaaagtcattcttcagcgagggctgcttttctgaggaggatgccaggcagttgctgaggcggatgtcgggcaccgatgtctgcagcgtgtacagcctggactcagtagaggaagctgagaccgagcagccgcaggaaaaagaaatacctccaccttgcctgagcctggagccacaggagaccttgcagaaggtgaagaatgttctggaacaatgcaagacctgcccaggctgcccccaggagccagcgtcctggggtctctgtgcggcatccagcgacgtgagcttgcaggaccccgaggagccctccttctgcttggaagccgaggatgactgggaggacccagaggccctgagctcactgctgctgttcctgaacgcccctgggtacaaggccagcttccgtggcctgtacgatgtggcgctgccgtggctgagcagcgtgttccgcagcttcagcgacgaggaggagctgactgggcgcctggcacaggcccggggggcggccaagaaagctggcctcctcatggccctggccaggctctgcttcctcctggggcggctgtgcagcaggaggctcaagctgtcccaggcccgggtgtactttgaggaagcgctgggggccctggagggcagcttcggggacctgttcctagtggtggctgtgtacgccaacctggccagcatttaccggaagcagaagaaccgggagaagtgtgcacaggtggtgcccaaagccatggccctgctcctggggacgcctgaccacatctgcagcaccgaggcggagggggagctcctgcagctggcgctgcggcgggcggtgggtggccagagcctgcaggccgaggcccgggcctgcttcctgctggccaggcaccacgtgcacctcaagcagcccgaggaggccctgcccttcctagagcggctgctgcttttgcacagggactcgggagccccagaggccgcgtggctctcagactgctacctactcctggctgacatctacagccgcaagtgcctgccccacctggtgctgagctgtgtcaaggtggcctcattgcggacacggggctcgctggccggctcgctgaggagtgtgaacctggtgctccagaacgccccccagccccacagcctccctgcccaaacttcccactacctcaggcaagcgctggcctccctgaccccgggcacaggccaggcgctgcgcggccccctctacaccagcttggcccagctgtacagccaccatggctgccacggcccggccatcaccttcatgacgcaggcagtggaagccagtgctattgccggagtccgtgccatcgtggaccacctggtggccctggcctggctgcacgtgcttcatgggcagagcccggtggccctggacatcctgcagtctgtccgggatgcagtggtggccagcgaggaccaggagggcgtgattgccaacatggtggccgtggctctgaagaggacgggccggacgaggcaggcagctgagagctactaccgcgccctgcgggtggctcgggacctgggccagcaaaggaaccaggcagtggggctggccaacttcggggccctgtgcctgcatgcgggtgccagcaggctggcccagcactacctcctggaggccgtgcggctgttctcgaggctgccccttggggagtgtggccgggacttcacccacgtgctcctgcagctgggccatctctgcacccgccagggcccggcccagcagggcaagggctactacgagtgggcccttctggtcgccgtggagatgggccacgtggagagccagctgcgggccgtccagcggctgtgccacttctacagcgccgtcatgcccagcgaggcccagtgtgtcatctaccatgagctccagctctccctggcctgcaaggtggccgacaaggtgctggaggggcagctcctggagaccatcagccagctctacctgtccctgggcaccgagcgggcctacaaatccgcactggactacaccaaacgaagtctggggattttcattgacctccagaagaaagagaaggaggcgcatgcctggctgcaagcagggaagatctattacatcttgcggcagagcgagctggtggacctctacatccaggtggcacagaacgtggccctgtacacaggcgaccccaacctggggctggagctgtttgaggcggctggagacatcttcttcgacggggcctgggagcgggagaaagctgtgtccttctaccgggggaccggctgaacgagcgcgtggcctaccaccggctggccgccctgcaacaccgactgggccatggcgagctggcagagcacttctacctcaaggccctgtcgctctgcaactcgccgctggagtttgacgaggagaccctctactacgtgaaggtgtacctggtgctcggtgacatcatcttctacgacctgaaggacccgtttgatgcagccgggtactaccagctggcgctggcagccgccgtggacctgggcaacaagaaggcacagctgaagatctacacgcggctggccaccatctaccacaacttcctcctggaccgtgagaagtcgctcttcttctaccagaaggccaggaccttcgccacagagctcaacgtccgcagggtcaacctgcctcctctgccactctgcgggtgggccccctggttggcccccagccaccctcgctgaggacagcatccaagggagtgggttttgtgcaagggctgggggtctcctgcctctcctggtgtcgccggtggctcattttctggcaaatggaggcacgaacgcaggggccaaatagcaataaatgggttttgttttttttttgcaataa

SEQ ID NO: 10100 - protein, 845 aa, Homo sapiens
MGGPVMPGNPLMAVGLASALADFQGSGPEEMTFRGGDLIEILGAQVPSLPWCVGRHAASGRVGFVRSSLISMQGPVSELESAIFLNEEEKSFFSEGCFSEEDARQLLRRMSGTDVCSVYSLDSVEEAETEQPQEKEIPPPCLSLEPQETLQKVKNVLEQCKTCPGCPQEPASWGLCAASSDVSLQDPEEPSFCLEAEDDWEDPEALSSLLLFLNAPGYKASFRGLYDVALPWLSSVFRSFSDEEELTGRLAQARGAAKKAGLLMALARLCFLLGRLCSRRLKLSQARVYFEEALGALEGSFGDLFLVVAVYANLASIYRKQKNREKCAQVVPKAMALLLGTPDHICSTEAEGELLQLALRRAVGGQSLQAEARACFLLARHHVHLKQPEEALPFLERLLLLHRDSGAPEAAWLSDCYLLLADIYSRKCLPHLVLSCVKVASLRTRGSLAGSLRSVNLVLQNAPQPHSLPAQTSHYLRQALASLTPGTGQALRGPLYTSLAQLYSHHGCHGPAITFMTQAVEASAIAGVRAIVDHLVALAWLHVLHGQSPVALDILQSVRDAVVASEDQEGVIANMVAVALKRTGRTRQAAESYYRALRVARDLGQQRNQAVGLANFGALCLHAGASRLAQHYLLEAVRLFSRLPLGECGRDFTHVLLQLGHLCTRQGPAQQGKGYYEWALLVAVEMGHVESQLRAVQRLCHFYSAVMPSEAQCVIYHELQLSLACKVADKVLEGQLLETISQLYLSLGTERAYKSALDYTKRSLGIFIDLQKKEKEAHAWLQAGKIYYILRQSELVDLYIQVAQNVALYTGDPNLGLELFEAAGDIFFDGAWEREKAVSFYRGTG

SEQ ID NO: 10101 - DNA, 6162 bp, Homo sapiens
cagccccgtggggccagccagcgctgggccaggagcggccacctggttcctgcgtgctacggccctgtgggcctgggagctgcctctgaggaacacgccgcagggccaggcatgtgaggtctctgcgggtcatggagaacctccctgccgtgaccactgaggagccgacccccatggggaggggtcctgtgggaccctcaggaggtggcagcacccgggaccaggtccggactgtggtcatgaggccctctgtgagctgggagaaagcggggcccgaggaggccaaggcgccagtgagaggcgagagacctggagcgtttggcgccttcagaggagccaggcctttgcttggtctcccctaatcctgggaacctgctgtgttgcagacgaggctcctcctgcccgcgtggctgggcctgctgctgggacccctccctgccagatgggggtttatcccacagacctgaccctgcagctgctggctgtgcggaggaagagcagactgcgggaccccggcctacagcagaccctccggggccagctccgcctgctggagaatgatagccgggagatggcccgcgtgcttggggaattatcagccaggctgctgtccatccacagtgaccaggaccggatcgtggtgacgtttaagacttttgaagaaatctggaagttttccacctaccatgctctcggcttcactcatcactgcctggcaaacctgctcatggaccaggccttctggctgctcttgcccagtgaggaggaggagacggccatccaagtccatgtggatgagaacgccttaaggctgacccacgagagcctcctcatccaagaaggtgggctcttaggatcccccaggaccccatcgacgatgccatgggtggccctgtgatgcccggcaacccgctgatggctgtgggcctggcctcggcattggcagacttccagggctcggggcccgaagagatgaccttccgaggtggcgacctcatcgagatccttggggcgcaggtgcccagcctgccctggtgcgtgggccgacacgcagcctcgggccgggtggggtttgtgcggagcagcctcatcagcatgcagggccccgtgtccgagttggaaagtgcgatttttctcaatgaggaagaaaagtcattcttcagcgagggctgcttttctgaggaggatgccaggcagttgctgaggcggatgtcgggcaccgatgtctgcagcgtgtacagcctggactcagtagaggaagctgagaccgagcagccgcaggaaaaagaaatacctccaccttgcctgagcctggagccacaggagaccttgcagaaggtgaagaatgttctggaacaatgcaagacctgcccaggctgcccccaggagccagcgtcctggggtctctgtgcggcatccagcgacgtgagcttgcaggaccccgaggagccctccttctgcttggaagccgaggatgactgggaggacccagaggccctgagctcactgctgctgttcctgaacgcccctgggtacaaggccagcttccgtggcctgtacgatgtggcgctgccgtggctgagcagcgtgttccgcagcttcagcgacgaggaggagctgactgggcgcctggcacaggcccggggggcggccaagaaagctggcctcctcatggccctggccaggctctgcttcctcctggggcggctgtgcagcaggaggctcaagctgtcccaggcccgggtgtactttgaggaagcgctgggggccctggagggcagcttcggggacctgttcctagtggtggctgtgtacgccaacctggccagcatttaccggaagcagaagaaccgggagaagtgtgcacaggtggtgcccaaagccatggccctgctcctggggacgcctgaccacatctgcagcaccgaggcggagggggagctcctgcagctggcgctgcggcgggcggtgggtggccagagcctgcaggccgaggcccgggcctgcttcctgctggccaggcaccacgtgcacctcaagcagcccgaggaggccctgcccttcctagagcggctgctgcttttgcacagggactcgggagccccagaggccgcgtggctctcagactgctacctactcctggctgacatctacagccgcaagtgcctgccccacctggtgctgagctgtgtcaaggtggcctcattgcggacacggggctcgctggccggctcgctgaggagtgtgaacctggtgctccagaacgccccccagccccacagcctccctgcccaaacttcccactacctcaggcaagcgctggcctccctgaccccgggcacaggccaggcgctgcgcggccccctctacaccagcttggcccagctgtacagccaccatggctgccacggcccggccatcaccttcatgacgcaggcagtggaagccagtgctattgccggagtccgtgccatcgtggaccacctggtggccctggcctggctgcacgtgcttcatgggcagagcccggtggccctggacatcctgcagtctgtccgggatgcagtggtggccagcgaggaccaggagggcgtgattgccaacatggtggccgtggctctgaagaggacgggccggacgaggcaggcagctgagagctactaccgcgccctgcgggtggctcgggacctgggccagcaaaggaaccaggcagtggggctggccaacttcggggccctgtgcctgcatgcgggtgccagcaggctggcccagcactacctcctggaggccgtgcggctgttctcgaggctgccccttggggagtgtggccgggacttcacccacgtgctcctgcagctgggccatctctgcacccgccagggcccggcccagcagggcaagggctactacgagtgggcccttctggtcgccgtggagatgggccacgtggagagccagctgcgggccgtccagcggctgtgccacttctacagcgccgtcatgcccagcgaggcccagtgtgtcatctaccatgagctccagctctccctggcctgcaaggtggccgacaaggtgctggaggggcagctcctggagaccatcagccagctctacctgtccctgggcaccgagcggtcatctcaaccccagcagaagcagttacatgcattctgggctgttcttcctacctggtggcttttgtcatctgacctctgcctgccccgagtcttcactcctggccttcacctgtccccttaaatgtgaccacagcagccacctgtggcttctctcccacagaagacagagccagttgtgtcacctgcttccctggggcagggtttcaaggtctcacatcccacatgtggcccacttggctctcctggagcatcctgacctggtggggtaaccatggccctggccaccccacccacagggcccagtgacattgctgcactcacaccccttcgactcaccaagagagcagggaaggagccggattccacagggacccgggagatcggctccagccttggcctcaggttcacagcaggaaaatgggccagtgtgttagagccatgttctcaaagtgtggtccctggaccagcagagcagcatccatgtcacctaggagcttgtggcaagtgggagttctagggcccgccccaggcccgtggagccagaagctctgggggcaggccagcaagctatatggacaggcctctggatgactgtgatgcctgcgcaccttgagaaccatcggcctggatagcatctgaacactgatggctcctggtgcgtctagagaagacacaggccatgtctgggacgcgggggagatggactagcacgctcccccagccacagggcagcatgatgcccagttccctcagaaggatgtccttcgtcttttccttgccgtgtgtgttcaaccccaccctctcagcagcccgggaagggcaggacactgcacacacaagagggccgttcccagtcccattccagattcatctgtcaccagacccacgggaggaggcagactggttccaggaggatgacagcccttgttctgacacctgtgtctgataccagggcctacaaatccgcactggactacaccaaacgaagtctggggattttcattgacctccagaagaaagagaaggaggcgcatgcctggctgcaagcagggaagatctattacatcttgcggcagagcgagctggtggacctctacatccaggtggcacagaacgtggccctgtacacaggcgaccccaacctggggctggagctgtttgaggcggctggagacatcttcttcgacggggcctgggagcgggagaaagctgtgtccttctaccgggaccgggccctgcccctggcagtgactacgggcaaccgcaaggcggagctgcggctgtgcaacaagctggtggcactgctggccacgctggaggagccccaggagggcttggagtttgcccacatggccctagcactcagcatcaccctgggtaagccccctgagcccctgccctgccaggacccacactttgccagagctcagcctccaggtctgcagggcaggagccgaaacagctgccggattttcctggtctcctgtccaggcaggcacatctgcccagctggctcccccgtccggccgtggggcacagcccgaggtccttcactcagtgcagagctccctgcctggctgagctctgcttcctgtgcctcttccccctgctgaccacgagggctgcccagtgtgccctctgccttccagacatgccagacatctcgttggtccctgcatgtgccaggctgagtggcacattccctttctcttgtgcccttcccaccctcatcaaccacacggctctgtggctgatgaagtcccagttccccttccagcagcctgccccttaatgccgggcatcccccggtgctgtgccagggtcgtctgtcctctagagagagggagccccagacaggccacatgccccagcgccttgtggcccagggcctggtacacaggtgtgcagccgcgtgggaatgcattgaatgcaggctccacagcactcaccctgaaaaggggaggacaccggagacagcctgggtgggctcgcgcatctgtggggggacctggagctcaggcacgcagtgactccccaaggtaggggactctgatgatgacacacccaggaagagttggatgtcatgtctgtgggttgcctggagccctggtgcccaggagcgcgtgggctgcatgccttttgggctctcctggttaaaaacagtgagcaaaggcaggtggctatatgtaggcacagagctgggccatccaagtccgactttgccaaagcctcacggtagatgggggcaggccttattagttctgctttgtagatgggaaagtgagtctgggagctgggaagggactggccagaactgcccaggtgaccgcagtgcctggaggcgagccaggtgctgccggggtctgcatgcctgccccggggagccacgtcctcacacctgcccccttggcctgcaccccaggggaccggctgaacgagcgcgtggcctaccaccggctggccgccctgcaacaccgactgggccatggcgagctggcagagcacttctacctcaaggccctgtcgctctgcaactcgccgctggagtttgacgaggagaccctctactacgtgaaggtgtacctggtgctcggtgacatcatcttctacgacctgaaggacccgtttgatgcagccgggtactaccagctggcgctggcagccgccgtggacctgggcaacaagaaggcacagctgaagatctacacgcggctggccaccatctaccacaacttcctcctggaccgtgagaagtcgctcttcttctaccagaaggccaggaccttcgccacagagctcaacgtccgcagggtcaacctgcctcctctgccactctgcgggtgggccccctggttggcccccagccaccctcgctgaggacagcatccaagggagtgggttttgtgcaagggctgggggtctcctgcctctcctggtgtcgccggtggctcattttctggcaaatggaggcacgaacgcaggggccaaatagcaataaatgggttttgttttttttttgcaataa

SEQ ID NO: 10102 - protein, 791 aa, Homo sapiens
MGGPVMPGNPLMAVGLASALADFQGSGPEEMTFRGGDLIEILGAQVPSLPWCVGRHAASGRVGFVRSSLISMQGPVSELESAIFLNEEEKSFFSEGCFSEEDARQLLRRMSGTDVCSVYSLDSVEEAETEQPQEKEIPPPCLSLEPQETLQKVKNVLEQCKTCPGCPQEPASWGLCAASSDVSLQDPEEPSFCLEAEDDWEDPEALSSLLLFLNAPGYKASFRGLYDVALPWLSSVFRSFSDEEELTGRLAQARGAAKKAGLLMALARLCFLLGRLCSRRLKLSQARVYFEEALGALEGSFGDLFLVVAVYANLASIYRKQKNREKCAQVVPKAMALLLGTPDHICSTEAEGELLQLALRRAVGGQSLQAEARACFLLARHHVHLKQPEEALPFLERLLLLHRDSGAPEAAWLSDCYLLLADIYSRKCLPHLVLSCVKVASLRTRGSLAGSLRSVNLVLQNAPQPHSLPAQTSHYLRQALASLTPGTGQALRGPLYTSLAQLYSHHGCHGPAITFMTQAVEASAIAGVRAIVDHLVALAWLHVLHGQSPVALDILQSVRDAVVASEDQEGVIANMVAVALKRTGRTRQAAESYYRALRVARDLGQQRNQAVGLANFGALCLHAGASRLAQHYLLEAVRLFSRLPLGECGRDFTHVLLQLGHLCTRQGPAQQGKGYYEWALLVAVEMGHVESQLRAVQRLCHFYSAVMPSEAQCVIYHELQLSLACKVADKVLEGQLLETISQLYLSLGTERSSQPQQKQLHAFWAVLPTWWLLSSDLCLPRVFTPGLHLSP

SEQ ID NO: 10103 - DNA, 859 bp, Homo sapiens
aggagcggccacctggttcctgcgtgctacggccctgtgggcctgggagctgcctctgaggaacacgccgcagggccaggcatgtgaggtctctgcgggtcatggagaacctccctgccgtgaccactgaggagccgacccccatggggaggggtcctgtgggaccctcaggaggtggcagcacccgggaccaggtccggactgtggtcatgaggccctctgtgagctgggagaaagcggggcccgaggaggccaaggcgccagtgagaggcggagccactgtgcccgctgagtcacttgagaggccagggcccagctcgtgtttttccagggacgcgtcagtgataacaaaactggcaaagaacgaggcaggggcctttgaacccccatgttcagagaccgttccagaaacagtccgatgggtttggccttggaacccctgagagtcctcaggatgaggcatcctcgttctccaggaggcacccaaggtgcagagagggaagggccgggccaggccaccctgtggtcaggggccgggccaggacgtgtgcccagtttcctgaattcccgggagacctgaagagtgacctaggtgatctccaggatcccctcttacccccatcctgagaccctgaaggggacgaggggagaggcaggggagaccaaggcctgcacggcccctcccggcaggagacagctgcggttgtgacccgtccctgggcctcgtcctcccagtgtccagcctcagcccagtctcctcttagctgcctatgtccctgtcttgggactccagggcttggcacatggtaggtgcttcgtcactgttcaagggattgatgaatgaaggatgtgtttggac

SEQ ID NO: 10104 - protein, 113 aa, Homo sapiens
MENLPAVTTEEPTPMGRGPVGPSGGGSTRDQVRTVVMRPSVSWEKAGPEEAKAPVRGGATVPAESLERPGPSSCFSRDASVITKLAKNEAGAFEPPCSETVPETVRWVWPWNP

SEQ ID NO: 10105 - DNA, 4260 bp, Homo sapiens
aggagcggccacctggttcctgcgtgctacggccctgtgggcctgggagctgcctctgaggaacacgccgcagggccaggcatgtgaggtctctgcgggtcatggagaacctccctgccgtgaccactgaggagccgacccccatggggaggggtcctgtgggaccctcaggaggtggcagcacccgggaccaggtccggactgtggtcatgaggccctctgtgagctgggagaaagcggggcccgaggaggccaaggcgccagtgagaggcgacgaggctcctcctgcccgcgtggctgggcctgctgctgggacccctccctgccagatgggggtttatcccacagacctgaccctgcagctgctggctgtgcggaggaagagcagactgcgggaccccggcctacagcagaccctccggggccagctccgcctgctggagaatgatagccgggagatggcccgcgtgcttggggaattatcagccaggctgctgtccatccacagtgaccaggaccggatcgtggtgacgtttaagacttttgaagaaatctggaagttttccacctaccatgctctcggcttcactcatcactgcctggcaaacctgctcatggaccaggccttctggctgctcttgcccagtgaggaggaggagacggccatccaagtccatgtggatgagaacgccttaaggctgacccacgagagcctcctcatccaagaagggcccttctttgtcctgtgtcctgaccaccatgtgagagtgatgacgggtccccgggatgcaggaaatggcccccaggccctcaggcaggcttcgggggcaccccagggagaggcggccccggaaacagactcttcaccgccgagccccagcgtgtcctccgaggaggtggcagtggcggccgccccggagcctttgattccatttcatcagtgggctcttaggatcccccaggaccccatcgacgatgccatgggtggccctgtgatgcccggcaacccgctgatggctgtgggcctggcctcggcattggcagacttccagggctcggggcccgaagagatgaccttccgaggtggcgacctcatcgagatccttggggcgcaggtgcccagcctgccctggtgcgtgggccgacacgcagcctcgggccgggtggggtttgtgcggagcagcctcatcagcatgcagggccccgtgtccgagttggaaagtgcgatttttctcaatgaggaagaaaagtcattcttcagcgagggctgcttttctgaggaggatgccaggcagttgctgaggcggatgtcgggcaccgatgtctgcagcgtgtacagcctggactcagtagaggaagctgagaccgagcagccgcaggaaaaagaaatacctccaccttgcctgagcctggagccacaggagaccttgcagaaggtgaagaatgttctggaacaatgcaagacctgcccaggctgcccccaggagccagcgtcctggggtctctgtgcggcatccagcgacgtgagcttgcaggaccccgaggagccctccttctgcttggaagccgaggatgactgggaggacccagaggccctgagctcactgctgctgttcctgaacgcccctgggtacaaggccagcttccgtggcctgtacgatgtggcgctgccgtggctgagcagcgtgttccgcagcttcagcgacgaggaggagctgactgggcgcctggcacaggcccggggggcggccaagaaagctggcctcctcatggccctggccaggctctgcttcctcctggggcggctgtgcagcaggaggctcaagctgtcccaggcccgggtgtactttgaggaagcgctgggggccctggagggcagcttcggggacctgttcctagtggtggctgtgtacgccaacctggccagcatttaccggaagcagaagaaccgggagaagtgtgcacaggtggtgcccaaagccatggccctgctcctggggacgcctgaccacatctgcagcaccgaggcggagggggagctcctgcagctggcgctgcggcgggcggtgggtggccagagcctgcaggccgaggcccgggcctgcttcctgctggccaggcaccacgtgcacctcaagcagcccgaggaggccctgcccttcctagagcggctgctgcttttgcacagggactcgggagccccagaggccgcgtggctctcagactgctacctactcctggctgacatctacagccgcaagtgcctgccccacctggtgctgagctgtgtcaaggtggcctcattgcggacacggggctcgctggccggctcgctgaggagtgtgaacctggtgctccagaacgccccccagccccacagcctccctgcccaaacttcccactacctcaggcaagcgctggcctccctgaccccgggcacaggccaggcgctgcgcggccccctctacaccagcttggcccagctgtacagccaccatggctgccacggcccggccatcaccttcatgacgcaggcagtggaagccagtgctattgccggagtccgtgccatcgtggaccacctggtggccctggcctggctgcacgtgcttcatgggcagagcccggtggccctggacatcctgcagtctgtccgggatgcagtggtggccagcgaggaccaggagggcgtgattgccaacatggtggccgtggctctgaagaggacgggccggacgaggcaggcagctgagagctactaccgcgccctgcgggtggctcgggacctgggccagcaaaggaaccaggcagtggggctggccaacttcggggccctgtgcctgcatgcgggtgccagcaggctggcccagcactacctcctggaggccgtgcggctgttctcgaggctgccccttggggagtgtggccgggacttcacccacgtgctcctgcagctgggccatctctgcacccgccagggcccggcccagcagggcaagggctactacgagtgggcccttctggtcgccgtggagatgggccacgtggagagccagctgcgggccgtccagcggctgtgccacttctacagcgccgtcatgcccagcgaggcccagtgtgtcatctaccatgagctccagctctccctggcctgcaaggtggccgacaaggtgctggaggggcagctcctggagaccatcagccagctctacctgtccctgggcaccgagcgggcctacaaatccgcactggactacaccaaacgaagtctggggattttcattgacctccagaagaaagagaaggaggcgcatgcctggctgcaagcagggaagatctattacatcttgcggcagagcgagctggtggacctctacatccaggtggcacagaacgtggccctgtacacaggcgaccccaacctggggctggagctgtttgaggcggctggagacatcttcttcgacggggcctgggagcgggagaaagctgtgtccttctaccgggaccgggccctgcccctggcagtgactacgggcaaccgcaaggcggagctgcggctgtgcaacaagctggtggcactgctggccacgctggaggagccccaggagggcttggagtttgcccacatggccctagcactcagcatcaccctgggggaccggctgaacgagcgcgtggcctaccaccggctggccgccctgcaacaccgactgggccatggcgagctggcagagcacttctacctcaaggccctgtcgctctgcaactcgccgctggagtttgacgaggagaccctctactacgtgaaggtgtacctggtgctcggtgacatcatcttctacgacctgaaggacccgtttgatgcagccgggtactaccagctggcgctggcagccgccgtggacctgggcaacaagaaggcacagctgaagatctacacgcggctggccaccatctaccacaacttcctcctggaccgtgagaagtcgctcttcttctaccagaaggccaggaccttcgccacagagctcaacgtccgcagggtcaacctgcctcctctgccactctgcgggtgggccccctggttggcccccagccaccctcgctgaggacagcatccaagggagtgggttttgtgcaagggctgggggtctcctgcctctcctggtgtcgccggtggctcattttctggcaaatggaggcacgaacgcaggggccaaatagcaataaatgggttttgttttttttttgcaataa

SEQ ID NO: 10106 - protein, 1336 aa, Homo sapiens
MENLPAVTTEEPTPMGRGPVGPSGGGSTRDQVRTVVMRPSVSWEKAGPEEAKAPVRGDEAPPARVAGPAAGTPPCQMGVYPTDLTLQLLAVRRKSRLRDPGLQQTLRGQLRLLENDSREMARVLGELSARLLSIHSDQDRIVVTFKTFEEIWKFSTYHALGFTHHCLANLLMDQAFWLLLPSEEEETAIQVHVDENALRLTHESLLIQEGPFFVLCPDHHVRVMTGPRDAGNGPQALRQASGAPQGEAAPETDSSPPSPSVSSEEVAVAAAPEPLIPFHQWALRIPQDPIDDAMGGPVMPGNPLMAVGLASALADFQGSGPEEMTFRGGDLIEILGAQVPSLPWCVGRHAASGRVGFVRSSLISMQGPVSELESAIFLNEEEKSFFSEGCFSEEDARQLLRRMSGTDVCSVYSLDSVEEAETEQPQEKEIPPPCLSLEPQETLQKVKNVLEQCKTCPGCPQEPASWGLCAASSDVSLQDPEEPSFCLEAEDDWEDPEALSSLLLFLNAPGYKASFRGLYDVALPWLSSVFRSFSDEEELTGRLAQARGAAKKAGLLMALARLCFLLGRLCSRRLKLSQARVYFEEALGALEGSFGDLFLVVAVYANLASIYRKQKNREKCAQVVPKAMALLLGTPDHICSTEAEGELLQLALRRAVGGQSLQAEARACFLLARHHVHLKQPEEALPFLERLLLLHRDSGAPEAAWLSDCYLLLADIYSRKCLPHLVLSCVKVASLRTRGSLAGSLRSVNLVLQNAPQPHSLPAQTSHYLRQALASLTPGTGQALRGPLYTSLAQLYSHHGCHGPAITFMTQAVEASAIAGVRAIVDHLVALAWLHVLHGQSPVALDILQSVRDAVVASEDQEGVIANMVAVALKRTGRTRQAAESYYRALRVARDLGQQRNQAVGLANFGALCLHAGASRLAQHYLLEAVRLFSRLPLGECGRDFTHVLLQLGHLCTRQGPAQQGKGYYEWALLVAVEMGHVESQLRAVQRLCHFYSAVMPSEAQCVIYHELQLSLACKVADKVLEGQLLETISQLYLSLGTERAYKSALDYTKRSLGIFIDLQKKEKEAHAWLQAGKIYYILRQSELVDLYIQVAQNVALYTGDPNLGLELFEAAGDIFFDGAWEREKAVSFYRDRALPLAVTTGNRKAELRLCNKLVALLATLEEPQEGLEFAHMALALSITLGDRLNERVAYHRLAALQHRLGHGELAEHFYLKALSLCNSPLEFDEETLYYVKVYLVLGDIIFYDLKDPFDAAGYYQLALAAAVDLGNKKAQLKIYTRLATIYHNFLLDREKSLFFYQKARTFATELNVRRVNLPPLPLCGWAPWLAPSHPR

SEQ ID NO: 10107 - DNA, 4343 bp, Homo sapiens
aggagcggccacctggttcctgcgtgctacggccctgtgggcctgggagctgcctctgaggaacacgccgcagggccaggcatgtgaggtctctgcgggtcatggagaacctccctgccgtgaccactgaggagccgacccccatggggaggggtcctgtgggaccctcaggaggtggcagcacccgggaccaggtccggactgtggtcatgaggccctctgtgagctgggagaaagcggggcccgaggaggccaaggcgccagtgagaggcgagagacctggagcgtttggcgccttcagaggagccaggcctttgcttggtctcccctaatcctgggaacctgctgtgttgcagacgaggctcctcctgcccgcgtggctgggcctgctgctgggacccctccctgccagatgggggtttatcccacagacctgaccctgcagctgctggctgtgcggaggaagagcagactgcgggaccccggcctacagcagaccctccggggccagctccgcctgctggagaatgatagccgggagatggcccgcgtgcttggggaattatcagccaggctgctgtccatccacagtgaccaggaccggatcgtggtgacgtttaagacttttgaagaaatctggaagttttccacctaccatgctctcggcttcactcatcactgcctggcaaacctgctcatggaccaggccttctggctgctcttgcccagtgaggaggaggagacggccatccaagtccatgtggatgagaacgccttaaggctgacccacgagagcctcctcatccaagaagggcccttctttgtcctgtgtcctgaccaccatgtgagagtgatgacgggtccccgggatgcaggaaatggcccccaggccctcaggcaggcttcgggggcaccccagggagaggcggccccggaaacagactcttcaccgccgagccccagcgtgtcctccgaggaggtggcagtggcggccgccccggagcctttgattccatttcatcagtgggctcttaggatcccccaggaccccatcgacgatgccatgggtggccctgtgatgcccggcaacccgctgatggctgtgggcctggcctcggcattggcagacttccagggctcggggcccgaagagatgaccttccgaggtggcgacctcatcgagatccttggggcgcaggtgcccagcctgccctggtgcgtgggccgacacgcagcctcgggccgggtggggtttgtgcggagcagcctcatcagcatgcagggccccgtgtccgagttggaaagtgcgatttttctcaatgaggaagaaaagtcattcttcagcgagggctgcttttctgaggaggatgccaggcagttgctgaggcggatgtcgggcaccgatgtctgcagcgtgtacagcctggactcagtagaggaagctgagaccgagcagccgcaggaaaaagaaatacctccaccttgcctgagcctggagccacaggagaccttgcagaaggtgaagaatgttctggaacaatgcaagacctgcccaggctgcccccaggagccagcgtcctggggtctctgtgcggcatccagcgacgtgagcttgcaggaccccgaggagccctccttctgcttggaagccgaggatgactgggaggacccagaggccctgagctcactgctgctgttcctgaacgcccctgggtacaaggccagcttccgtggcctgtacgatgtggcgctgccgtggctgagcagcgtgttccgcagcttcagcgacgaggaggagctgactgggcgcctggcacaggcccggggggcggccaagaaagctggcctcctcatggccctggccaggctctgcttcctcctggggcggctgtgcagcaggaggctcaagctgtcccaggcccgggtgtactttgaggaagcgctgggggccctggagggcagcttcggggacctgttcctagtggtggctgtgtacgccaacctggccagcatttaccggaagcagaagaaccgggagaagtgtgcacaggtggtgcccaaagccatggccctgctcctggggacgcctgaccacatctgcagcaccgaggcggagggggagctcctgcagctggcgctgcggcgggcggtgggtggccagagcctgcaggccgaggcccgggcctgcttcctgctggccaggcaccacgtgcacctcaagcagcccgaggaggccctgcccttcctagagcggctgctgcttttgcacagggactcgggagccccagaggccgcgtggctctcagactgctacctactcctggctgacatctacagccgcaagtgcctgccccacctggtgctgagctgtgtcaaggtggcctcattgcggacacggggctcgctggccggctcgctgaggagtgtgaacctggtgctccagaacgccccccagccccacagcctccctgcccaaacttcccactacctcaggcaagcgctggcctccctgaccccgggcacaggccaggcgctgcgcggccccctctacaccagcttggcccagctgtacagccaccatggctgccacggcccggccatcaccttcatgacgcaggcagtggaagccagtgctattgccggagtccgtgccatcgtggaccacctggtggccctggcctggctgcacgtgcttcatgggcagagcccggtggccctggacatcctgcagtctgtccgggatgcagtggtggccagcgaggaccaggagggcgtgattgccaacatggtggccgtggctctgaagaggacgggccggacgaggcaggcagctgagagctactaccgcgccctgcgggtggctcgggacctgggccagcaaaggaaccaggcagtggggctggccaacttcggggccctgtgcctgcatgcgggtgccagcaggctggcccagcactacctcctggaggccgtgcggctgttctcgaggctgccccttggggagtgtggccgggacttcacccacgtgctcctgcagctgggccatctctgcacccgccagggcccggcccagcagggcaagggctactacgagtgggcccttctggtcgccgtggagatgggccacgtggagagccagctgcgggccgtccagcggctgtgccacttctacagcgccgtcatgcccagcgaggcccagtgtgtcatctaccatgagctccagctctccctggcctgcaaggtggccgacaaggtgctggaggggcagctcctggagaccatcagccagctctacctgtccctgggcaccgagcgggcctacaaatccgcactggactacaccaaacgaagtctggggattttcattgacctccagaagaaagagaaggaggcgcatgcctggctgcaagcagggaagatctattacatcttgcggcagagcgagctggtggacctctacatccaggtggcacagaacgtggccctgtacacaggcgaccccaacctggggctggagctgtttgaggcggctggagacatcttcttcgacggggcctgggagcgggagaaagctgtgtccttctaccgggaccgggccctgcccctggcagtgactacgggcaaccgcaaggcggagctgcggctgtgcaacaagctggtggcactgctggccacgctggaggagccccaggagggcttggagtttgcccacatggccctagcactcagcatcaccctgggggaccggctgaacgagcgcgtggcctaccaccggctggccgccctgcaacaccgactgggccatggcgagctggcagagcacttctacctcaaggccctgtcgctctgcaactcgccgctggagtttgacgaggagaccctctactacgtgaaggtgtacctggtgctcggtgacatcatcttctacgacctgaaggacccgtttgatgcagccgggtactaccagctggcgctggcagccgccgtggacctgggcaacaagaaggcacagctgaagatctacacgcggctggccaccatctaccacaacttcctcctggaccgtgagaagtcgctcttcttctaccagaaggccaggaccttcgccacagagctcaacgtccgcagggtcaacctgcctcctctgccactctgcgggtgggccccctggttggcccccagccaccctcgctgaggacagcatccaagggagtgggttttgtgcaagggctgggggtctcctgcctctcctggtgtcgccggtggctcattttctggcaaatggaggcacgaacgcaggggccaaatagcaataaatgggttttgttttttttttgcaataa

SEQ ID NO: 10108 - protein, 1260 aa, Homo sapiens
MGVYPTDLTLQLLAVRRKSRLRDPGLQQTLRGQLRLLENDSREMARVLGELSARLLSIHSDQDRIVVTFKTFEEIWKFSTYHALGFTHHCLANLLMDQAFWLLLPSEEEETAIQVHVDENALRLTHESLLIQEGPFFVLCPDHHVRVMTGPRDAGNGPQALRQASGAPQGEAAPETDSSPPSPSVSSEEVAVAAAPEPLIPFHQWALRIPQDPIDDAMGGPVMPGNPLMAVGLASALADFQGSGPEEMTFRGGDLIEILGAQVPSLPWCVGRHAASGRVGFVRSSLISMQGPVSELESAIFLNEEEKSFFSEGCFSEEDARQLLRRMSGTDVCSVYSLDSVEEAETEQPQEKEIPPPCLSLEPQETLQKVKNVLEQCKTCPGCPQEPASWGLCAASSDVSLQDPEEPSFCLEAEDDWEDPEALSSLLLFLNAPGYKASFRGLYDVALPWLSSVFRSFSDEEELTGRLAQARGAAKKAGLLMALARLCFLLGRLCSRRLKLSQARVYFEEALGALEGSFGDLFLVVAVYANLASIYRKQKNREKCAQVVPKAMALLLGTPDHICSTEAEGELLQLALRRAVGGQSLQAEARACFLLARHHVHLKQPEEALPFLERLLLLHRDSGAPEAAWLSDCYLLLADIYSRKCLPHLVLSCVKVASLRTRGSLAGSLRSVNLVLQNAPQPHSLPAQTSHYLRQALASLTPGTGQALRGPLYTSLAQLYSHHGCHGPAITFMTQAVEASAIAGVRAIVDHLVALAWLHVLHGQSPVALDILQSVRDAVVASEDQEGVIANMVAVALKRTGRTRQAAESYYRALRVARDLGQQRNQAVGLANFGALCLHAGASRLAQHYLLEAVRLFSRLPLGECGRDFTHVLLQLGHLCTRQGPAQQGKGYYEWALLVAVEMGHVESQLRAVQRLCHFYSAVMPSEAQCVIYHELQLSLACKVADKVLEGQLLETISQLYLSLGTERAYKSALDYTKRSLGIFIDLQKKEKEAHAWLQAGKIYYILRQSELVDLYIQVAQNVALYTGDPNLGLELFEAAGDIFFDGAWEREKAVSFYRDRALPLAVTTGNRKAELRLCNKLVALLATLEEPQEGLEFAHMALALSITLGDRLNERVAYHRLAALQHRLGHGELAEHFYLKALSLCNSPLEFDEETLYYVKVYLVLGDIIFYDLKDPFDAAGYYQLALAAAVDLGNKKAQLKIYTRLATIYHNFLLDREKSLFFYQKARTFATELNVRRVNLPPLPLCGWAPWLAPSHPR

SEQ ID NO: 10109 - DNA, 1867 bp, Homo sapiens
gaagcagaagaaccgggagaagtgtgcacaggtggtgcccaaagccatggccctgctcctggggacgcctgaccacatctgcagcaccgaggcggagggggagctcctgcagctggcgctgcggcgggcggtgggtggccagagcctgcaggccgaggcccgggcctgcttcctgctggccaggcaccacgtgcacctcaagcagcccgaggaggccctgcccttcctagagcggctgctgcttttgcacagggactcgggagccccagaggccgcgtggctctcagactgctacctactcctggctgacatctacagccgcaagtgcctgccccacctggtgctgagctgtgtcaaggtggcctcattgcggacacggggctcgctggccggctcgctgaggagtgtgaacctggtgctccagaacgccccccagccccacagcctccctgcccaaacttcccactacctcaggcaagcgctggcctccctgaccccgggcacaggccaggcgctgcgcggccccctctacaccagcttggcccagctgtacagccaccatggctgccacggcccggccatcaccttcatgacgcaggcagtggaagccagtgctattgccggagtccgtgccatcgtggaccacctggtggccctggcctggctgcacgtgcttcatgggcagagcccggtggccctggacatcctgcagtctgtccgggatgcagtggtggccagcgaggaccaggagggcgtgattgccaacatggtggccgtggctctgaagaggacgggccggacgaggcaggcagctgagagctactaccgcgccctgcgggtggctcgggacctgggccagcaaaggaaccaggcagtggggctggccaacttcggggccctgtgcctgcatgcgggtgccagcaggctggcccagcactacctcctggaggccgtgcggctgttctcgaggctgccccttggggagtgtggccgggacttcacccacgtgctcctgcagctgggccatctctgcacccgccagggcccggcccagcagggcaagggctactacgagtgggcccttctggtcgccgtggagatgggccacgtggagagccagctgcgggccgtccagcggctgtgccacttctacagcgccgtcatgcccagcgaggcccagtgtgtcatctaccatgagctccagctctccctggcctgcaaggtggccgacaaggtgctggaggggcagctcctggagaccatcagccagctctacctgtccctgggcaccgagcgggcctacaaatccgcactggactacaccaaacgaagtctggggattttcattgacctccagaagaaagagaaggaggcgcatgcctggctgcaagcagggaagatctattacatcttgcggcagagcgagctggtggacctctacatccaggtggcacagaacgtggccctgtacacaggcgaccccaacctggggctggagctgtttgaggcggctggagacatcttcttcgacggggcctgggagcgggagaaagctgtgtccttctaccgggaccgggccctgcccctggcagtgactacgggcaaccgcaaggcggagctgcggctgtgcaacaagctggtggcactgctggccacgctggaggagccccaggagggcttggagtttgcccacatggccctagcactcagcatcaccctgggtaagccccctgagcccctgccctgccaggacccacactttgccagagctcagcctccaggtctgcagggcaggagccgaaacagctgccggattttcctggtctcctgtccaggcaggcacatctgcccagctggctcccccgtc

SEQ ID NO: 10110 - protein, 606 aa, Homo sapiens
MALLLGTPDHICSTEAEGELLQLALRRAVGGQSLQAEARACFLLARHHVHLKQPEEALPFLERLLLLHRDSGAPEAAWLSDCYLLLADIYSRKCLPHLVLSCVKVASLRTRGSLAGSLRSVNLVLQNAPQPHSLPAQTSHYLRQALASLTPGTGQALRGPLYTSLAQLYSHHGCHGPAITFMTQAVEASAIAGVRAIVDHLVALAWLHVLHGQSPVALDILQSVRDAVVASEDQEGVIANMVAVALKRTGRTRQAAESYYRALRVARDLGQQRNQAVGLANFGALCLHAGASRLAQHYLLEAVRLFSRLPLGECGRDFTHVLLQLGHLCTRQGPAQQGKGYYEWALLVAVEMGHVESQLRAVQRLCHFYSAVMPSEAQCVIYHELQLSLACKVADKVLEGQLLETISQLYLSLGTERAYKSALDYTKRSLGIFIDLQKKEKEAHAWLQAGKIYYILRQSELVDLYIQVAQNVALYTGDPNLGLELFEAAGDIFFDGAWEREKAVSFYRDRALPLAVTTGNRKAELRLCNKLVALLATLEEPQEGLEFAHMALALSITLGKPPEPLPCQDPHFARAQPPGLQGRSRNSCRIFLVSCPGRHICPAGSP

SEQ ID NO: 10111 - DNA, 554 bp, Homo sapiens
cacatctgcagcaccgaggcggagggggagctcagcctccctgcccaaacttcccactacctcaggcaagcgctggcctccctgaccccgggcacaggccaggcgctgcgcggccccctctacaccagcttggcccagctgtacagccaccatggctgccacggcccggccatcaccttcatgacgcaggcagtggaagccagtgctattgccggagtccgtgccatcgtggaccacctggtggccctggcctggctgcacgtgcttcatgggcagagcccggtggccctggacatcctgcagtctgtccgggatgcagtggtggccagcgaggaccaggagggcgtgattgccaacatggtggccgtggctctgaagaggacgggccggacgaggcaggcagctgagagctactaccgcgccctgcgggtggctcgggacctgggccagcaaaggaaccaggcagtggggctggccaacttcggggccctgtgcctgcatgcgggtgccagcaggctggcccagcactacctcctggaggccgtgcggctgtt

SEQ ID NO: 10112 - protein, 123 aa, Homo sapiens
MTQAVEASAIAGVRAIVDHLVALAWLHVLHGQSPVALDILQSVRDAVVASEDQEGVIANMVAVALKRTGRTRQAAESYYRALRVARDLGQQRNQAVGLANFGALCLHAGASRLAQHYLLEAVR

SEQ ID NO: 10113 - DNA, 2270 bp, Homo sapiens
gtgcagagtgtgccacgtcccacccacaaatggggcttgtggggtccttgggtggcaggggctgagcatgggaaagtgagcttcaggccagagaagccacaaaagggccagctgcgggccgtccagcggctgtgccacttctacagcgccgtcatgcccagcgaggcccagtgtgtcatctaccatgagctccagctctccctggcctgcaaggtggccgacaaggtgctggaggggcagctcctggagaccatcagccagctctacctgtccctgggcaccgagcggtcatctcaaccccagcagaagcagttacatgcattctgggctgttcttcctacctggtggcttttgtcatctgacctctgcctgccccgagtcttcactcctggccttcacctgtccccttaaatgtgaccacagcagccacctgtggcttctctcccacagaagacagagccagttgtgtcacctgcttccctggggcagggtttcaaggtctcacatcccacatgtggcccacttggctctcctggagcatcctgacctggtggggtaaccatggccctggccaccccacccacagggcccagtgacattgctgcactcacaccccttcgactcaccaagagagcagggaaggagccggattccacagggacccgggagatcggctccagccttggcctcaggttcacagcaggaaaatgggccagtgtgttagagccatgttctcaaagtgtggtccctggaccagcagagcagcatccatgtcacctaggagcttgtggcaagtgggagttctagggcccgccccaggcccgtggagccagaagctctgggggcaggccagcaagctatatggacaggcctctggatgactgtgatgcctgcgcaccttgagaaccatcggcctggatagcatctgaacactgatggctcctggtgcgtctagagaagacacaggccatgtctgggacgcgggggagatggactagcacgctcccccagccacagggcagcatgatgcccagttccctcagaaggatgtccttcgtcttttccttgccgtgtgtgttcaaccccaccctctcagcagcccgggaagggcaggacactgcacacacaagagggccgttcccagtcccattccagattcatctgtcaccagacccacgggaggaggcagactggttccaggaggatgacagcccttgttctgacacctgtgtctgataccagggcctacaaatccgcactggactacaccaaacgaagtctggggattttcattgacctccagaagaaagagaaggaggcgcatgcctggctgcaagcagggaagatctattacatcttgcggcagagcgagctggtggacctctacatccaggtggcacagaacgtggccctgtacacaggcgaccccaacctggggctggagctgtttgaggcggctggagacatcttcttcgacggggcctgggagcgggagaaagctgtgtccttctaccgggaccgggccctgcccctggcagtgactacgggcaaccgcaaggcggagctgcggctgtgcaacaagctggtggcactgctggccacgctggaggagccccaggagggcttggagtttgcccacatggccctagcactcagcatcaccctgggggaccggctgaacgagcgcgtggcctaccaccggctggccgccctgcaacaccgactgggccatggcgagctggcagagcacttctacctcaaggccctgtcgctctgcaactcgccgctggagtttgacgaggagaccctctactacgtgaaggtgtacctggtgctcggtgacatcatcttctacgacctgaaggacccgtttgatgcagccgggtactaccagctggcgctggcagccgccgtggacctgggcaacaagaaggcacagctgaagatctacacgcggctggccaccatctaccacaacttcctcctggaccgtgagaagtcgctcttcttctaccagaaggccaggaccttcgccacagagctcaacgtccgcagggtcaacctgcctcctctgccactctgcgggtgggccccctggttggcccccagccaccctcgctgaggacagcatccaagggagtgggttttgtgcaagggctgggggtctcctgcctctcctggtgtcgccggtggctcattttctggcaaatggaggcacgaacgcaggggccaaatagcaataaatgggttttgttttttttttgcaataa

SEQ ID NO: 10114 - protein, 305 aa, Homo sapiens
MTALVLTPVSDTRAYKSALDYTKRSLGIFIDLQKKEKEAHAWLQAGKIYYILRQSELVDLYIQVAQNVALYTGDPNLGLELFEAAGDIFFDGAWEREKAVSFYRDRALPLAVTTGNRKAELRLCNKLVALLATLEEPQEGLEFAHMALALSITLGDRLNERVAYHRLAALQHRLGHGELAEHFYLKALSLCNSPLEFDEETLYYVKVYLVLGDIIFYDLKDPFDAAGYYQLALAAAVDLGNKKAQLKIYTRLATIYHNFLLDREKSLFFYQKARTFATELNVRRVNLPPLPLCGWAPWLAPSHPR

SEQ ID NO: 10115 - DNA, 3912 bp, Homo sapiens
ccgcagtgctgggatgacaggcatgagccattgctctggcccgtgctgtgcgtttgttttcattcttctcaaattagttttcagtttccctgatggtctcttctttcactcactggttgtttaggagtgtgtcatttccacatatttttgactttcccaaatttccttcactgttgatgtccagtttcacgccagtacaactgaagaacactcctgctttggtctcagtccttttccattcactgaggctcattgtggggcctggcacgtggcctgtcttggggaatgtcccatgggcgcttgagaggactgtgtattctgccgttgttgggtggcgtgtgtgatagatgtccactcggcgtacctggtttctggtgttcatctccggaatgttgctgacactagaaaatcagcagctttccaccgttcccagcgccttggctttgggagaggcccgtgagcctgtgggtttggagcctggctgcacgggaggagcacgtgtgggaatgccaggggccggctttgagccccattcccccaacatgatgccgtgtgtggcagacgtgacatttggttttgctcccccagggttccatctgcgacaggggctacttgtgtccctggcctcgtcagctcgggctgaaggcggccctggtcctggccagaggggctttgtgaagcagaaatagatggcctggtgcaggggccaagctcggctagggcctcagccctgggagttgtaaagaaggccggcctctaccatgggcatctgcaccaagctgtgcccatgtcacggtgtgctcagcggttccccgcctgtggggcccaggctcacagaggtgtgaaagaggcaagcacaccgcaggggcctctgagcccagccagcctcgcttcaatgctgggaggctgacgtcttcctttttgtcttctgcccaggccagctgcgggccgtccagcggctgtgccacttctacagcgccgtcatgcccagcgaggcccagtgtgtcatctaccatgagctccagctctccctggcctgcaaggtggccgacaaggtgctggaggggcagctcctggagaccatcagccagctctacctgtccctgggcaccgagcgggcctacaaatccgcactggactacaccaaacgaagtctggggattttcattgacctccagaagaaagagaaggaggcgcatgcctggctgcaagcagggaagatctattacatcttgcggcagagcgagctggtggacctctacatccaggtggcacagaacgtggccctgtacacaggcgaccccaacctggggctggagctgtttgaggcggctggagacatcttcttcgacggggcctgggagcgggagaaagctgtgtccttctaccgggtgagctggcctgtgggctgatgtgggtgggccccagggggggcaccttgagggctgaggcacaggtgtggcagggcagagccctcgcacctggaggcagggccgcccatgcacatgcttagtttcctagtggtttcaccgggaatgatattgactgtgccccccgcccgggacaaacacttggggcctggacacagcaatggccttacccttgcacccgatgatctcaagcaaccttgagtgggaagtcctgtccccatcttacagatgaggaaactgaggctcagagaggcacagggacacgtcaaaggacacacggcatgccagtgggaggcccagggccagggcccaggtctgcatgcaccccgaagcggggacggcttcccccttcctctgagctcatggtgtggctcagccctgggcacagataaatgtcgtgtttttagagcagagaggagtgcaggctccccccagtcagacccctggtgcccaggcgggaggggctggtttgaggctgccgggtgtagctggatgggcctcaggtgactcttcagcccctagcttgggtgtctgaaccgccctttatctcagagcacacagctgtgtcgaggcccaggggtagctggggcgtgggaagctccgagcacatgtttgagctctgaggagggcgctgggcaaggtgggtgctgcgggaagcctgaccccacctgcctgtgtggcaggaccgggccctgcccctggcagtgactacgggcaaccgcaaggcggagctgcggctgtgcaacaagctggtggcactgctggccacgctggaggagccccaggagggcttggagtttgcccacatggccctagcactcagcatcaccctgggtaagccccctgagcccctgccctgccaggacccacactttgccagagctcagcctccaggtctgcagggcaggagccgaaacagctgccggattttcctggtctcctgtccaggcaggcacatctgcccagctggctcccccgtccggccgtggggcacagcccgaggtccttcactcagtgcagagctccctgcctggctgagctctgcttcctgtgcctcttccccctgctgaccacgagggctgcccagtgtgccctctgccttccagacatgccagacatctcgttggtccctgcatgtgccaggctgagtggcacattccctttctcttgtgcccttcccaccctcatcaaccacacggctctgtggctgatgaagtcccagttccccttccagcagcctgccccttaatgccgggcatcccccggtgctgtgccagggtcgtctgtcctctagagagagggagccccagacaggccacatgccccagcgccttgtggcccagggcctggtacacaggtgtgcagccgcgtgggaatgcattgaatgcaggctccacagcactcaccctgaaaaggggaggacaccggagacagcctgggtgggctcgcgcatctgtggggggacctggagctcaggcacgcagtgactccccaaggtaggggactctgatgatgacacacccaggaagagttggatgtcatgtctgtgggttgcctggagccctggtgcccaggagcgcgtgggctgcatgccttttgggctctcctggttaaaaacagtgagcaaaggcaggtggctatatgtaggcacagagctgggccatccaagtccgactttgccaaagcctcacggtagatgggggcaggccttattagttctgctttgtagatgggaaagtgagtctgggagctgggaagggactggccagaactgcccaggtgaccgcagtgcctggaggcgagccaggtgctgccggggtctgcatgcctgccccggggagccacgtcctcacacctgcccccttggcctgcaccccaggggaccggctgaacgagcgcgtggcctaccaccggctggccgccctgcaacaccgactgggccatggcgagctggcagagcacttctacctcaaggccctgtcgctctgcaactcgccgctggagtttgacgaggagaccctctactacgtgaaggtgtacctggtgctcggtgacatcatcttctacgacctgaaggacccgtttgatgcagccgggtactaccagctggcgctggcagccgccgtggacctgggcaacaagaaggcacagctgaagatctacacgcggctggccaccatctaccacaacttcctcctggaccgtgagaagtcgctcttcttctaccagaaggccaggaccttcgccacagagctcaacgtccgcagggtcaacctgcctcctctgccactctgcgggtgggccccctggttggcccccagccaccctcgctgaggacagcatccaagggagtgggttttgtgcaagggctgggggtctcctgcctctcctggtgtcgccggtggctcattttctggcaaatggaggcacgaacgcaggggccaaatagcaataaatgggttttgttttttttttgcaataa

SEQ ID NO: 10116 - protein, 169 aa, Homo sapiens [sequence omitted]

SEQ ID NO: 10117 - DNA, 820 bp, Homo sapiens
ctcaaagtgtggtccctggaccagcagagcagcatccatgtcacctaggagcttgtggcaagtgggagttctagggcccgccccaggcccgtggagccagaagctctgggggcaggccagcaagctatatggacaggcctctggatgactgtgatgcctgcgcaccttgagaaccatcggcctggatagcatctgaacactgatggctcctggtgcgtctagagaagacacaggccatgtctgggacgcgggggagatggactagcacgctcccccagccacagggcagcatgatgcccagttccctcagaaggatgtccttcgtcttttccttgccgtgtgtgttcaaccccaccctctcagcagcccgggaagggcaggacactgcacacacaagagggccgttcccagtcccattccagattcatctgtcaccagacccacgggaggaggcagactggttccaggaggatgacagcccttgttctgacacctgtgtctgataccagggcctacaaatccgcactggactacaccaaacgaagtctggggattttcattgacctccagaagaaagagaaggaggcgcatgcctggctgcaagcagggaagatctattacatcttgcggcagagcgagctggtggacctctacatccaggtggcacagaacgtggccctgtacacaggcgaccccaacctggggctggagctgtttgaggcggctggagacatcttcttcgacggggcctgggagcgggagaaagctgtgtccttctaccgggtgagctggcctgtgggctgatgtgggtgggccccag

SEQ ID NO: 10118 - protein, 110 aa, Homo sapiens
MTALVLTPVSDTRAYKSALDYTKRSLGIFIDLQKKEKEAHAWLQAGKIYYILRQSELVDLYIQVAQNVALYTGDPNLGLELFEAAGDIFFDGAWEREKAVSFYRVSWPVG

SEQ ID NO: 10119 - DNA, 1371 bp, Homo sapiens
ctggaccagcagagcagcatccatgtcacctaggagcttgtggcaagtgggagttctagggcccgccccaggcccgtggagccagaagctctgggggcaggccagcaagctatatggacaggcctctggatgactgtgatgcctgcgcaccttgagaaccatcggcctggatagcatctgaacactgatggctcctggtgcgtctagagaagacacaggccatgtctgggacgcgggggagatggactagcacgctcccccagccacagggcagcatgatgcccagttccctcagaaggatgtccttcgtcttttccttgccgtgtgtgttcaaccccaccctctcagcagcccgggaagggcaggacactgcacacacaagagggccgttcccagtcccattccagattcatctgtcaccagacccacgggaggaggcagactggttccaggaggatgacagcccttgttctgacacctgtgtctgataccagggcctacaaatccgcactggactacaccaaacgaagtctggggattttcattgacctccagaagaaagagaaggaggcgcatgcctggctgcaagcagggaagatctattacatcttgcggcagagcgagctggtggacctctacatccaggtggcacagaacgtggccctgtacacaggcgaccccaacctggggctggagctgtttgaggcggctggagacatcttcttcgacggggcctgggagcgggagaaagctgtgtccttctaccgggggaccggctgaacgagcgcgtggcctaccaccggctggccgccctgcaacaccgactgggccatggcgagctggcagagcacttctacctcaaggccctgtcgctctgcaactcgccgctggagtttgacgaggagaccctctactacgtgaaggtgtacctggtgctcggtgacatcatcttctacgacctgaaggacccgtttgatgcagccgggtactaccagctggcgctggcagccgccgtggacctgggcaacaagaaggcacagctgaagatctacacgcggctggccaccatctaccacaacttcctcctggaccgtgagaagtcgctcttcttctaccagaaggccaggaccttcgccacagagctcaacgtccgcagggtcaacctgcctcctctgccactctgcgggtgggccccctggttggcccccagccaccctcgctgaggacagcatccaagggagtgggttttgtgcaagggctgggggtctcctgcctctcctggtgtcgccggtggctcattttctggcaaatggaggcacgaacgcaggggccaaatagcaataaatgggttttgttttttttttgcaataa

SEQ ID NO: 10120 - protein, 107 aa, Homo sapiens [sequence omitted]

SEQ ID NO: 10121 - DNA, 2038 bp, Homo sapiens
gggagctggtccctgcgctccctgcgccctggggatgcccctgccgccctgacgcccgccagcctgagccaccggcgcatgtgaccgcgcgtccgccccagtcccatccgtaggcgcccggcgcccggccccgcagcggcctcgttgtccccgccggcccccgcccggtctcccgcgctgccacccgccgccggccctgccgccatgcaggcgcgagcgctgctcctggccgcgttggccgcgctggcgctggcccgggagccccctgcggcgccgtgtcccgcgcgctgcgacgtgtcgcggtgtcccagcccccgctgccccggcggctacgtgcccgacctctgcaactgctgcctggtgtgcgccgccagcgagggcgagccctgtggcggccctctggactcgccttgcggcgagagcctggagtgcgtgcgcggcctatgccgctgccgctggtcgcacgccgtgtgtggcaccgacgggcacacctatgccaacgtgtgcgcgctgcaggcggccagccgccgcgcgctgcagctctccgggacgcccgtgcgccagctgcagaagggcgcctgcccgttgggtctccaccagctgagcagcccgcgctacaagttcaacttcattgctgacgtggtggagaagatcgcaccagccgtggtccacatagagctcttcctgagacacccgctgtttggccgcaacgtgcccctgtccagcggttctggcttcatcatgtcagaggccggcctgatcatcaccaatgcccacgtggtgtccagcaacagtgctgccccgggcaggcagcagctcaaggtgcagctacagaatggggactcctatgaggccaccatcaaagacatcgacaagaagtcggacattgccaccatcaagatccatcccaagaaaaagctccctgtgttgttgctgggtcactcggccgacctgcggcctggggagtttgtggtggccatcggcagtcccttcgccctacagaacacagtgacaacgggcatcgtcagcactgcccagcgggagggcagggagctgggcctccgggactccgacatggactacatccagacggatgccatcatcaactacgggaactccgggggaccactggtgaacctggatggcgaggtcattggcatcaacacgctcaaggtcacggctggcatctcctttgccatcccctcagaccgcatcacacggttcctcacagagttccaagacaagcagatcaaagccccctcactggcagttcattgagagcagggggcttcctcacgtttccccctcctccatgaccccgtcagccaagcacatggaccccagtgcagccaaggctggtgccatgagggctggtcacatgaagagctgctgttgaggatgccgccattgttcttctgtgtccattatgggaagacaatctggagccaggcagagcctgtctttcccaaagaagctgaagtcttcttctcttgaacagtggggaccatctaatctcttgagcccttttcctgttggcttctaggaagctcagagctagattcaggggtgcacccagacctgtcctagcatgctcctttccctaatgaccgagtctttcctgttgaattatcccattctccatgggtgcctttgactttggcctccttactggaaattagcggagctgctgtttgcacacactgagctgtgaggtggctttccttggaagtggatgatagtgtcctcttcccttcttgcctctctctttctcctgagacaggatccccctggggcctaggtttgctcctttgttgtacaggggctgtcccagttagtgctgacctcatcccagaaccccctgggaaatatcccctgtcctcagagctgtgtcccctccccaaggacagtgcagactaactgaggagcctgataaaccttagctgcatggcacacttgcaattttaaaatccttctgaagttgactggtgtttgtacttgcttctcttttttatttaataaaatccaatgatccaaaccc

SEQ ID NO: 10122 - protein, 357 aa, Homo sapiens
MQARALLLAALAALALAREPPAAPCPARCDVSRCPSPRCPGGYVPDLCNCCLVCAASEGEPCGGPLDSPCGESLECVRGLCRCRWSHAVCGTDGHTYANVCALQAASRRALQLSGTPVRQLQKGACPLGLHQLSSPRYKFNFIADVVEKIAPAVVHIELFLRHPLFGRNVPLSSGSGFIMSEAGLIITNAHVVSSNSAAPGRQQLKVQLQNGDSYEATIKDIDKKSDIATIKIHPKKKLPVLLLGHSADLRPGEFVVAIGSPFALQNTVTTGIVSTAQREGRELGLRDSDMDYIQTDAIINYGNSGGPLVNLDGEVIGINTLKVTAGISFAIPSDRITRFLTEFQDKQIKAPSLAVH

SEQ ID NO: 10123 - DNA, 2540 bp, Homo sapiens
gggagctggtccctgcgctccctgcgccctggggatgcccctgccgccctgacgcccgccagcctgagccaccggcgcatgtgaccgcgcgtccgccccagtcccatccgtaggcgcccggcgcccggccccgcagcggcctcgttgtccccgccggcccccgcccggtctcccgcgctgccacccgccgccggccctgccgccatgcaggcgcgagcgctgctcctggccgcgttggccgcgctggcgctggcccgggagccccctgcggcgccgtgtcccgcgcgctgcgacgtgtcgcggtgtcccagcccccgctgccccggcggctacgtgcccgacctctgcaactgctgcctggtgtgcgccgccagcgagggcgagccctgtggcggccctctggactcgccttgcggcgagagcctggagtgcgtgcgcggcctatgccgctgccgctggtcgcacgccgtgtgtggcaccgacgggcacacctatgccaacgtgtgcgcgctgcaggcggccagccgccgcgcgctgcagctctccgggacgcccgtgcgccagctgcagaagggcgcctgcccgttgggtctccaccagctgagcagcccgcgctacaagttcaacttcattgctgacgtggtggagaagatcgcaccagccgtggtccacatagagctcttcctgagacacccgctgtttggccgcaacgtgcccctgtccagcggttctggcttcatcatgtcagaggccggcctgatcatcaccaatgcccacgtggtgtccagcaacagtgctgccccgggcaggcagcagctcaaggtgcagctacagaatggggactcctatgaggccaccatcaaagacatcgacaagaagtcggacattgccaccatcaagatccatcccaagaaaaagctccctgtgttgttgctgggtcactcggccgacctgcggcctggggagtttgtggtggccatcggcagtcccttcgccctacagaacacagtgacaacgggcatcgtcagcactgcccagcgggagggcagggagctgggcctccgggactccgacatggactacatccagacggatgccatcatcaactacgggaactccgggggaccactggtgaacctggatggcgaggtcattggcatcaacacgctcaaggtcacggctggcatctcctttgccatcccctcagaccgcatcacacggttcctcacagagttccaagacaagcagatcaaagactggaagaagcgcttcatcggcatacggatgcggacgatcacaccaagcctggtggatgagctgaaggccagcaacccggacttcccagaggtcagcagtggaatttatgtgcaagaggttgcgccgaattcaccttctcagagaggcggcatccaagatggtgacatcatcgtcaaggtcaacgggcgtcctctagtggactcgagtgagctgcaggaggccgtgctgaccgagtctcctctcctactggaggtgcggcgggggaacgacgacctcctcttcagcatcgcacctgaggtggtcatgtgaggggcgcattcctccagcgccaagcgtcagagcctgcagacaacggagggcagcgcccccccgagatcaggacgaaggaccaccgtcggtcctcagcagggcggcagcctcctcctggctgtccggggcagagcggaggctgggcttggccaggggcccgaatttccgcctggggagtgttggatccacatcccggtgccggggagggaagcccaacatccccttgtacagatgatcctgaaagtcacttccaagttctccggatattcacaaaactgccttccatggaggtcccctcctctcctagcttcccgcctctgcccctgtgaacacccatctgcagtatcccctgctcctgcccctcctactgcaggtctgggctgccaagcttcttcccccctgacaaacgcccacctgacctgaggccccagcttccctctgccctaggacttaccaagctgtagggccagggctgctgcctgccagcctggggtccctggaggacaggtcacatctgatccctttggggtgcgggggtggggtccagcccagagcaggcactgagtgaatgccccctggctgcggagctgagccccgccctgccatgaggttttcctccccaggcaggcaggaggccgcggggagcacgtggaaagttggctgctgcctggggaagcttctcctccccaaggcggccatggggcagcctgcagaggacagtggacgtggagctgcggggtgtgaggactgagccggcttccccttcccacgcagctctgggatgcagcagccgctcgcatggaagtgccgcccagaggcatgcaggctgctgggcaccaccccctcatccagggaacgagtgtgtctcaaggggcatttgtgagctttgctgtaaatggattcccagtgttgcttgtactgtatgtttctctactgtatggaaaataaagtttacaagcacacggttctcagcc

SEQ ID NO: 10124 - protein, 453 aa, Homo sapiens; identical to SEQ ID NO: 892

SEQ ID NO: 10125 - DNA, 805 bp, Homo sapiens
gcagggcggcagcctcctcctggctgtccggggcagagcggaggctgggcttggccaggggcccgaatttccgcctggggagtgttggatccacatcccggtgccggggagggaagcccaacatccccttgtacagatgatcctgaaagtcacttccaagttctccggatattcacaaaactgccttccatggaggtcccctcctctcctagcttcccgcctctgcccctgtgaacacccatctgcagtatcccctgctcctgcccctcctactgcaggtctgggctgccaagcttcttcccccctgacaaacgcccacctgacctgaggccccagcttccctctgccctaggacttaccaagctgtagggccagggctgctgcctgccagcctggggtccctggaggacaggtcacatctgatccctttggggtgcgggggtggggtccagcccagagcaggcactgagtgaatgccccctggctgcggagctgagccccgccctgccatgagcttctcctccccaaggcggccatggggcagcctgcagaggacagtggacgtggagctgcggggtgtgaggactgagccggcttccccttcccacgcagctctgggatgcagcagccgctcgcatggaagtgccgcccagaggcatgcaggctgctgggcaccaccccctcatccagggaacgagtgtgtctcaaggggcatttgtgagctttgctgtaaatggattcccagtgttgcttgtactgtatgtttctctactgtatggaaaataaagtttacaagcacacggtt

SEQ ID NO: 10126 - protein, 109 aa, Homo sapiens
MPPGCGAEPRPAMSFSSPRRPWGSLQRTVDVELRGVRTEPASPSHAALGCSSRSHGSAAQRHAGCWAPPPHPGNECVSRGICELCCKWIPSVACTVCFSTVWKIKFTST

SEQ ID NO: 10127 - DNA, 594 bp, Homo sapiens
actcaggatggggtcatggctgagactatgagggctgctcgtgcatgaccctgcctgctggcctccatgggcccactatctgaatgtggttacccttctccccaggaccaggtgccacctcctctgggaagctttccctgcccgtccacagggtatgcctccttgttcctctcctgccatcggtttacgtgcctgtctccatcaacagaccaggagctcctgaggacagggactgagtctgcctgattcatctctgcattcctagcacttaccttggtgcttagtgaaagctcgaacctgcctgggttcccaccttgtctctgctacccccagctctgtgaactcagagccaactactaagcctgtagcagcctcccaaactgcccagtcttgttcagatgcacctccagaaacacaggggtccaaaatgccccttcccagacaccctgaggagtagaacagtgccagcaggctccagggatgagggactagctaccacattccctttcccaagcctcagtttccccacctgtaagatgagggatatgggctctgactttctgagtttggaaaataaagtgctccccaaactgg

SEQ ID NO: 10128 - protein, 64 aa, Homo sapiens
MHLQKHRGPKCPFPDTLRSRTVPAGSRDEGLATTFPFPSLSFPTCKMRDMGSDFLSLENKVLPK

SEQ ID NO: 10129 - DNA, 685 bp, Homo sapiens
aggaccaggtgccacctcctctgggaagctttccctgcccgtccacagggtatgcctccttgttcctctcctgccatcggtttacgtgcctgtctccatcaacagaccaggagctcctgaggacagggactgagtctgcctgattcatctctgcattcctagcacttaccttggtgcttagtgaaagctcgaacctgcctgggttcccaccttgtctctgctacccccagctctgtgaactcagagtcatttttctctccccgagtggcaccgggctcagcagacactctggccatgaaggcatcttctgactcaagcaggctggagtgcaatggcgtgatctcggctcactgcaacctctgcctcccaggttcaagcaattctcctgcctcagcctcccgagtagctgggattataggcatgcaccaccacgcccagagccaactactaagcctgtagcagcctcccaaactgcccagtcttgttcagatgcacctccagaaacacaggggtccaaaatgccccttcccagacaccctgaggagtagaacagtgccagcaggctccagggatgagggactagctaccacattccctttcccaagcctcagtttccccacctgtaagatgagggatatgggctctgactttctgagtttggaaaataaagtgctccccaaactgg

SEQ ID NO: 10130 - protein, 54 aa, Homo sapiens
MKASSDSSRLECNGVISAHCNLCLPGSSNSPASASRVAGIIGMHHHAQSQLLSL

SEQ ID NO: 10131 - DNA, 986 bp, Homo sapiens
caagtccccctgcggcctctgagtccctgcaggaggatacttctccggtgagcaggcgggagaagtgttggagagcgccgtcctggctttgtgttcccagctgaaagacgatgcagttgccctggtagacgtgatcgctcctcctgactttgttctggactcaccgattggcagagccgacggcgagctctacaaaaacctctggggcgctgtcctgcaggaaagcaaggtgttggagcgggcatcctggtggccagagttttctgtgaacaaacctgtcataggaagtctgaaatcgaagctctagtgggactggcacacattcagccaagtctaatgaaacgaagggaactaatcagacgtggacctcaacttctgattccagaacacgccggagattgctgctgctttctgagcccgcacctgtgcgcctaaactgctgattggcctcaactgcccaggcggacgggagggaggcacccggccggctggactaatctgggatcgcggtgatttgcagcgtggaaaagaaatgcagatgatcatgtctacctgatgcgccgtgggttttttgataattagaatttcgcacattcagttttcagggttcagctcctttctctaaagtaaacagcccattgtcagggatcttctggtcagacaacctgtgattcatctagattttttaccgagctccacttcattgagaagtcaatgatgccagtctggttctttgtcaactctccctcggctttgtcacataattgaattatgtcataaccttattaatttgcacatagatcatctgaatgtcgtggtttaagacttaaggaggaacatctgtttgattactttcttttgtggaactggaaatttccatcgaggaaatgtttttttaaaaagtctaatgatttgaatgggcaattcagtctccaaccgcccccctccccctgccgccagttatatacaaatcactttattggtaa

SEQ ID NO: 10132 - protein, 32 aa, Homo sapiens
MKRRELIRRGPQLLIPEHAGDCCCFLSPHLCA

SEQ ID NO: 10133 - DNA, 1546 bp, Homo sapiens
agcggaaatcacagcaaacgcagatcccaccacagatgtgctcccgaacgcacaaggccacagccttggacctcttagggccctgccagaaaccacagcggctggaggtgacaccaaggaccaagtccccctgcggcctctgagtccctgcaggtgcccaccgcccccaactcccctgggtggtcccaggcaccccctcgcccctgcgccccctgccatgcacccctgcttcactctgcccaggagccccttcctcactttctcccgaggaaggaacccgcccagcctccctgaaccccagcaggtatgagcccagcggccacctgtcacctctgagcctgggaccttgcctccctcgctgccgcgggccagagaccatcaatgcctgagtgggaaaagggtctcagaactcggcccctgagcagcacattccttgggtcacatctgggctggggacagcaatgacactgatgtgttcacccaaaacaggcctcctatatggccgatttggaaagtgcactcagggcatgttggtattgggggtggttttggactggacccagcccccatgtgaccgaggctgtgcttgcaggaggatacttctccggtgagcaggcgggagaagtgttggagagcgccgtcctggctttgtgttcccagctgaaagacgatgcagttgccctggtagacgtgatcgctcctcctgactttgttctggactcaccgattggcagagccgacggcgagctctacaaaaacctctggggcgctgtcctgcaggaaagcaaggtgttggagcgggcatcctggtggccagagttttctgtgaacaaacctgtcataggaagtctgaaatcgaagctctagtgggactggcacacattcagccaagtctaatgaaacgaagggaactaatcagacgtggacctcaacttctgattccagaacacgccggagattgctgctgctttctgagcccgcacctgtgcgcctaaactgctgattggcctcaactgcccaggcggacgggagggaggcacccggccggctggactaatctgggatcgcggtgatttgcagcgtggaaaagaaatgcagatgatcatgtctacctgatgcgccgtgggttttttgataattagaatttcgcacattcagttttcagggttcagctcctttctctaaagtaaacagcccattgtcagggatcttctggtcagacaacctgtgattcatctagattttttaccgagctccacttcattgagaagtcaatgatgccagtctggttctttgtcaactctccctcggctttgtcacataattgaattatgtcataaccttattaatttgcacatagatcatctgaatgtcgtggtttaagacttaaggaggaacatctgtttgattactttcttttgtggaactggaaatttccatcgaggaaatgtttttttaaaaagtctaatgatttgaatgggcaattcagtctccaaccgcccccctccccctgccgccagttatatacaaatcactttattggtaa

SEQ ID NO: 10134 - protein, 122 aa, Homo sapiens [sequence omitted]

SEQ ID NO: 10135 - DNA, 1610 bp, Homo sapiens
cagcaccacgcttcacacagaccgagcctggtgcgtgcgagaacgtgcagccgtcccactcgggggcccactctagcggcggcaccgtgttcctgtggcctccaggctgctggaacagtgtagaactcaggacagccctgggctgagccaggaagtgcctccagccaggggggccctgggcaggtgccctccctgtgcttcagtttccctacctataaaatcagacccaccccatacacttggttgtcaatgaagacaacctggtacctgcaggatgctggcagtgccttgtccctgggggtgagttgtgacaaatgctgtgttctctattgttactttttctccttctgtttgtcattccgaagtcgccctggcagcatacaagtggctggtttgctacctgctccgagagacttatcaaaaattaaaccaagagaaaagatcaggaagcagtgactttgaagcaaggaacaaatgccaggtgtcccacggccgtccgttggcgctggccttcgtggagctcacggtggtccagaggttccacgagcacgtgcaccagccttccgtgccgccctcgctgcgggccgtgctggggcggctcagtgctctgtacgccctgtggtccctgagccgccacgcggccctgctctaccgaggaggatacttctccggtgagcaggcgggagaagtgttggagagcgccgtcctggctttgtgttcccagctgaaagacgatgcagttgccctggtagacgtgatcgctcctcctgactttgttctggactcaccgattggcagagccgacggcgagctctacaaaaacctctggggcgctgtcctgcaggaaagcaaggtgttggagcgggcatcctggtggccagagttttctgtgaacaaacctgtcataggaagtctgaaatcgaagctctagtgggactggcacacattcagccaagtctaatgaaacgaagggaactaatcagacgtggacctcaacttctgattccagaacacgccggagattgctgctgctttctgagcccgcacctgtgcgcctaaactgctgattggcctcaactgcccaggcggacgggagggaggcacccggccggctggactaatctgggatcgcggtgatttgcagcgtggaaaagaaatgcagatgatcatgtctacctgatgcgccgtgggttttttgataattagaatttcgcacattcagttttcagggttcagctcctttctctaaagtaaacagcccattgtcagggatcttctggtcagacaacctgtgattcatctagattttttaccgagctccacttcattgagaagtcaatgatgccagtctggttctttgtcaactctccctcggctttgtcacataattgaattatgtcataaccttattaatttgcacatagatcatctgaatgtcgtggtttaagacttaaggaggaacatctgtttgattactttcttttgtggaactggaaatttccatcgaggaaatgtttttttaaaaagtctaatgatttgaatgggcaattcagtctccaaccgcccccctccccctgccgccagttatatacaaatcactttattggtaa

SEQ ID NO: 10136 - protein, 66 aa, Homo sapiens
MPGVPRPSVGAGLRGAHGGPEVPRARAPAFRAALAAGRAGAAQCSVRPVVPEPPRGPALPRRILLR

SEQ ID NO: 10137 - DNA, 2875 bp, Homo sapiens
cggaaatgagaatggcgccgctggagatcctttcctgcttttggtttccctggcaggggttgaactgtggagtgtgtgggctcttatcacgcgatggcatccactgtggaaggaggcgacacagctctgctcccagaattccccagggggcccctcgatgcctaccgagcaagagcgtccttcagctggaaggagctggcgctgttcacggaaggggagggcatgctccgctttaagaaaaccatcttctcagctcttgagaatgaccctcttttcgctcgttcccctggagccgatctgtccttggagaagtatcgcgagctgaacttccttcgatgcaagcggatcttcgagtatgacttcctcagtgtcgaagacatgttcaagagccctctgaaggtccccgccttgattcagtgcctgggcatgtatgactcttctctggctgccaagtacctcctccatagcttggtttttggatcagcagtttacagttctggttctgaaagacatctcacatatattcaaaagatcttcaggatggagatttttggatgttttgctctgaccgaattaagccacggcagtaataccaaggccattcgcacaactgcccactacgatcctgccactgaggaattcatcatacattcccctgatttcgaagctgccaagttttgggttggcaacatgggcaagacagccactcacgcggtggtgtttgctaagctgtgtgtgccaggggaccagtgccatgggctgcatccctttatcgtgcagatccgggacccgaagacccttcttcccatgcctggagtgatggttggcgacataggaaaaaaactcgggcagaacggtctggataatggtttcgccatgttccacaaggtcagagttcctcgccagagccttctgaaccggatgggagacgtcacccccgagggcacctatgtcagcccctttaaggacgtcaggcagcgctttggagcgtccctggggagcctgtcctcgggccgggtctccatcgtgagcctggccatccttaacctaaagctggccgtggccatcgctcttcgcttctcagccactcggcgtcagtttggacccacagaggaggaggaaataccagtgcttgagtatccaatgcagcaatggcgcttgcttccatatctggcagctgtctacgccttagaccatttctccaagtcgctcttcctggacctggtggagctccagcgaggacttgcatcgggagaccgcagcgccagacaggcagagcttggacgtgagatccacgccctggcatcggccagcaagcccctggcctcgtggaccacccagcaaggaattcaggaatgccgggaggcgtgtggaggacacggctatctggccatgaaccggttgggtgtccttagagatgacaacgatcccaactgcacatacgaaggtgacaacaacatcctgctgcagcagacaagcaactatttgctgggtctcctggcacaccaggtccacgatggagcttgcttccgcagtccgctgaagtcagtggactttctggacgcctatcccggcatccttgaccagaagtttgaggtctccagtgttgccgactgcttggactctgcagtcgccctggcagcatacaagtggctggtttgctacctgctccgagagacttatcaaaaattaaaccaagagaaaagatcaggaagcagtgactttgaagcaaggaacaaatgccaggtgtcccacggccgtccgttggcgctggccttcgtggagctcacggtggtccagaggttccacgagcacgtgcaccagccttccgtgccgccctcgctgcgggccgtgctggggcggctcagtgctctgtacgccctgtggtccctgagccgccacgcggccctgctctaccgaggaggatacttctccggtgagcaggcgggagaagtgttggagagcgccgtcctggctttgtgttcccagctgaaagacgatgcagttgccctggtagacgtgatcgctcctcctgactttgttctggactcaccgattggcagagccgacggcgagctctacaaaaacctctggggcgctgtcctgcaggaaagcaaggtgttggagcgggcatcctggtggccagagttttctgtgaacaaacctgtcataggaagtctgaaatcgaagctctagtgggactggcacacattcagccaagtctaatgaaacgaagggaactaatcagacgtggacctcaacttctgattccagaacacgccggagattgctgctgctttctgagcccgcacctgtgcgcctaaactgctgattggcctcaactgcccaggcggacgggagggaggcacccggccggctggactaatctgggatcgcggtgatttgcagcgtggaaaagaaatgcagatgatcatgtctacctgatgcgccgtgggttttttgataattagaatttcgcacattcagttttcagggttcagctcctttctctaaagtaaacagcccattgtcagggatcttctggtcagacaacctgtgattcatctagattttttaccgagctccacttcattgagaagtcaatgatgccagtctggttctttgtcaactctccctcggctttgtcacataattgaattatgtcataaccttattaatttgcacatagatcatctgaatgtcgtggtttaagacttaaggaggaacatctgtttgattactttcttttgtggaactggaaatttccatcgaggaaatgtttttttaaaaagtctaatgatttgaatgggcaattcagtctccaaccgcccccctccccctgccgccagttatatacaaatcactttattggtaa

SEQ ID NO: 10138 - protein, 700 aa, Homo sapiens
MASTVEGGDTALLPEFPRGPLDAYRARASFSWKELALFTEGEGMLRFKKTIFSALENDPLFARSPGADLSLEKYRELNFLRCKRIFEYDFLSVEDMFKSPLKVPALIQCLGMYDSSLAAKYLLHSLVFGSAVYSSGSERHLTYIQKIFRMEIFGCFALTELSHGSNTKAIRTTAHYDPATEEFIIHSPDFEAAKFWVGNMGKTATHAVVFAKLCVPGDQCHGLHPFIVQIRDPKTLLPMPGVMVGDIGKKLGQNGLDNGFAMFHKVRVPRQSLLNRMGDVTPEGTYVSPFKDVRQRFGASLGSLSSGRVSIVSLAILNLKLAVAIALRFSATRRQFGPTEEEEIPVLEYPMQQWRLLPYLAAVYALDHFSKSLFLDLVELQRGLASGDRSARQAELGREIHALASASKPLASWTTQQGIQECREACGGHGYLAMNRLGVLRDDNDPNCTYEGDNNILLQQTSNYLLGLLAHQVHDGACFRSPLKSVDFLDAYPGILDQKFEVSSVADCLDSAVALAAYKWLVCYLLRETYQKLNQEKRSGSSDFEARNKCQVSHGRPLALAFVELTVVQRFHEHVHQPSVPPSLRAVLGRLSALYALWSLSRHAALLYRGGYFSGEQAGEVLESAVLALCSQLKDDAVALVDVIAPPDFVLDSPIGRADGELYKNLWGAVLQESKVLERASWWPEFSVNKPVIGSLKSKL

SEQ ID NO: 10139 - DNA, 1222 bp, Homo sapiens
agcggaaatcacagcaaacgcagatcccaccacagatgtgctcccgaacgcacaaggccacagccttggacctcttagggccctgccagaaaccacagcggctggaggtgacaccaaggaccaagtccccctgcggcctctgagtccctgcaggtgcccaccgcccccaactcccctgggtggtcccaggcaccccctcgcccctgcgccccctgccatgcacccctgcttcactctgcccaggagccccttcctcactttctcccgaggaaggaacccgcccagcctccctgaaccccagcaggtatgagcccagcggccacctgtcacctctgagcctgggaccttgcctccctcgctgccgcgggccagagaccatcaatgcctgagtgggaaaagggtctcagaactcggcccctgagcagcacattccttgggtcacatctgggctggggacagcaatgacactgatgtgttcacccaaaacaggcctcctatatggccgatttggaaagtgcactcagggcatgttggtattgggggtggttttggactggacccagcccccatgtgaccgaggctgtgcttgcaggaggatacttctccggtgagcaggcgggagaagtgttggagagcgccgtcctggctttgtgttcccagctgaaagacgatgcagttgccctggtagacgtgatcgctcctcctgactttgttctggactcaccgattggcagagccgacggcgagctctacaaaaacctctggggcgctgtcctgcaggaaagcaaggtgttggagcgggcatcctggtggccagagttttctgtgaacaaacctgtcataggaagtctgaaatcgaagctctagtgggactggcacacattcagccaagtctaatgaaacgaagggaactaatcagacgtggacctcaacttctgattccagaacacgccggagattgctgctgctttctgagcccgcacctgtgcgcctaaactgctgattggcctcaactgcccaggcggacgggagggaggcacccggccggctggactaatctgggatcgcggtgatttgcagcgtggaaaagaaatgcagatgatcatgtctacctgatgcgccgtgggttttttgataattagaatttcgcacattcagttttcagggttcagctcctttctctaaagtaaacagcccattgtcagggatcttctggtcagac

SEQ ID NO: 10140 - protein, 122 aa, Homo sapiens [sequence omitted]

SEQ ID NO: 10141 - DNA, 1286 bp, Homo sapiens
cagcaccacgcttcacacagaccgagcctggtgcgtgcgagaacgtgcagccgtcccactcgggggcccactctagcggcggcaccgtgttcctgtggcctccaggctgctggaacagtgtagaactcaggacagccctgggctgagccaggaagtgcctccagccaggggggccctgggcaggtgccctccctgtgcttcagtttccctacctataaaatcagacccaccccatacacttggttgtcaatgaagacaacctggtacctgcaggatgctggcagtgccttgtccctgggggtgagttgtgacaaatgctgtgttctctattgttactttttctccttctgtttgtcattccgaagtcgccctggcagcatacaagtggctggtttgctacctgctccgagagacttatcaaaaattaaaccaagagaaaagatcaggaagcagtgactttgaagcaaggaacaaatgccaggtgtcccacggccgtccgttggcgctggccttcgtggagctcacggtggtccagaggttccacgagcacgtgcaccagccttccgtgccgccctcgctgcgggccgtgctggggcggctcagtgctctgtacgccctgtggtccctgagccgccacgcggccctgctctaccgaggaggatacttctccggtgagcaggcgggagaagtgttggagagcgccgtcctggctttgtgttcccagctgaaagacgatgcagttgccctggtagacgtgatcgctcctcctgactttgttctggactcaccgattggcagagccgacggcgagctctacaaaaacctctggggcgctgtcctgcaggaaagcaaggtgttggagcgggcatcctggtggccagagttttctgtgaacaaacctgtcataggaagtctgaaatcgaagctctagtgggactggcacacattcagccaagtctaatgaaacgaagggaactaatcagacgtggacctcaacttctgattccagaacacgccggagattgctgctgctttctgagcccgcacctgtgcgcctaaactgctgattggcctcaactgcccaggcggacgggagggaggcacccggccggctggactaatctgggatcgcggtgatttgcagcgtggaaaagaaatgcagatgatcatgtctacctgatgcgccgtgggttttttgataattagaatttcgcacattcagttttcagggttcagctcctttctctaaagtaaacagcccattgtcagggatcttctggtcagac

SEQ ID NO: 10142 - protein, 66 aa, Homo sapiens; identical to SEQ ID NO: 10136

SEQ ID NO: 10143 - DNA, 2551 bp, Homo sapiens
cggaaatgagaatggcgccgctggagatcctttcctgcttttggtttccctggcaggggttgaactgtggagtgtgtgggctcttatcacgcgatggcatccactgtggaaggaggcgacacagctctgctcccagaattccccagggggcccctcgatgcctaccgagcaagagcgtccttcagctggaaggagctggcgctgttcacggaaggggagggcatgctccgctttaagaaaaccatcttctcagctcttgagaatgaccctcttttcgctcgttcccctggagccgatctgtccttggagaagtatcgcgagctgaacttccttcgatgcaagcggatcttcgagtatgacttcctcagtgtcgaagacatgttcaagagccctctgaaggtccccgccttgattcagtgcctgggcatgtatgactcttctctggctgccaagtacctcctccatagcttggtttttggatcagcagtttacagttctggttctgaaagacatctcacatatattcaaaagatcttcaggatggagatttttggatgttttgctctgaccgaattaagccacggcagtaataccaaggccattcgcacaactgcccactacgatcctgccactgaggaattcatcatacattcccctgatttcgaagctgccaagttttgggttggcaacatgggcaagacagccactcacgcggtggtgtttgctaagctgtgtgtgccaggggaccagtgccatgggctgcatccctttatcgtgcagatccgggacccgaagacccttcttcccatgcctggagtgatggttggcgacataggaaaaaaactcgggcagaacggtctggataatggtttcgccatgttccacaaggtcagagttcctcgccagagccttctgaaccggatgggagacgtcacccccgagggcacctatgtcagcccctttaaggacgtcaggcagcgctttggagcgtccctggggagcctgtcctcgggccgggtctccatcgtgagcctggccatccttaacctaaagctggccgtggccatcgctcttcgcttctcagccactcggcgtcagtttggacccacagaggaggaggaaataccagtgcttgagtatccaatgcagcaatggcgcttgcttccatatctggcagctgtctacgccttagaccatttctccaagtcgctcttcctggacctggtggagctccagcgaggacttgcatcgggagaccgcagcgccagacaggcagagcttggacgtgagatccacgccctggcatcggccagcaagcccctggcctcgtggaccacccagcaaggaattcaggaatgccgggaggcgtgtggaggacacggctatctggccatgaaccggttgggtgtccttagagatgacaacgatcccaactgcacatacgaaggtgacaacaacatcctgctgcagcagacaagcaactatttgctgggtctcctggcacaccaggtccacgatggagcttgcttccgcagtccgctgaagtcagtggactttctggacgcctatcccggcatccttgaccagaagtttgaggtctccagtgttgccgactgcttggactctgcagtcgccctggcagcatacaagtggctggtttgctacctgctccgagagacttatcaaaaattaaaccaagagaaaagatcaggaagcagtgactttgaagcaaggaacaaatgccaggtgtcccacggccgtccgttggcgctggccttcgtggagctcacggtggtccagaggttccacgagcacgtgcaccagccttccgtgccgccctcgctgcgggccgtgctggggcggctcagtgctctgtacgccctgtggtccctgagccgccacgcggccctgctctaccgaggaggatacttctccggtgagcaggcgggagaagtgttggagagcgccgtcctggctttgtgttcccagctgaaagacgatgcagttgccctggtagacgtgatcgctcctcctgactttgttctggactcaccgattggcagagccgacggcgagctctacaaaaacctctggggcgctgtcctgcaggaaagcaaggtgttggagcgggcatcctggtggccagagttttctgtgaacaaacctgtcataggaagtctgaaatcgaagctctagtgggactggcacacattcagccaagtctaatgaaacgaagggaactaatcagacgtggacctcaacttctgattccagaacacgccggagattgctgctgctttctgagcccgcacctgtgcgcctaaactgctgattggcctcaactgcccaggcggacgggagggaggcacccggccggctggactaatctgggatcgcggtgatttgcagcgtggaaaagaaatgcagatgatcatgtctacctgatgcgccgtgggttttttgataattagaatttcgcacattcagttttcagggttcagctcctttctctaaagtaaacagcccattgtcagggatcttctggtcagac

SEQ ID NO: 10144 - protein, 700 aa, Homo sapiens; identical to SEQ ID NO: 10138

SEQ ID NO: 10145 - DNA, 1220 bp, Homo sapiens
cagcaccacgcttcacacagaccgagcctggtgcgtgcgagaacgtgcagccgtcccactcgggggcccactctagcggcggcaccgtgttcctgtggcctccaggctgctggaacagtgtagaactcaggacagccctgggctgagccaggaagtgcctccagccaggggggccctgggcaggtgccctccctgtgcttcagtttccctacctataaaatcagacccaccccatacacttggttgtcaatgaagacaacctggtacctgcaggatgctggcagtgccttgtccctgggggtgagttgtgacaaatgctgtgttctctattgttactttttctccttctgtttgtcattccgaagtcgccctggcagcatacaagtggctggtttgctacctgctccgagagacttatcaaaaattaaaccaagagaaaagatcaggaagcagtgactttgaagcaaggaacaaatgccaggtgtcccacggccgtccgttggcgctggccttcgtggagctcacggtggtccagaggttccacgagcacgtgcaccagccttccgtgccgccctcgctgcgggccgtgctggggcggctcagtgctctgtacgccctgtggtccctgagccgccacgcggccctgctctaccgaggaggatacttctccggtgagcaggcgggagaagtgttggagagcgccgtcctggctttgtgttcccagctgaaagacgatgcagttgccctggtagacgtgatcgctcctcctgactttgttctggactcaccgattggcagagccgacggcgagctctacaaaaacctctggggcgctgtcctgcaggaaagcaaggtgttggagcgggcatcctggtggccagagttttctgtgaacaaacctgtcataggaagtctgaaatcgaagctctagtgggactggcacacattcagccaagtctaatgaaacgaagggaactaatcagacgtggacctcaacttctgattccagaacacgccggagattgctgctgctttctgagcccgcacctgtgcgcctaaactgctgattggcctcaactgcccaggcggacgggagggaggcacccggccggctggactaatctgggatcgcggtgatttgcagcgtggaaaagaaatgcagatgatcatgtctacctgatgcgccgtgggttttttgataattagaatttcgcacattc

SEQ ID NO: 10146 - protein, 66 aa, Homo sapiens; identical to SEQ ID NO: 10136

SEQ ID NO: 10147 - DNA, 2485 bp, Homo sapiens
cggaaatgagaatggcgccgctggagatcctttcctgcttttggtttccctggcaggggttgaactgtggagtgtgtgggctcttatcacgcgatggcatccactgtggaaggaggcgacacagctctgctcccagaattccccagggggcccctcgatgcctaccgagcaagagcgtccttcagctggaaggagctggcgctgttcacggaaggggagggcatgctccgctttaagaaaaccatcttctcagctcttgagaatgaccctcttttcgctcgttcccctggagccgatctgtccttggagaagtatcgcgagctgaacttccttcgatgcaagcggatcttcgagtatgacttcctcagtgtcgaagacatgttcaagagccctctgaaggtccccgccttgattcagtgcctgggcatgtatgactcttctctggctgccaagtacctcctccatagcttggtttttggatcagcagtttacagttctggttctgaaagacatctcacatatattcaaaagatcttcaggatggagatttttggatgttttgctctgaccgaattaagccacggcagtaataccaaggccattcgcacaactgcccactacgatcctgccactgaggaattcatcatacattcccctgatttcgaagctgccaagttttgggttggcaacatgggcaagacagccactcacgcggtggtgtttgctaagctgtgtgtgccaggggaccagtgccatgggctgcatccctttatcgtgcagatccgggacccgaagacccttcttcccatgcctggagtgatggttggcgacataggaaaaaaactcgggcagaacggtctggataatggtttcgccatgttccacaaggtcagagttcctcgccagagccttctgaaccggatgggagacgtcacccccgagggcacctatgtcagcccctttaaggacgtcaggcagcgctttggagcgtccctggggagcctgtcctcgggccgggtctccatcgtgagcctggccatccttaacctaaagctggccgtggccatcgctcttcgcttctcagccactcggcgtcagtttggacccacagaggaggaggaaataccagtgcttgagtatccaatgcagcaatggcgcttgcttccatatctggcagctgtctacgccttagaccatttctccaagtcgctcttcctggacctggtggagctccagcgaggacttgcatcgggagaccgcagcgccagacaggcagagcttggacgtgagatccacgccctggcatcggccagcaagcccctggcctcgtggaccacccagcaaggaattcaggaatgccgggaggcgtgtggaggacacggctatctggccatgaaccggttgggtgtccttagagatgacaacgatcccaactgcacatacgaaggtgacaacaacatcctgctgcagcagacaagcaactatttgctgggtctcctggcacaccaggtccacgatggagcttgcttccgcagtccgctgaagtcagtggactttctggacgcctatcccggcatccttgaccagaagtttgaggtctccagtgttgccgactgcttggactctgcagtcgccctggcagcatacaagtggctggtttgctacctgctccgagagacttatcaaaaattaaaccaagagaaaagatcaggaagcagtgactttgaagcaaggaacaaatgccaggtgtcccacggccgtccgttggcgctggccttcgtggagctcacggtggtccagaggttccacgagcacgtgcaccagccttccgtgccgccctcgctgcgggccgtgctggggcggctcagtgctctgtacgccctgtggtccctgagccgccacgcggccctgctctaccgaggaggatacttctccggtgagcaggcgggagaagtgttggagagcgccgtcctggctttgtgttcccagctgaaagacgatgcagttgccctggtagacgtgatcgctcctcctgactttgttctggactcaccgattggcagagccgacggcgagctctacaaaaacctctggggcgctgtcctgcaggaaagcaaggtgttggagcgggcatcctggtggccagagttttctgtgaacaaacctgtcataggaagtctgaaatcgaagctctagtgggactggcacacattcagccaagtctaatgaaacgaagggaactaatcagacgtggacctcaacttctgattccagaacacgccggagattgctgctgctttctgagcccgcacctgtgcgcctaaactgctgattggcctcaactgcccaggcggacgggagggaggcacccggccggctggactaatctgggatcgcggtgatttgcagcgtggaaaagaaatgcagatgatcatgtctacctgatgcgccgtgggttttttgataattagaatttcgcacattc

SEQ ID NO: 10148 - protein, 700 aa, Homo sapiens; identical to SEQ ID NO: 10138

SEQ ID NO: 10149 - DNA, 1178 bp, Homo sapiens
cagcaccacgcttcacacagaccgagcctggtgcgtgcgagaacgtgcagccgtcccactcgggggcccactctagcggcggcaccgtgttcctgtggcctccaggctgctggaacagtgtagaactcaggacagccctgggctgagccaggaagtgcctccagccaggggggccctgggcaggtgccctccctgtgcttcagtttccctacctataaaatcagacccaccccatacacttggttgtcaatgaagacaacctggtacctgcaggatgctggcagtgccttgtccctgggggtgagttgtgacaaatgctgtgttctctattgttactttttctccttctgtttgtcattccgaagtcgccctggcagcatacaagtggctggtttgctacctgctccgagagacttatcaaaaattaaaccaagagaaaagatcaggaagcagtgactttgaagcaaggaacaaatgccaggtgtcccacggccgtccgttggcgctggccttcgtggagctcacggtggtccagaggttccacgagcacgtgcaccagccttccgtgccgccctcgctgcgggccgtgctggggcggctcagtgctctgtacgccctgtggtccctgagccgccacgcggccctgctctaccgaggaggatacttctccggtgagcaggcgggagaagtgttggagagcgccgtcctggctttgtgttcccagctgaaagacgatgcagttgccctggtagacgtgatcgctcctcctgactttgttctggactcaccgattggcagagccgacggcgagctctacaaaaacctctggggcgctgtcctgcaggaaagcaaggtgttggagcgggcatcctggtggccagagttttctgtgaacaaacctgtcataggaagtctgaaatcgaagctctagtgggactggcacacattcagccaagtctaatgaaacgaagggaactaatcagacgtggacctcaacttctgattccagaacacgccggagattgctgctgctttctgagcccgcacctgtgcgcctaaactgctgattggcctcaactgcccaggcggacgggagggaggcacccggccggctggactaatctgggatcgcggtgatttgcagcgtggaaaagaaatgcagatgatcatgtctacct

SEQ ID NO: 10150 - protein, 66 aa, Homo sapiens; identical to SEQ ID NO: 10136

SEQ ID NO: 10151 - DNA, 2375 bp, Homo sapiens
cggaaatgagaatggcgccgctggagatcctttcctgcttttggtttccctggcaggggttgaactgtggagtgtgtgggctcttatcacgcgatggcatccactgtggaaggaggcgacacagctctgctcccagaattccccagggggcccctcgatgcctaccgagcaagagcgtccttcagctggaaggagctggcgctgttcacggaaggggagggcatgctccgctttaagaaaaccatcttctcagctcttgagaatgaccctcttttcgctcgttcccctggagccgatctgtccttggagaagtatcgcgagctgaacttccttcgatgcaagcggatcttcgagtatgacttcctcagtgtcgaagacatgttcaagagccctctgaaggtccccgccttgattcagtgcctgggcatgtatgactcttctctggctgccaagtacctcctccatagcttggtttttggatcagcagtttacagttctggttctgaaagacatctcacatatattcaaaagatcttcaggatggagatttttggatgttttgctctgaccgaattaagccacggcagtaataccaaggccattcgcacaactgcccactacgatcctgccactgaggaattcatcatacattcccctgatttcgaagctgccaagttttgggttggcaacatgggcaagacagccactcacgcggtggtgtttgctaagctgtgtgtgccaggggaccagtgccatgggctgcatccctttatcgtgcagatccgggacccgaagacccttcttcccatgcctggagtgatggttggcgacataggaaaaaaactcgggcagaacggtctggataatggtttcgccatgttccacaaggtcagagttcctcgccagagccttctgaaccggatgggagacgtcacccccgagggcacctatgtcagcccctttaaggacgtcaggcagcgctttggagcgtccctggggagcctgtcctcgggccgggtctccatcgtgagcctggccatccttaacctaaagctggccgtggccatcgctcttcgcttctcagccactcggcgtcagtttggacccacagaggaggaggaaataccagtgcttgagtatccaatgcagcaatggcgcttgcttccatatctggcagctgtctacgccttagaccatttctccaagtcgctcttcctggacctggtggagctccagcgaggacttgcatcgggagaccgcagcgccagacaggcagagcttggacgtgagatccacgccctggcatcggccagcaagcccctggcctcgtggaccacccagcaaggaattcaggaatgccgggaggcgtgtggaggacacggctatctggccatgaaccggttgggtgtccttagagatgacaacgatcccaactgcacatacgaaggtgacaacaacatcctgctgcagcagacaagcaactatttgctgggtctcctggcacaccaggtccacgatggagcttgcttccgcagtccgctgaagtcagtggactttctggacgcctatcccggcatccttgaccagaagtttgaggtctccagtgttgccgactgcttggactctgcagtcgccctggcagcatacaagtggctggtttgctacctgctccgagagacttatcaaaaattaaaccaagagaaaagatcaggaagcagtgactttgaagcaaggaacaaatgccaggtgtcccacggccgtccgttggcgctggccttcgtggagctcacggtggtccagaggttccacgagcacgtgcaccagccttccgtgccgccctcgctgcgggccgtgctggggcggctcagtgctctgtacgccctgtggtccctgagccgccacgcggccctgctctaccgagctgaaagacgatgcagttgccctggtagacgtgatcgctcctcctgactttgttctggactcaccgattggcagagccgacggcgagctctacaaaaacctctggggcgctgtcctgcaggaaagcaaggtgttggagcgggcatcctggtggccagagttttctgtgaacaaacctgtcataggaagtctgaaatcgaagctctagtgggactggcacacattcagccaagtctaatgaaacgaagggaactaatcagacgtggacctcaacttctgattccagaacacgccggagattgctgctgctttctgagcccgcacctgtgcgcctaaactgctgattggcctcaactgcccaggcggacgggagggaggcacccggccggctggactaatctgggatcgcggtgatttgcagcgtggaaaagaaatgcagatgatcatgtctacct

SEQ ID NO: 10152 - protein, 624 aa, Homo sapiens
MASTVEGGDTALLPEFPRGPLDAYRARASFSWKELALFTEGEGMLRFKKTIFSALENDPLFARSPGADLSLEKYRELNFLRCKRIFEYDFLSVEDMFKSPLKVPALIQCLGMYDSSLAAKYLLHSLVFGSAVYSSGSERHLTYIQKIFRMEIFGCFALTELSHGSNTKAIRTTAHYDPATEEFIIHSPDFEAAKFWVGNMGKTATHAVVFAKLCVPGDQCHGLHPFIVQIRDPKTLLPMPGVMVGDIGKKLGQNGLDNGFAMFHKVRVPRQSLLNRMGDVTPEGTYVSPFKDVRQRFGASLGSLSSGRVSIVSLAILNLKLAVAIALRFSATRRQFGPTEEEEIPVLEYPMQQWRLLPYLAAVYALDHFSKSLFLDLVELQRGLASGDRSARQAELGREIHALASASKPLASWTTQQGIQECREACGGHGYLAMNRLGVLRDDNDPNCTYEGDNNILLQQTSNYLLGLLAHQVHDGACFRSPLKSVDFLDAYPGILDQKFEVSSVADCLDSAVALAAYKWLVCYLLRETYQKLNQEKRSGSSDFEARNKCQVSHGRPLALAFVELTVVQRFHEHVHQPSVPPSLRAVLGRLSALYALWSLSRHAALLYRAERRCSCPGRRDRSS

SEQ ID NO: 10153 - DNA, 2443 bp, Homo sapiens
cggaaatgagaatggcgccgctggagatcctttcctgcttttggtttccctggcaggggttgaactgtggagtgtgtgggctcttatcacgcgatggcatccactgtggaaggaggcgacacagctctgctcccagaattccccagggggcccctcgatgcctaccgagcaagagcgtccttcagctggaaggagctggcgctgttcacggaaggggagggcatgctccgctttaagaaaaccatcttctcagctcttgagaatgaccctcttttcgctcgttcccctggagccgatctgtccttggagaagtatcgcgagctgaacttccttcgatgcaagcggatcttcgagtatgacttcctcagtgtcgaagacatgttcaagagccctctgaaggtccccgccttgattcagtgcctgggcatgtatgactcttctctggctgccaagtacctcctccatagcttggtttttggatcagcagtttacagttctggttctgaaagacatctcacatatattcaaaagatcttcaggatggagatttttggatgttttgctctgaccgaattaagccacggcagtaataccaaggccattcgcacaactgcccactacgatcctgccactgaggaattcatcatacattcccctgatttcgaagctgccaagttttgggttggcaacatgggcaagacagccactcacgcggtggtgtttgctaagctgtgtgtgccaggggaccagtgccatgggctgcatccctttatcgtgcagatccgggacccgaagacccttcttcccatgcctggagtgatggttggcgacataggaaaaaaactcgggcagaacggtctggataatggtttcgccatgttccacaaggtcagagttcctcgccagagccttctgaaccggatgggagacgtcacccccgagggcacctatgtcagcccctttaaggacgtcaggcagcgctttggagcgtccctggggagcctgtcctcgggccgggtctccatcgtgagcctggccatccttaacctaaagctggccgtggccatcgctcttcgcttctcagccactcggcgtcagtttggacccacagaggaggaggaaataccagtgcttgagtatccaatgcagcaatggcgcttgcttccatatctggcagctgtctacgccttagaccatttctccaagtcgctcttcctggacctggtggagctccagcgaggacttgcatcgggagaccgcagcgccagacaggcagagcttggacgtgagatccacgccctggcatcggccagcaagcccctggcctcgtggaccacccagcaaggaattcaggaatgccgggaggcgtgtggaggacacggctatctggccatgaaccggttgggtgtccttagagatgacaacgatcccaactgcacatacgaaggtgacaacaacatcctgctgcagcagacaagcaactatttgctgggtctcctggcacaccaggtccacgatggagcttgcttccgcagtccgctgaagtcagtggactttctggacgcctatcccggcatccttgaccagaagtttgaggtctccagtgttgccgactgcttggactctgcagtcgccctggcagcatacaagtggctggtttgctacctgctccgagagacttatcaaaaattaaaccaagagaaaagatcaggaagcagtgactttgaagcaaggaacaaatgccaggtgtcccacggccgtccgttggcgctggccttcgtggagctcacggtggtccagaggttccacgagcacgtgcaccagccttccgtgccgccctcgctgcgggccgtgctggggcggctcagtgctctgtacgccctgtggtccctgagccgccacgcggccctgctctaccgaggaggatacttctccggtgagcaggcgggagaagtgttggagagcgccgtcctggctttgtgttcccagctgaaagacgatgcagttgccctggtagacgtgatcgctcctcctgactttgttctggactcaccgattggcagagccgacggcgagctctacaaaaacctctggggcgctgtcctgcaggaaagcaaggtgttggagcgggcatcctggtggccagagttttctgtgaacaaacctgtcataggaagtctgaaatcgaagctctagtgggactggcacacattcagccaagtctaatgaaacgaagggaactaatcagacgtggacctcaacttctgattccagaacacgccggagattgctgctgctttctgagcccgcacctgtgcgcctaaactgctgattggcctcaactgcccaggcggacgggagggaggcacccggccggctggactaatctgggatcgcggtgatttgcagcgtggaaaagaaatgcagatgatcatgtctacct

SEQ ID NO: 10154 - protein, 700 aa, Homo sapiens; identical to SEQ ID NO: 10138

SEQ ID NO: 10155 - DNA, 1939 bp, Homo sapiens
gacgagaccaagctgttgctgaggacgacagccctgctctggtcactccggaggctgaccagtctacacacggctgaagcttgaagaaacaacaagcccggctctagtcacgcactggcagctgaatagtctacgcatggccgaagcttgaggacttgtcaagcaaatgtcctcaatggaaccataacgtttttgcctttggaagaagatgatgaggggaacctaaaggttaagatgagcaatgtgtatcaaattcagctcagtcatagcaaagaagaatggttcatatctgttttaattttctgtccagaaagatggcattcagatggaatcgtgtatcccaaacccacgtggcttggagaagagttgctggccaagttggccaagtggtctgtagagaacaagaagagtgactttaaaagcaccctttccctcatctccattatgaagtatagcaaggcttaccaggaacttaaagagaagtataaggaaatggttaaggtgtggcctgaagtcactgatcctgagaagttcgtgtatgaagatgtggctatcgcagcatacctgctgattctatgggaagaagaaagggctgagaggagactaactgccaggcagtcctttgtggacctgggatgtggaaatggcctcctggtccacatcctgagcagtgaggggcatccaggcagagggattgatgtccgaagaagaaaaatctgggacatgtatggaccacaaactcagttagaggaagatgcaatcacacccaatgataagacccttttccctgatgttgattggttaatcggtaaccattctgatgaactcacaccatggatacctgtcattgcagccaggtcttcctacaattgccgcttctttgtcctcccctgctgcttctttgacttcattggaagatactcccggaggcagagtaagaagactcagtaccgggaataccttgacttcattaaagaagtgggcttcacctgtgggtttcacgtggacgaagactgcctcaggattccttcaaccaaaagagtctgtctcgttggaaaatccagaacatacccttcctccagagaagcttccgtggatgaaaagaggactcagtacattaagagcaggcggggctgccctgtaagcccacctggctgggagctttccccttctccacgctgggttgctgctggcagtgctggtcactgtgacggtcagcaagctctggacgccagggtcgggtgtgtaaccagggcctgggccgctgagcatggagcagggccccaggctgaaggaccctggctacctggatttcatcccagagaaaaggctgagcgtgtgaggaactgtgccgccctgccacgagattttattgaccaagtggttttgcaagtagcgaatttactgttaggtggaaagcaattaaacacaagaagttctcgaaatgggagtttgaagacctggaatgggggaggtaagctgtccaccatcttagggaggggctagcacgctcccaggcttgagggcaggaattcacgtcttcagaaccgacatgaaatggtgtggccctgtgactacacactttgaaaaagccattgatggtgggtgcataggctctcttcaagcaaattctttaaaattttccaaatagctcttataaacataaaggactttgttatttccagggagtgacagagtttggacccttaattaacttttaccaaacatgcaggtttaggggctagaactactcattttcaatctagaaattatccaaagagaaaacaggttactgagtgcaagcaaaatgcactgtccccttgagtatgtggtaagatttggagctgttgtgattcgataatttaattctctttgaaatccccaaaacacaacaatcatccatggcaaaaggagaaaattacatcgattgttctcatgg

SEQ ID NO: 10156 - protein, 423 aa, Homo sapiens
MSNVYQIQLSHSKEEWFISVLIFCPERWHSDGIVYPKPTWLGEELLAKLAKWSVENKKSDFKSTLSLISIMKYSKAYQELKEKYKEMVKVWPEVTDPEKFVYEDVAIAAYLLILWEEERAERRLTARQSFVDLGCGNGLLVHILSSEGHPGRGIDVRRRKIWDMYGPQTQLEEDAITPNDKTLFPDVDWLIGNHSDELTPWIPVIAARSSYNCRFFVLPCCFFDFIGRYSRRQSKKTQYREYLDFIKEVGFTCGFHVDEDCLRIPSTKRVCLVGKSRTYPSSREASVDEKRTQYIKSRRGCPVSPPGWELSPSPRWVAAGSAGHCDGQQALDARVGCVTRAWAAEHGAGPQAEGPWLPGFHPREKAERVRNCAALPRDFIDQVVLQVANLLLGGKQLNTRSSRNGSLKTWNGGGKLSTILGRG

SEQ ID NO: 10157 - DNA, 657 bp, Homo sapiens
ggagcgccgccctgccctgcgcggaggcccgcggccccgggactagcgcaggctcggagcagaaggagcggggtccgggacccggccagggttcccccggagggggcccgggtcccaggtcgctatcaggacccgagcagggcacggcatgttgcgaacttgaggaggcccagggccagtgccagcaagaggaggcacagagggaagccgcctcagtgcccctgagggactccgggcaccccggccatgctgaaggaagggagggcgacttccccgccgcagatctggattcgctttgggaggatttctcccaaagtctcgcccgtggcaattcggagttgctggccttcctcaccagctccggggcgggatcgcagccagaggcgcagcgtgagctcgacgtggttctcagaaccgtcatcccgaaaactagcccacattgcccccttacaactcccaggagggaaatagtcgtgcaagaaagatggcattcagatggaatcgtgtatcccaaacccacgtggcttggagaagagttgctggccaagttggccaagtggtctgtagagaacaagaagagtgactttaaaagcaccctttccctcatctccattatgaagtatagcaaggcttaccaggaacttaaagagaagtata

SEQ ID NO: 10158 - protein, 74 aa, Homo sapiens
MLKEGRATSPPQIWIRFGRISPKVSPVAIRSCWPSSPAPGRDRSQRRSVSSTWFSEPSSRKLAHIAPLQLPGGK

SEQ ID NO: 10159 - DNA, 664 bp, Homo sapiens
ggatcacttgagcccgggagtttgagaccagcctgggcaacatagtgaaaccccatctctgcaaaaaaaagaaaaacaaataagagaagcttcagttctggctcggacggccagtcatgtatacacagacaacagtatggaacagtgtggtgtgtggtactgggttttgcccttattttctggatgttcagctgatgcagtgaaagcactcttgggctgagagcggcacctgcccaggtagcacggtcagtaggggtgggtgtcttgtgcctggaacttcctgccagcaacttatacccctcctggtgcgctggacacatcaggatgggtatgagttgctggcaggaagctcttctcttgcccttcgtcctgctggcagtgcctgcagaactttaatgtgttcttgctaacttattatgaagtactaaggttaacctttgatttctaaaattaattttttcagcatccaggcagagggattgatgtccgaagaagaaaaatctgggacatgtatggaccacaaactcagttagaggtaccgtctttattacgcatgcccttgatctcagcatggcttagctcccagtgggaattgctgtaatgaatgtgtctctttgtataggtcaagcagacatgctgatagtaaaccttcacattaatctaa

SEQ ID NO: 10160 - protein, 30 aa, Homo sapiens
MYGPQTQLEVPSLLRMPLISAWLSSQWELL

SEQ ID NO: 10161 - DNA, 1851 bp, Homo sapiens; identical to SEQ ID NO: 895

SEQ ID NO: 10162 - protein, 365 aa, Homo sapiens; identical to SEQ ID NO: 896

SEQ ID NO: 10163 - DNA, 5096 bp, Homo sapiens
aagctcttagaggcgtaggcaaatatgtgcaggccatcagtacagtactgtgcagtacagcagcaagaaaatcagcttggtaccaccagactgggctgcaggttccagctgttgctgctagcaggaagtggctaagctggccatcgtatcacaggcatccaggcagagggattgatgtccgaagaagaaaaatctgggacatgtatggaccacaaactcagttagaggaagatgcaatcacacccaatgataagacccttttccctgatgttgattggttaatcggtaaccattctgatgaactcacaccatggatacctgtcattgcagccaggtcttcctacaattgccgcttctttgtcctcccctgctgcttctttgacttcattggaagatactcccggaggcagagtaagaagactcagtaccgggaataccttgacttcattaaagaagtgggcttcacctgtgggtttcacgtggacgaagactgcctcaggattccttcaaccaaaagagtctgtctcgttggaaaatccagaacatacccttcctccagagaagcttccgtggatgaaaagaggactcagtacattaagagcaggcggggctgccctgtaagcccacctggctgggagctttccccttctccacgctgggttgctgctggcagtgctggtcactgtgacggtcagcaagctctggacgccagggtcgggtgtgtaaccagggcctgggccgctgagcatggagcagggccccaggctgaaggaccctggctacctggatttcatcccagagaaaaggctgagcgtgtgaggaactgtgccgccctgccacgagattttattgaccaagtggttttgcaagtagcgaatttactgttaggtggaaagcaattaaacacaagaagttctcgaaatgggagtttgaagacctggaatgggggagagagcctatctctggcagaagtagccaacgagctggacacggagaccctgcggaggctgaagcgggagtgtgggggcctgcagacgctgctccggaacagccaccaggtgttccaagttgtgaatgggagagttcacatccgcgactggcgagaggagacactgtggaagacaaagcaaccggaagcgaaacagagactgctctctgaagcctgcaaaacccgcctctgctggttcttcatgcatcaccctgatggctgcgctctgtccacggactgctgcccgtttgcccatgggcctgcggagctgcggccaccccggaccaccccgaggaagaagatttcatgagctgcatccttgccagccgaggcctggttggggaggccaaaccaaggagagcttccccagcagtcgtcagtgctgtggtctctgctctggctgtgtttcagcccacctcctcccagctttctccacatcctcacagtgatgaaccgtatttcataaacatcacacgccagagaagccacagttactcggaagcccccagctgactgcctggcttgtttcagatgcagccgcttgaaacgtgcgcagcatcttcatatcataaagattgtgcacggatccttacaatgtctcctgggggagagcggctgaggctgccttgcacaggcccttcccagggcgctgtccgacgcctgccccaccatgtccacatctgtgaagaggatggggctcctcgagaagtaagaccgtatctgccagcgtttctcaccacactggagagcagctgctctggagcagggatccaccagattggtatttttaaaaaaggtgtcaggcttgctatgttgaggttgtttttagagttacagagaataaaaacactcataatttcctgacatgggccactctaagtggcatgaaaaaaaaatcctaagtgaattgttgacagggctttaaaaatgtaaatatcacagatgacaaaggtaagacctacaccttcctccctcctccatgagaccctctccccagaaatactgcagcagtcctttttagtccttccagaaaaaaaaatcctgatttgtttctcttttatttttatgaagtgatagggtcttgatctctcgcccaggctggagtgcagtggcaagatcatagctcactgcagctttgaactcctgggctcaagccatccttctgcctcagcctgtcaagtgactgggactgtagatgcacgccaccatgcctggccaacttttaaaattttagaggcggggtctcgctatgttgcccaggctggccttgaactcttgggttcatgcagtcctcccacctcagcctcccaaagtgctggcatgacagctgcgagccatggcgtctgacccccgatgtttctatttaaagttatttctatggttttatacaaaaggtcacatgcagtccacactgttctgccgttgactttctgcagtgtaccctggtgcctctccattgggtatatctgcctgattattggcagcagccgtgtggcattccgtggcagcgccgcactcatcacacctgagcagtgagaataaatgggcatcttctctgaaggcacctcagctctgcagcaccacggggcggcgctgccacgggcccagaccctgccctctgagttccaagtcagtcccagagcgcagatcccaggctgaggatgtgccaggaggtgcctggccctggaagtgtccacccttcatcttactgggagactggcgctccgtggccctttggggcaggccccagtttgtcgagcagctgcagctctgactagtgaggcacaagggagctctgctgaggcctctggggtccccacgctgggaagttctccctgcaggggacacctggtgtagaagccccgagggagcagccaggagcccagcactgagggtggtggagcaggtagatggaaagaactctcttcccaaagacaagccgcagagccgcatcccttccccagcccctgtgttaggccgtgaggcatcttcctgccaggctgcaccagggctttcaggttttgttgctcagcacatccagggtcatgcacttcaggacaagccacctgatgcccctcggccccccagtcctgcagcctcgctggagctctccctgcagcaggaagggctgaggccaaccacaaaggggcttggggcgacatcaagggatggcagagcgagagggaagtgcagggagcctggcccagaagaccagccctgccgccgcctcctggaaggggcacacctcctgagctaagcccaggatgccgcccaagcctcggggcctcccaaggtgtcccccatgccagagtgtgtggcctctgccaggcccaggatggctccaggtggttggactcccatttcctctccccttcccaggtctttcccaagcccagagcccctgctttagttttccagtgtggggagacaggagagtggccacagagcctggttctgcgcttggtgctgctggactccaaacctggctctggagctgcagtcctggtgagggcggtggccctggggaagatgagctccccaacacttgttacggcagtttccagtcacaagccgcaaggacacagtctcaaaggagcatcagatggggttgggggcatgtggggtggccctggctctcccaggtggggtcctgccaggccaagagctatgctaagtggggcccaccatggccataggcccctccgtgtcacctggcataatcagctggtagaaacagcccttggggactacatcacctgacctgatctccaggttccaggtaccatttcttactgccccccagcagcactgtgcccctgtccacaggtcatgtgactgggtgtcgggcacggttcccttgcagcaatgaacagtacatctgtggatgaaggtgggcagatagaggtttggcggggggtggagcggggcactgatcatggcagcctgctgtggccagccccaagggcttcccggtgacttctcagagcctgaatgtctcccctggacaggtgggatcgagggaatgccatgaaggtgggcatgagggggaatctcgccaggggtacagtgcgtctacactgcttttcagactagtgccacgcaggcactaggtctcactggctgaggggcagcctctgtccccaggcgccgcgacttgccccatctgctgcagaggaggcccacctgtggtgagcattgtggtcttggggcctgcaggcgcccttgtggagttaccatggtgaccgcagccccttggactggtgctggggattcagacaccaggtcacgtaggccttggctcgtggcatggccaagccctggggtctgtcggggttggcagggcaggcttcctggaggaggggctgaggccgcgtattctccctctcatcctgccatccgctgcggctactctccagggccacaactgtcacagaacgaggaacccgggccttgtgcagaagagccttgtgtaggtggattgagaagagagtcccagaggagaagctgagccctctgctgacttgcccccagctcatttctgcttgacctttccttgttgccgtttttgcttggaaactatattgtggacctcatcattctgggaaaaggtggttcacgagaaagcacagtcatgtgtcaattaacagtgcagatgcattctgagaaatgcgttgttaggtgatttcatcatcctgcaacatcagagtgtgccccgcgctcatggatgagacagcctgccccacacccaggctgtgggggacgggatggcctgttgcttctggaccagacgcctgcacagcacattaactgtgctgaatgctgtaggcagttgtaacgcaatgaccctgtattcagtggatcagctggcaccacccaaatagataaattggcccatctggtcttgtggcccccacccaggaatggactcagctcaagaggacagcttcagctccctaagattttatcttggacccgaccaatcagcactcccgacttactggccctctactcaccaagttatccttaaaaacctcaatccctgagttttcagagagactgatttgaataataataaaactccggtcttccacacggccgactctgcatg

SEQ ID NO: 10164 - protein, 365 aa, Homo sapiens; identical to SEQ ID NO: 896

SEQ ID NO: 10165 - DNA, 541 bp, Homo sapiens
cggtgtggtgtgggttaggtgagatggaatcgtccttcgtgctggagtgcataacgcgtgtgagtgtatggaactgaaatggactgtttctgcctgtgtgacaggttcgtaatattttgctgttgttttggggaaaaaaaaaacccgtttttccacagagagcctatctctggcagaagtagccaacgagctggacacggagaccctgcggaggctgaagcgggagtgtgggggcctgcagacgctgctccggaacagccaccaggtgttccaagaccctgtattcagtggatcagctggcaccacccaaatagataaattggcccatctggtcttgtggcccccacccaggaatggactcagctcaagaggacagcttcagctccctaagattttatcttggacccgaccaatcagcactcccgacttactggccctctactcaccaagttatccttaaaaacctcaatccctgagttttcagagagactgatttgaataataataaaactccggtcttccacacggccgactctgcatg

SEQ ID NO: 10166 - protein, 79 aa, Homo sapiens
MDCFCLCDRFVIFCCCFGEKKNPFFHREPISGRSSQRAGHGDPAEAEAGVWGPADAAPEQPPGVPRPCIQWISWHHPNR

SEQ ID NO: 10167 - DNA, 1069 bp, Homo sapiens
ctgcactcatggcagagcaggcctttcctccttgaacatgtagacaagtctcagagaggtcagtgcgccggcccgatgtctcccagtgagtggagaggccacgccacagtccgggccaggtctgacccagcactggcacccctgagcctatggcatcatccgaggactgtaatcctcaacccgttcctcagagcaacttggtgaaagggagtgtctgtctgctgtcagaagcagtggtggagatggcggctcctgtgctgaggtagagtcccaggggatgcgcacgttgtgaatgggagagttcacatccgcgactggcgagaggagacactgtggaagacaaagcaaccggaagcgaaacagagactgctctctgaagcctgcaaaacccgcctctgctggttcttcatgcatcaccctgatggctgcgctctgtccacggactgctgcccgtttgcccatgggcctgcggagctgcggccaccccggaccaccccgaggaagaagatttcatgagctgcatccttgccagccgaggcctggttggggaggccaaaccaaggagagcttccccagcagtcgtcagtgctgtggtctctgctctggctgtgtttcagcccacctcctcccagctttctccacatcctcacagtgatgaaccgtatttcataaacatcacacgccagagaagccacagttactcggaagcccccagctgactgcctggcttgtttcagatgcagccgcttgaaacgtgcgcagcatcttcatatcataaagattgtgcacggatccttacaatgtctcctgggggagagcggctgaggctgccttgcacaggcccttcccagggcgctgtccgacgcctgccccaccatgtccacatctgtgaagaggatggggctcctcgagaagtaagaccgtatctgccagcgtttctcaccacactggagagcagctgctctggagcagggatccaccagattggtatttttaaaaaaggtgtcaggcttgctatgttgaggttgtttttagagttacagagaataaaaacactcataatttcctg

SEQ ID NO: 10168 - protein, 120 aa, Homo sapiens
MGEFTSATGERRHCGRQSNRKRNRDCSLKPAKPASAGSSCITLMAALCPRTAARLPMGLRSCGHPGPPRGRRFHELHPCQPRPGWGGQTKESFPSSRQCCGLCSGCVSAHLLPAFSTSSQ

SEQ ID NO: 10169 - DNA, 4314 bp, Homo sapiens
ctgcactcatggcagagcaggcctttcctccttgaacatgtagacaagtctcagagaggtcagtgcgccggcccgatgtctcccagtgagtggagaggccacgccacagtccgggccaggtctgacccagcactggcacccctgagcctatggcatcatccgaggactgtaatcctcaacccgttcctcagagcaacttggtgaaagggagtgtctgtctgctgtcagaagcagtggtggagatggcggctcctgtgctgaggtagagtcccaggggatgcgcacgttgtgaatgggagagttcacatccgcgactggcgagaggagacactgtggaagacaaagcaaccggaagcgaaacagagactgctctctgaagcctgcaaaacccgcctctgctggttcttcatgcatcaccctgatggctgcgctctgtccacggactgctgcccgtttgcccatgggcctgcggagctgcggccaccccggaccaccccgaggaagaagatttcatgagctgcatccttgccagccgaggcctggttggggaggccaaaccaaggagagcttccccagcagtcgtcagtgctgtggtctctgctctggctgtgtttcagcccacctcctcccagctttctccacatcctcacagtgatgaaccgtatttcataaacatcacacgccagagaagccacagttactcggaagcccccagctgactgcctggcttgtttcagatgcagccgcttgaaacgtgcgcagcatcttcatatcataaagattgtgcacggatccttacaatgtctcctgggggagagcggctgaggctgccttgcacaggcccttcccagggcgctgtccgacgcctgccccaccatgtccacatctgtgaagaggatggggctcctcgagaagtaagaccgtatctgccagcgtttctcaccacactggagagcagctgctctggagcagggatccaccagattggtatttttaaaaaaggtgtcaggcttgctatgttgaggttgtttttagagttacagagaataaaaacactcataatttcctgacatgggccactctaagtggcatgaaaaaaaaatcctaagtgaattgttgacagggctttaaaaatgtaaatatcacagatgacaaaggtaagacctacaccttcctccctcctccatgagaccctctccccagaaatactgcagcagtcctttttagtccttccagaaaaaaaaatcctgatttgtttctcttttatttttatgaagtgatagggtcttgatctctcgcccaggctggagtgcagtggcaagatcatagctcactgcagctttgaactcctgggctcaagccatccttctgcctcagcctgtcaagtgactgggactgtagatgcacgccaccatgcctggccaacttttaaaattttagaggcggggtctcgctatgttgcccaggctggccttgaactcttgggttcatgcagtcctcccacctcagcctcccaaagtgctggcatgacagctgcgagccatggcgtctgacccccgatgtttctatttaaagttatttctatggttttatacaaaaggtcacatgcagtccacactgttctgccgttgactttctgcagtgtaccctggtgcctctccattgggtatatctgcctgattattggcagcagccgtgtggcattccgtggcagcgccgcactcatcacacctgagcagtgagaataaatgggcatcttctctgaaggcacctcagctctgcagcaccacggggcggcgctgccacgggcccagaccctgccctctgagttccaagtcagtcccagagcgcagatcccaggctgaggatgtgccaggaggtgcctggccctggaagtgtccacccttcatcttactgggagactggcgctccgtggccctttggggcaggccccagtttgtcgagcagctgcagctctgactagtgaggcacaagggagctctgctgaggcctctggggtccccacgctgggaagttctccctgcaggggacacctggtgtagaagccccgagggagcagccaggagcccagcactgagggtggtggagcaggtagatggaaagaactctcttcccaaagacaagccgcagagccgcatcccttccccagcccctgtgttaggccgtgaggcatcttcctgccaggctgcaccagggctttcaggttttgttgctcagcacatccagggtcatgcacttcaggacaagccacctgatgcccctcggccccccagtcctgcagcctcgctggagctctccctgcagcaggaagggctgaggccaaccacaaaggggcttggggcgacatcaagggatggcagagcgagagggaagtgcagggagcctggcccagaagaccagccctgccgccgcctcctggaaggggcacacctcctgagctaagcccaggatgccgcccaagcctcggggcctcccaaggtgtcccccatgccagagtgtgtggcctctgccaggcccaggatggctccaggtggttggactcccatttcctctccccttcccaggtctttcccaagcccagagcccctgctttagttttccagtgtggggagacaggagagtggccacagagcctggttctgcgcttggtgctgctggactccaaacctggctctggagctgcagtcctggtgagggcggtggccctggggaagatgagctccccaacacttgttacggcagtttccagtcacaagccgcaaggacacagtctcaaaggagcatcagatggggttgggggcatgtggggtggccctggctctcccaggtggggtcctgccaggccaagagctatgctaagtggggcccaccatggccataggcccctccgtgtcacctggcataatcagctggtagaaacagcccttggggactacatcacctgacctgatctccaggttccaggtaccatttcttactgccccccagcagcactgtgcccctgtccacaggtcatgtgactgggtgtcgggcacggttcccttgcagcaatgaacagtacatctgtggatgaaggtgggcagatagaggtttggcggggggtggagcggggcactgatcatggcagcctgctgtggccagccccaagggcttcccggtgacttctcagagcctgaatgtctcccctggacaggtgggatcgagggaatgccatgaaggtgggcatgagggggaatctcgccaggggtacagtgcgtctacactgcttttcagactagtgccacgcaggcactaggtctcactggctgaggggcagcctctgtccccaggcgccgcgacttgccccatctgctgcagaggaggcccacctgtggtgagcattgtggtcttggggcctgcaggcgcccttgtggagttaccatggtgaccgcagccccttggactggtgctggggattcagacaccaggtcacgtaggccttggctcgtggcatggccaagccctggggtctgtcggggttggcagggcaggcttcctggaggaggggctgaggccgcgtattctccctctcatcctgccatccgctgcggctactctccagggccacaactgtcacagaacgaggaacccgggccttgtgcagaagagccttgtgtaggtggattgagaagagagtcccagaggagaagctgagccctctgctgacttgcccccagctcatttctgcttgacctttccttgttgccgtttttgcttggaaactatattgtggacctcatcattctgggaaaaggtggttcacgagaaagcacagtcatgtgtcaattaacagtgcagatgcattctgagaaatgcgttgttaggtgatttcatcatcctgcaacatcagagtgtgccccgcgctcatggatgagacagcctgccccacacccaggctgtgggggacgggatggcctgttgcttctggaccagacgcctgcacagcacattaactgtgctgaatgctgtaggcagttgtaacgcaatgaccctgtattcagtggatcagctggcaccacccaaatagataaattggcccatctggtcttgtggcccccacccaggaatggactcagctcaagaggacagcttcagctccctaagattttatcttggacccgaccaatcagcactcccgacttactggccctctactcaccaagttatccttaaaaacctcaatccctgagttttcagagagactgatttgaataataataaaactccggtcttccacacggccgactctgcatg

SEQ ID NO: 10170 - protein, 38 aa, Homo sapiens
MACCFWTRRLHSTLTVLNAVGSCNAMTLYSVDQLAPPK

SEQ ID NO: 10171 - DNA, 3204 bp, Homo sapiens
aagtgagaaatgctgcttggtgagctgggctggctgggctgctggccctcggtcagccgcctgcaacaggcagggccacgggaacctcatcagcagagcttcctggaggcagcgtgggtggaattgtggaattgtcatcagacaggcctgggatggagcttccccactggaacgcagctggctgtggacagggagtcagctgctgcctgaagggacaaggaggcctgcgaccacagcaggttcccacctggcctgggcctggaggccagcaggcacctttcagggcttcccagctcagcccccacagctggatggagctgtgttccctgcagaagtgtggccggctccgagcaggcacagggggctctttccctccacctcagccctggcctatgtgggcacagcagaggacgtgctcacaccatgggggcccccgaccaggcgaggccagggcgtgtccacattggggaagtgaacgaagaaggacaagtctatttgaggggctggctgatagtttagaagcccagaatcgcctggcagtgaattattctgctgagtaacactgtacccagagggatgtggctgaaaaccccgggagggaaggctgcgtgcgggaagcactcccatcctcccccagcgcctgctctgggcgttccggagctcagcgtgcatccttgcctatgctcacctgtgaagagggagaacgtcgctgtccgagcaaatgtctcttctgtgtccttggctgccttcctcctcctcctcccgccgcctactttggggccccttcctcttctcagcagtgccactgaccagcccagcctcatgcaccatcccggccgttgccctggagggctggcagctggcaggactcagagagggcccagccatcacccctctcttgagcagatgacagagtaacactgggagttactatggacactggaaaagagaacacagatgcgtcggagattttgtagttgcaactcttctctggtaaccaaaaaacatcaggacattcattgcaagtgcaacgctgaggctttgaaggaaccaaagagatcctttgcagccctgaggacggagggagggagggaaaagggagtggggtgggagggagggagggagtccactgcagaaagtggcactgatccctctgagcctctccggcctcatgtgtaagatgccagctgccccggagtggcagtggcgagtgagtggctgtgtaaggtgcccaggcaggagcttgcgggcagccctgtgtgaagtgggcagccttgggccgggttccctagaagcagagctgagatggggattcttgttcatgcgattggaggtgcttcctaagaagttgctccctgccccaactccgagccagggcagcactgaccatgggcaactttcccttgcagggggcactcccagctgccggggaggggcagtggccctgaaggggcctggtcaggaccaacagttttcttggcagtggtgtgtttgtccccatttcgcagatgaggaaactgaggcttggaaagacccaggtccttgcccaggccccacaccacacccaggaggggcggcgctggagtcctgcgccacgtcgctgttctcaccaggaggaggcccttgtttgctgcgtccagcgaccccatctccatgctgcaggcaggaggacacagccggggctcctggaagcctctcgcgttcctgggctagggaaccttcctccatctcagagccggccatggggtgtcccctgaccttccgcagccatgtcccccttcgatggagctctgcttctggccctccctccacactgaaggcccctgtgatcacatggcccacccgccaatccaggtggcctccctccaaggtcagccggtgagctgccttcatgcctgcatggtgtctctgacccttggccacgcaacctaacatagtcacaggtcctggagatttgcactgggatatcttgggtgaggggaattattctgctgacccccgatggcaactgcagtggtgggaggggaagagaacaccaggatgtgttcagagagagaggcgtggacctcagggggtgtcaggggaagagggcccgggagggagaaagcatttggtttagacgtgttgggtgtgaggtgcccatggaatagcagggtggagctggtgggggaagctggggggctgccctggggctctagcacatggaggccaaggagggagtcgtggggtggagggggcacagggctccccaaggtcctgggtctgcctcagggccgctgctactccacacccctcctcccatgcctgagcacccatggcagtgaccagcagtgaccatcatcacccaatgaggatggagagaaactgaggctggcctgagatgtcctgaggaatgagctggcaccagagtcccacaggtgaaggctgatgaaattctaggagagtccatgtcctaaaggataagaagcaactattcgttgagatgagagacttcaaagatagtcaatgatcgtgaaagtcggccagcctttctggaccatctcgtgcaattgctctaatctatccctgcaatagatccctttaatacactttgtcatatgttgaattttctttttagtttttagttttcttttgttgttgttgttgttttcccattttttaaaattattattattgtggagacagagtctcactctgtcacccaggctggagtgcgggggtgcgatctcggttcactgcaccctctgcctcccaggttcaagcaattctcctgcctcagcctcctgagtagctggggctacaggcacccgccattatgtctggctaatttttgtatttttagtagagacagggtttcaccatgttggccaggctcgtctcaaactcctgacctcaagtgatccgcccacctcggcctcccaaagtgttgggattacaggcgtgagccaccacacccaggcccattgtttttaattatcaacgttatttttgttattctatgtatttcatctttgcatgatttccagtatgggaggtataaattgtgtaaagacgttgagagttctaatttgttgtatgcattttttacaaatgtgactctgtgaaaatgattatcacaacattgactttatgtgtaagcgttgtgtgtgtgcgtacataaaatcgtcgaaacttcctcaataaatgaagagatgtcctttttgt

SEQ ID NO: 10172 - protein, 236 aa, Homo sapiens
MCKMPAAPEWQWRVSGCVRCPGRSLRAALCEVGSLGPGSLEAELRWGFLFMRLEVLPKKLLPAPTPSQGSTDHGQLSLAGGTPSCRGGAVALKGPGQDQQFSWQWCVCPHFADEETEAWKDPGPCPGPTPHPGGAALESCATSLFSPGGGPCLLRPATPSPCCRQEDTAGAPGSLSRSWAREPSSISEPAMGCPLTFRSHVPLRWSSASGPPSTLKAPVITWPTRQSRWPPSKVSR

SEQ ID NO: 10173 - DNA, 2228 bp, Homo sapiens
attgcttgaggcttgctcttgggaatggtagctccctggaacttctgtccagcctgcatatctggactgtgcaggggatacttctatggccagaaaaagcccttgggcagagagaagcaggttcttgatgctgagatgtctgcgtgcttgggagttgaccactgcagctgcaggagctgcctggcaatggtagcaggtgaaggtcatggtgaagaagatgcagatattggcaatttggagcattagatgaactaattacaacgttaacctaaggaacagtgcaacagaaaatgggctaagacatggagcaaggggcagaacgactcttgaagatgctgagcaacttctgagaacattaactgaatacgtcagagactctgatcatgtcagagaccgaagcagagaaacagagaacactcatcttccttctcaacctggctctggatgccaactggcaacgctgtgaaccagtttgggcttggagggctcagaggaagccacttttggaaggcattggaagctggtttttcagagcctactctttgctacccctttctatgttgaaaataaaaatgtaaagcctaattcatagtcacaacaacaatgacaccaggaataaatcacagaccagagtccaaacatctggtcacgttgctcatctaccatctggtgggtctcctctcagctctgtgttctgactgccagtcatctcccttcttctctgtcttcactggcactattctaggtttatagttttgaaataggttcctaactggttgctctgcctccagactcttatactgtatacaggtccagtgacaaaacgatggtttgttttacagtccacagatacattttacttatttttttaatgtccataacactctttggaataagatttaaaaattgaaaaatcagatgattttatgtaaaaatccatatttcctgtttatgctaaaaaattgaatgatctgacctcactggtccacaccgagcaacaactgggtaaatcttgccattttggttttttttttttttttttttttttagctcaggcatcggatttttgtccagttcatcacaatctctcctctttactattgttttaaacccttcttttttgttacctgcctgagcctgggaggtatttgaacttaaagacattacttcaatgctttatacagactcatttctctgaaacacgaatttgatcatgtcactctcatgtttaaaaaccttcgccagcctgcttgcctggtggataaagttcaaacacttgaccctagcatagaagggcctccataacctaatcttttatctctgtggctcttcctagctcacactctgcccagaagccatgctgaaaggcggtgctctgttgtacccctctgtcctctgcctgctctaatgtcctatttttagctgaatatcttttcttcaatttttcatctggtaaatgtcttctccttagtatcagctcatactttaaaaaagtccttctcgaacttttgtgctttcattacctgcttcttcttcactttctgaggaccttggaccctcctctattgcaatggtattgccaagccaattctttctccttcttcagactgtacaacccttagggctctgagccatctttgcctttgggaatttattgcagagtaggtgaatggtgttcactgaataaatgtttcagattggaaaatttgatctttcatttccttacctataggatggaaccgtaataccttctgttcacatacaggagaatcattgtggggatcaaatgacacaatgtcttttgtaaaaatgttaacaaagcacttggaaactgcaaagtaatatatgagtagatggaattaatatagaaaatgttatgttctcaacttgcttaaaataatttaactgtgttatttctagcaagaacagtgatcttgaaggcagggctatagttcttgtttatagttccaattttattgccaattagttggatgacttagggaaagtaattttgcctatctagacctcagtttccacagctgagctctggaaattttaaggtatttgttatgtctttcatgtttttctccagtcttcctagaagtaaaacatttttcttgttttcaaagactttcattcttccacatttggtatggtatattaaccgtaatacaataatgaatatgcagccattcgttttttcattaaatatgcaaatcattgagaat

SEQ ID NO: 10174 - protein, 73 aa, Homo sapiens
MVAPWNFCPACISGLCRGYFYGQKKPLGREKQVLDAEMSACLGVDHCSCRSCLAMVAGEGHGEEDADIGNLEH

SEQ ID NO: 10175 - DNA, 1067 bp, Homo sapiens
accaatcagagctcttgactcactggcttccccctacccaccaagttgtccttaaaaactttgatccccgaatgcttggggaaaccaatctgagtaataataaaactcaagtcacctgcacagctggctctgtgtgaattactctctctattgcaattcccctgtcttgataaaatggctctatctaggcagctggcaaggtgaatccattgggtggttacaatacctcccttagtagactaaagaacaacttggataaaaccagcaagaaatggattatatcgagggaaattgtcatgcccatccaagaccatgataaggaatgaggaagtaacataatggaaggattctgtctcttctcattgggactgactctaagcacctctgattagatgtcattctatgtctgggatgatctcaggactatggtattgtcctcttgtgctatcaattttaactcacaaatggatgtcgatgtcatttattctcttattctacagaccttcattggctacatgggtagtatgggcaagagataggtggtcctgacggaggagtgggaagagccagtgctctggagtgggattactttctggctgcctgctcaggaaagttgtttcaccattctcaacctcagtttccacatctgtaatatatggaaattaatttctacctcataggattgttgtaagtattaaatgagatattattgtaatgcttaattaaatgagataatatatttaaaaatataattcccctagatataatacatatgtatacataatatatacatataatacatatgtatacataacatatacgtataatacgtatgtatacataatctatgcatataatacatatgtatacataatctgtgcgtatataatacatatgtatacataatctgtgcgtatataatacatatgtatacataagctgtgcatatataatacatatgtatacataagctgtgcgtatataatacatatgtatacataagctgtgcgtatagaatacatatgtatacataagtgtgcgtatataatacatatgtatacataagc

SEQ ID NO: 10176 - protein, 48 aa, Homo sapiens
MSGMISGLWYCPLVLSILTHKWMSMSFILLFYRPSLATWVVWARDRWS

SEQ ID NO: 10177 - DNA, 1935 bp, Homo sapiens
tttctgtgaattaattctgggtattactatttttttgagacagtcttgctcttacccaggctgaagtacagtggcatgaacatggctcactgcagcctcgatttcctgggctcaagcaatcttcccaccttggcctctcgaggagctgagactacaggcacgtgctgccacacccagatattttttaaagttttttgtagagacaggtcttgctatgttgcccgggctggtctcaaactcctggactcaagcagtcctcctgccttgtcttcccaaagtgctggtattacaggcgtgagccattgcacctggcctgttctgggtattttgtataaatggaatcagtatgtgaccttttgtatctggctgcttctacctagctttatgttttccatgttcttccccattgcatcatgtatcagtactttctttctttttgtggcataatattccattatatgtatccactgcaattttgtttactgatctgttgatagacatttgggctgtttccaccttttggctgttgtgagcattgccgctgtgaacattcatgtataagtgtttgtgtatctgttttcaatgattttggatatatacctaggagcaggattgttcgaccatatggtaatttttgtgtttatcttttttttttttttgagatggagtcttgctctgttgcccaggctggagtgcagtggtgcgatctcagcacactgtaacctctacctcccaggttcatgtgattctcctgcctcagcctcccgagtagctaggactacaggtgtccaccaccacacctggctattttttttttttttttttgtatttttagtagagatggaagagacagagtttcaccatgttggccaggcaggtttcaaactccagacctcaagtgatccacctgcctcggcctcccaaagtgcttagaattacagctgtgagccactgcgcctggcctctatgtttaacttttgagaagtctcttgattcttgccactacgaggtgattttatccaactattacaggaaagaaaatgggagctcagaaggttggactgcttgttcaaagtcacctagctagagagctgcgcagctggaactagtatacaagtctagctgttgaaagcaccctgagcacattacctcatgctgtaccttgcatgtcttgttgttttcaattttcagatgaagaaacactctcctcaaactaattgattattgaggtgtgtttcttttccttccctggtgatgtgcaaagagaatgaaaagggaaaaggggccaggaaggagatgttttttctccttcattcattcaacagctaatcttgagtaccaactgtgtacaaggcactaacctagatgcctgggacacataaagaacaagtagacaaagactcctacccttaatcattgagttttattctagatgggggagagggtgacagataataaacaatagaattcataatatgaattcattggagagtacgagaaaggtgaactgtggggggaagagagcaaggtaagggggtgaaggagtgttggggagattgggattgcaatttcagaaatggtagtgttatgaactgaatgtgggtgtctcccccaaatttgtatgttcaagacctcactctaatgtggctgtatttggagatggggcctctaaggaagtaactaagatgaaatgggttcgtgaggatgggcactgattcaacaggattagtgttcttatgaggacagacaccagagttctccctctcactttcttcccacacgcatgcactgaggaaagtctgtgtgaggacacagcaaggaggctgccgtccacaagctgagaagagagccctcacaagagatggaattgactggagcctcagtcttggactttcagcctccagaacagagaaaataaatgtgtgatgttaagcc

SEQ ID NO: 10178 - protein, 123 aa, Homo sapiens
MNMAHCSLDFLGSSNLPTLASRGAETTGTCCHTQIFFKVFCRDRSCYVARAGLKLLDSSSPPALSSQSAGITGVSHCTWPVLGILYKWNQYVTFCIWLLLPSFMFSMFFPIASCISTFFLFVA

SEQ ID NO: 10179 - DNA, 779 bp, Homo sapiens
tttcagatgaagaaacagttccacacactaagagacttaacgagggtacactctcctcaaactaattgattattgaggtgtgtttcttttccttccctggtgatgtgcaaagagaatgaaaagggaaaaggggccaggaaggagatgttttttctccttcattcattcaacagctaatcttgagtaccaactgtgtacaaggcactaacctagatgcctgggacacataaagaacaagtagacaaagactcctacccttaatcattgagttttattctagatgggggagagggtgacagataataaacaatagaattcataatatgaattcattggagagtacgagaaaggtgaactgtggggggaagagagcaaggtaagggggtgaaggagtgttggggagattgggattgcaatttcagaaatggtagtgttatgaactgaatgtgggtgtctcccccaaatttgtatgttcaagacctcactctaatgtggctgtatttggagatggggcctctaaggaagtaactaagatgaaatgggttcgtgaggatgggcactgattcaacaggattagtgttcttatgaggacagacaccagagttctccctctcactttcttcccacacgcatgcactgaggaaagtctgtgtgaggacacagcaaggaggctgccgtccacaagctgagaagagagccctcacaagagatggaattgactggagcctcagtcttggactttcagcctccagaacagagaaaataaatgtgtgatgtta

SEQ ID NO: 10180 - protein, 34 aa, Homo sapiens
MRTDTRVLPLTFFPHACTEESLCEDTARRLPSTS

SEQ ID NO: 10181 - DNA, 369 bp, Homo sapiens
ggtactcaagattagctgttgaatgaatgaaggagaaaaaacatctccttcctggccccttttcccttttcattctctttgcacatcaccagggaaggaaaagaaacacacctcaataatcaattagtttgaggagagctggtaatgtgctcagggtgctttcaacagctagacttgtatactagttccagctgcgcagctctctagctaggtgactttgaacaagcagtccaaccttctgagctcccattttctttcctgtaatagttggataaaatcacctcgtagtggcaagaatcaagagacttctcaaaagttaaacatagaggccaggcgcagtggctcacagctgtaattctaagcactttg

SEQ ID NO: 10182 - protein, 34 aa, Homo sapiens
MNEGEKTSPSWPLFPFHSLCTSPGKEKKHTSIIN

SEQ ID NO: 10183 - DNA, 1325 bp, Homo sapiens
ctgacttcagctcctggacacccttagaattcctagttgaaactttccatgactggatcacagggaaaaaccgaccgagctcaggaagcctaatccaggtggtaaccacagaaggaaggacggaactcaccccagcatatttttaggcctcatctcagtgcctatgaggggcctgccagaaaagtcactaacctgtctcagtgtggccttgtccagccttgtgttttctgtaacccctgtttgtggtacgagataatgagtcctatttttctctcacataatatgcatttgctctcctaggacagtgtaatacatttatgtgaagtaaagacatgcgagactggtggcctgcaaatagcatccgttgatctgtgttaactgcatagggagggctctgcatagcacctgctatagcggtgtcatgttggatcgcttttgtgactgttcatctgtccttgacagtggctgtcatcttgactactttgttgatttgttggtattggggacattttaaaggctgagttatttttgaatgtcatgtttatgtcatagacgtagttttcgcatccttgaattaaactgccttaactccttttgtggtataagcaaaactacatggactctgtcctggtatccttttcctgtgtggttgccccgtgtcctctggcctagggttaagtgtgcaagataactactcgtgagtattcagaatgttgttcctaataaatgcacttgttgtctgtcttctttaatcaaatcacatcttatatacagcagtcagagatgagtatactagaatcatggattgctggaggtcttttaatctgatgttctcagaagggggtggatttaaatcctgaaataaatatttcaacacaagaacacaggcctgattctgccttggacatgtcaaaatctgggggtgatgggatggccctgtgcatttagaagcagctctccacatatggccaatgtaggctgtcctggttgagaactagtagtggtttaatccaacccgatcattttacagatgaggaaactgaggcccagagagacattaccttgttgccagtaactggcagagctaagcccagatctctagtcaccagacagttgctgtttttaaaggcctttaccacgtattttctttctttttttagtgaggtgaaattcacataattttttttttttttttttgagacagagtcttaccctgtcgcccaggctggagtgcagtggcgccatctcggttcactgcaagctccgcctcctgggttcacaccattctcctgcctcagcctcccgagtagctgggactacaggcg

SEQ ID NO: 10184 - protein, 52 aa, Homo sapiens
MSCLCHRRSFRILELNCLNSFCGISKTTWTLSWYPFPVWLPRVLWPRVKCAR

SEQ ID NO: 10185 - DNA, 1651 bp, Homo sapiens
gctctctgccattttttgatgggggttggtgagggcgtctgacctgaaggaggaggccagatgcagctatttataaagtttttagggaatagagatctcaagagaagattgcatgtccttgctgtccccctggccgccagtggtcactgagccatcttctccccatttcccaggtatgatcgggtacggcatggccaagggtgctgttcaccagctctgccagagcctggctgggaagaacagcggcatgccgcccggggcagccgccatcgctgtgctcccggttaccctggataccccgatgaacaggaaatcaatgcctgaggctgacttcagctcctggacacccttagaattcctagttgaaactttccatgactggatcacagggaaaaaccgaccgagctcaggaagcctaatccaggtggtaaccacagaaggaaggacggaactcaccccagcatatttttaggcctcatctcagtgcctatgaggggcctgccagaaaagtcactaacctgtctcagtgtggccttgtccagccttgtgttttctgtaacccctgtttgtggtacgagataatgagtcctatttttctctcacataatatgcatttgctctcctaggacagtgtaatacatttatgtgaagtaaagacatgcgagactggtggcctgcaaatagcatccgttgatctgtgttaactgcatagggagggctctgcatagcacctgctatagcggtgtcatgttggatcgcttttgtgactgttcatctgtccttgacagtggctgtcatcttgactactttgttgatttgttggtattggggacattttaaaggctgagttatttttgaatgtcatgtttatgtcatagacgtagttttcgcatccttgaattaaactgccttaactccttttgtggtataagcaaaactacatggactctgtcctggtatccttttcctgtgtggttgccccgtgtcctctggcctagggttaagtgtgcaagataactactcgtgagtattcagaatgttgttcctaataaatgcacttgttgtctgtcttctttaatcaaatcacatcttatatacagcagtcagagatgagtatactagaatcatggattgctggaggtcttttaatctgatgttctcagaagggggtggatttaaatcctgaaataaatatttcaacacaagaacacaggcctgattctgccttggacatgtcaaaatctgggggtgatgggatggccctgtgcatttagaagcagctctccacatatggccaatgtaggctgtcctggttgagaactagtagtggtttaatccaacccgatcattttacagatgaggaaactgaggcccagagagacattaccttgttgccagtaactggcagagctaagcccagatctctagtcaccagacagttgctgtttttaaaggcctttaccacgtattttctttctttttttagtgaggtgaaattcacataattttttttttttttttttgagacagagtcttaccctgtcgcccaggctggagtgcagtggcgccatctcggttcactgcaagctccgcctcctgggttcacaccattctcctgcctcagcctcccgagtagctgggactacaggcg

SEQ ID NO: 10186 - protein, 119 aa, Homo sapiens
MSLLSPWPPVVTEPSSPHFPGMIGYGMAKGAVHQLCQSLAGKNSGMPPGAAAIAVLPVTLDTPMNRKSMPEADFSSWTPLEFLVETFHDWITGKNRPSSGSLIQVVTTEGRTELTPAYF

SEQ ID NO: 10187 - DNA, 1784 bp, Homo sapiens
ggggcgccccgagcgtggcagcgcgctaggcggcagcagcgggcgcggagcggggcgcggccgccgcgcgttccctcttggcggggttggccggccggggcggggcgcggcgctccggctcgaggcattcggagctgcgggagccgggctggcaggagcaggatggcggcggcggcggctgcaggcgaggcgcgccgggtgctggtgtacggcggcaggggcgctctgggttctcgatgcgtgcaggcttttcgggcccgcaactggtgggttgccagcgttgatgtggtggagaatgaagaggccagcgctagcatcattgttaaaatgacagactcgttcactgagcaggctgaccaggtgactgctgaggttggaaagctcttgggtgaagagaaggtggatgcaattctttgcgttgctggaggatgggccgggggcaatgccaaatccaagtctctctttaagaactgtgacctgatgtggaagcagagcatatggacatcgaccatctccagccatctggctaccaagcatctcaaggaagcctaatccaggtggtaaccacagaaggaaggacggaactcaccccagcatatttttaggcctcatctcagtgcctatgaggggcctgccagaaaagtcactaacctgtctcagtgtggccttgtccagccttgtgttttctgtaacccctgtttgtggtacgagataatgagtcctatttttctctcacataatatgcatttgctctcctaggacagtgtaatacatttatgtgaagtaaagacatgcgagactggtggcctgcaaatagcatccgttgatctgtgttaactgcatagggagggctctgcatagcacctgctatagcggtgtcatgttggatcgcttttgtgactgttcatctgtccttgacagtggctgtcatcttgactactttgttgatttgttggtattggggacattttaaaggctgagttatttttgaatgtcatgtttatgtcatagacgtagttttcgcatccttgaattaaactgccttaactccttttgtggtataagcaaaactacatggactctgtcctggtatccttttcctgtgtggttgccccgtgtcctctggcctagggttaagtgtgcaagataactactcgtgagtattcagaatgttgttcctaataaatgcacttgttgtctgtcttctttaatcaaatcacatcttatatacagcagtcagagatgagtatactagaatcatggattgctggaggtcttttaatctgatgttctcagaagggggtggatttaaatcctgaaataaatatttcaacacaagaacacaggcctgattctgccttggacatgtcaaaatctgggggtgatgggatggccctgtgcatttagaagcagctctccacatatggccaatgtaggctgtcctggttgagaactagtagtggtttaatccaacccgatcattttacagatgaggaaactgaggcccagagagacattaccttgttgccagtaactggcagagctaagcccagatctctagtcaccagacagttgctgtttttaaaggcctttaccacgtattttctttctttttttagtgaggtgaaattcacataattttttttttttttttttgagacagagtcttaccctgtcgcccaggctggagtgcagtggcgccatctcggttcactgcaagctccgcctcctgggttcacaccattctcctgcctcagcctcccgagtagctgggactacaggcg

SEQ ID NO: 10188 - protein, 129 aa, Homo sapiens
MAAAAAAGEARRVLVYGGRGALGSRCVQAFRARNWWVASVDVVENEEASASIIVKMTDSFTEQADQVTAEVGKLLGEEKVDAILCVAGGWAGGNAKSKSLFKNCDLMWKQSIWTSTISSHLATKHLKEA

SEQ ID NO: 10189 - DNA, 1893 bp, Homo sapiens
ggggcgccccgagcgtggcagcgcgctaggcggcagcagcgggcgcggagcggggcgcggccgccgcgcgttccctcttggcggggttggccggccggggcggggcgcggcgctccggctcgaggcattcggagctgcgggagccgggctggcaggagcaggatggcggcggcggcggctgcaggcgaggcgcgccgggtgctggtgtacggcggcaggggcgctctgggttctcgatgcgtgcaggcttttcgggcccgcaactggtgggttgccagcgttgatgtggtggagaatgaagaggccagcgctagcatcattgttaaaatgacagactcgttcactgagcagcatctcaaggaaggaggcctcctgaccttggctggcgcaaaggctgccctggatgggactcctggtatgatcgggtacggcatggccaagggtgctgttcaccagctctgccagagcctggctgggaagaacagcggcatgccgcccggggcagccgccatcgctgtgctcccggttaccctggataccccgatgaacaggaaatcaatgcctgaggctgacttcagctcctggacacccttagaattcctagttgaaactttccatgactggatcacagggaaaaaccgaccgagctcaggaagcctaatccaggtggtaaccacagaaggaaggacggaactcaccccagcatatttttaggcctcatctcagtgcctatgaggggcctgccagaaaagtcactaacctgtctcagtgtggccttgtccagccttgtgttttctgtaacccctgtttgtggtacgagataatgagtcctatttttctctcacataatatgcatttgctctcctaggacagtgtaatacatttatgtgaagtaaagacatgcgagactggtggcctgcaaatagcatccgttgatctgtgttaactgcatagggagggctctgcatagcacctgctatagcggtgtcatgttggatcgcttttgtgactgttcatctgtccttgacagtggctgtcatcttgactactttgttgatttgttggtattggggacattttaaaggctgagttatttttgaatgtcatgtttatgtcatagacgtagttttcgcatccttgaattaaactgccttaactccttttgtggtataagcaaaactacatggactctgtcctggtatccttttcctgtgtggttgccccgtgtcctctggcctagggttaagtgtgcaagataactactcgtgagtattcagaatgttgttcctaataaatgcacttgttgtctgtcttctttaatcaaatcacatcttatatacagcagtcagagatgagtatactagaatcatggattgctggaggtcttttaatctgatgttctcagaagggggtggatttaaatcctgaaataaatatttcaacacaagaacacaggcctgattctgccttggacatgtcaaaatctgggggtgatgggatggccctgtgcatttagaagcagctctccacatatggccaatgtaggctgtcctggttgagaactagtagtggtttaatccaacccgatcattttacagatgaggaaactgaggcccagagagacattaccttgttgccagtaactggcagagctaagcccagatctctagtcaccagacagttgctgtttttaaaggcctttaccacgtattttctttctttttttagtgaggtgaaattcacataattttttttttttttttttgagacagagtcttaccctgtcgcccaggctggagtgcagtggcgccatctcggttcactgcaagctccgcctcctgggttcacaccattctcctgcctcagcctcccgagtagctgggactacaggcg

SEQ ID NO: 10190 - protein, 183 aa, Homo sapiens
MAAAAAAGEARRVLVYGGRGALGSRCVQAFRARNWWVASVDVVENEEASASIIVKMTDSFTEQHLKEGGLLTLAGAKAALDGTPGMIGYGMAKGAVHQLCQSLAGKNSGMPPGAAAIAVLPVTLDTPMNRKSMPEADFSSWTPLEFLVETFHDWITGKNRPSSGSLIQVVTTEGRTELTPAYF

SEQ ID NO: 10191 - DNA, 1883 bp, Homo sapiens
ggggcgccccgagcgtggcagcgcgctaggcggcagcagcgggcgcggagcggggcgcggccgccgcgcgttccctcttggcggggttggccggccggggcggggcgcggcgctccggctcgaggcattcggagctgcgggagccgggctggcaggagcaggatggcggcggcggcggctgcaggcgaggcgcgccgggtgctggtgtacggcggcaggggcgctctgggttctcgatgcgtgcaggcttttcgggcccgcaactggtgggttgccagcgttgatgtggtggagaatgaagaggccagcgctagcatcattgttaaaatgacagactcgttcactgagcaggctgaccaggtgactgctgaggttggaaagctcttgggtgaagagaaggtggatgcaattctttgcgttgctggaggatgggccgggggcaatgccaaatccaagtctctctttaagaactgtgacctgatgtggaagcagagcatatggacatcgaccatctccagccatctggctaccaagcatctcaaggaaggaggcctcctgaccttggctggcgcaaaggctgccctggatgggactcctgaactttccatgactggatcacagggaaaaaccgaccgagctcaggaagcctaatccaggtggtaaccacagaaggaaggacggaactcaccccagcatatttttaggcctcatctcagtgcctatgaggggcctgccagaaaagtcactaacctgtctcagtgtggccttgtccagccttgtgttttctgtaacccctgtttgtggtacgagataatgagtcctatttttctctcacataatatgcatttgctctcctaggacagtgtaatacatttatgtgaagtaaagacatgcgagactggtggcctgcaaatagcatccgttgatctgtgttaactgcatagggagggctctgcatagcacctgctatagcggtgtcatgttggatcgcttttgtgactgttcatctgtccttgacagtggctgtcatcttgactactttgttgatttgttggtattggggacattttaaaggctgagttatttttgaatgtcatgtttatgtcatagacgtagttttcgcatccttgaattaaactgccttaactccttttgtggtataagcaaaactacatggactctgtcctggtatccttttcctgtgtggttgccccgtgtcctctggcctagggttaagtgtgcaagataactactcgtgagtattcagaatgttgttcctaataaatgcacttgttgtctgtcttctttaatcaaatcacatcttatatacagcagtcagagatgagtatactagaatcatggattgctggaggtcttttaatctgatgttctcagaagggggtggatttaaatcctgaaataaatatttcaacacaagaacacaggcctgattctgccttggacatgtcaaaatctgggggtgatgggatggccctgtgcatttagaagcagctctccacatatggccaatgtaggctgtcctggttgagaactagtagtggtttaatccaacccgatcattttacagatgaggaaactgaggcccagagagacattaccttgttgccagtaactggcagagctaagcccagatctctagtcaccagacagttgctgtttttaaaggcctttaccacgtattttctttctttttttagtgaggtgaaattcacataattttttttttttttttttgagacagagtcttaccctgtcgcccaggctggagtgcagtggcgccatctcggttcactgcaagctccgcctcctgggttcacaccattctcctgcctcagcctcccgagtagctgggactacaggcg

SEQ ID NO: 10192 - protein, 162 aa, Homo sapiens
MAAAAAAGEARRVLVYGGRGALGSRCVQAFRARNWWVASVDVVENEEASASIIVKMTDSFTEQADQVTAEVGKLLGEEKVDAILCVAGGWAGGNAKSKSLFKNCDLMWKQSIWTSTISSHLATKHLKEGGLLTLAGAKAALDGTPELSMTGSQGKTDRAQEA

SEQ ID NO: 10193 - DNA, 1675 bp, Homo sapiens
ggggcgccccgagcgtggcagcgcgctaggcggcagcagcgggcgcggagcggggcgcggccgccgcgcgttccctcttggcggggttggccggccggggcggggcgcggcgctccggctcgaggcattcggagctgcgggagccgggctggcaggagcaggatggcggcggcggcggctgcaggcgaggcgcgccgggtgctggtgtacggcggcaggggcgctctgggttctcgatgcgtgcaggcttttcgggcccgcaactggcggcatgccgcccggggcagccgccatcgctgtgctcccggttaccctggataccccgatgaacaggaaatcaatgcctgaggctgacttcagctcctggacacccttagaattcctagttgaaactttccatgactggatcacagggaaaaaccgaccgagctcaggaagcctaatccaggtggtaaccacagaaggaaggacggaactcaccccagcatatttttaggcctcatctcagtgcctatgaggggcctgccagaaaagtcactaacctgtctcagtgtggccttgtccagccttgtgttttctgtaacccctgtttgtggtacgagataatgagtcctatttttctctcacataatatgcatttgctctcctaggacagtgtaatacatttatgtgaagtaaagacatgcgagactggtggcctgcaaatagcatccgttgatctgtgttaactgcatagggagggctctgcatagcacctgctatagcggtgtcatgttggatcgcttttgtgactgttcatctgtccttgacagtggctgtcatcttgactactttgttgatttgttggtattggggacattttaaaggctgagttatttttgaatgtcatgtttatgtcatagacgtagttttcgcatccttgaattaaactgccttaactccttttgtggtataagcaaaactacatggactctgtcctggtatccttttcctgtgtggttgccccgtgtcctctggcctagggttaagtgtgcaagataactactcgtgagtattcagaatgttgttcctaataaatgcacttgttgtctgtcttctttaatcaaatcacatcttatatacagcagtcagagatgagtatactagaatcatggattgctggaggtcttttaatctgatgttctcagaagggggtggatttaaatcctgaaataaatatttcaacacaagaacacaggcctgattctgccttggacatgtcaaaatctgggggtgatgggatggccctgtgcatttagaagcagctctccacatatggccaatgtaggctgtcctggttgagaactagtagtggtttaatccaacccgatcattttacagatgaggaaactgaggcccagagagacattaccttgttgccagtaactggcagagctaagcccagatctctagtcaccagacagttgctgtttttaaaggcctttaccacgtattttctttctttttttagtgaggtgaaattcacataattttttttttttttttttgagacagagtcttaccctgtcgcccaggctggagtgcagtggcgccatctcggttcactgcaagctccgcctcctgggttcacaccattctcctgcctcagcctcccgagtagctgggactacaggcg

SEQ ID NO: 10194 - protein, 74 aa, Homo sapiens
MPPGAAAIAVLPVTLDTPMNRKSMPEADFSSWTPLEFLVETFHDWITGKNRPSSGSLIQVVTTEGRTELTPAYF

SEQ ID NO: 10195 - DNA, 1700 bp, Homo sapiens
ggggcgccccgagcgtggcagcgcgctaggcggcagcagcgggcgcggagcggggcgcggccgccgcgcgttccctcttggcggggttggccggccggggcggggcgcggcgctccggctcgaggcattcggagctgcgggagccgggctggcaggagcaggatggcggcggcggcggctgcaggcgaggcgcgccgggtgctggtgtacggcggcaggggcgctctgggttctcgatgcgtgcaggcttttcgggcccgcaactggtgggttgccagcgttgatgtggtggagaatgaagaggccagcgctagcatcattgttaaaatgacagactcgttcactgagcaggctgaccaggtacaatgcctgaggctgacttcagctcctggacacccttagaattcctagttgaaactttccatgactggatcacagggaaaaaccgaccgagctcaggaagcctaatccaggtggtaaccacagaaggaaggacggaactcaccccagcatatttttaggcctcatctcagtgcctatgaggggcctgccagaaaagtcactaacctgtctcagtgtggccttgtccagccttgtgttttctgtaacccctgtttgtggtacgagataatgagtcctatttttctctcacataatatgcatttgctctcctaggacagtgtaatacatttatgtgaagtaaagacatgcgagactggtggcctgcaaatagcatccgttgatctgtgttaactgcatagggagggctctgcatagcacctgctatagcggtgtcatgttggatcgcttttgtgactgttcatctgtccttgacagtggctgtcatcttgactactttgttgatttgttggtattggggacattttaaaggctgagttatttttgaatgtcatgtttatgtcatagacgtagttttcgcatccttgaattaaactgccttaactccttttgtggtataagcaaaactacatggactctgtcctggtatccttttcctgtgtggttgccccgtgtcctctggcctagggttaagtgtgcaagataactactcgtgagtattcagaatgttgttcctaataaatgcacttgttgtctgtcttctttaatcaaatcacatcttatatacagcagtcagagatgagtatactagaatcatggattgctggaggtcttttaatctgatgttctcagaagggggtggatttaaatcctgaaataaatatttcaacacaagaacacaggcctgattctgccttggacatgtcaaaatctgggggtgatgggatggccctgtgcatttagaagcagctctccacatatggccaatgtaggctgtcctggttgagaactagtagtggtttaatccaacccgatcattttacagatgaggaaactgaggcccagagagacattaccttgttgccagtaactggcagagctaagcccagatctctagtcaccagacagttgctgtttttaaaggcctttaccacgtattttctttctttttttagtgaggtgaaattcacataattttttttttttttttttgagacagagtcttaccctgtcgcccaggctggagtgcagtggcgccatctcggttcactgcaagctccgcctcctgggttcacaccattctcctgcctcagcctcccgagtagctgggactacaggcg

SEQ ID NO: 10196 - protein, 79 aa, Homo sapiens
MAAAAAAGEARRVLVYGGRGALGSRCVQAFRARNWWVASVDVVENEEASASIIVKMTDSFTEQADQVQCLRLTSAPGHP

SEQ ID NO: 10197 - DNA, 1479 bp, Homo sapiens
ggggcgccccgagcgtggcagcgcgctaggcggcagcagcgggcgcggagcggggcgcggccgccgcgcgttccctcttggcggggttggccggccggggcggggcgcggcgctccggctcgaggcattcggagctgcgggagccgggctggcaggagcaggatggcggcggcggcggctgcaggcgaggcgcgccgggtgctggtgtacggcggcaggggcgctctgggttctcgatgcgtgcaggcttttcgggcccgcaactggtgggttgccagcgttgatgtggtggagaatgaagaggccagcgctagcatcattgttaaaatgacaaaaagtcactaacctgtctcagtgtggccttgtccagccttgtgttttctgtaacccctgtttgtggtacgagataatgagtcctatttttctctcacataatatgcatttgctctcctaggacagtgtaatacatttatgtgaagtaaagacatgcgagactggtggcctgcaaatagcatccgttgatctgtgttaactgcatagggagggctctgcatagcacctgctatagcggtgtcatgttggatcgcttttgtgactgttcatctgtccttgacagtggctgtcatcttgactactttgttgatttgttggtattggggacattttaaaggctgagttatttttgaatgtcatgtttatgtcatagacgtagttttcgcatccttgaattaaactgccttaactccttttgtggtataagcaaaactacatggactctgtcctggtatccttttcctgtgtggttgccccgtgtcctctggcctagggttaagtgtgcaagataactactcgtgagtattcagaatgttgttcctaataaatgcacttgttgtctgtcttctttaatcaaatcacatcttatatacagcagtcagagatgagtatactagaatcatggattgctggaggtcttttaatctgatgttctcagaagggggtggatttaaatcctgaaataaatatttcaacacaagaacacaggcctgattctgccttggacatgtcaaaatctgggggtgatgggatggccctgtgcatttagaagcagctctccacatatggccaatgtaggctgtcctggttgagaactagtagtggtttaatccaacccgatcattttacagatgaggaaactgaggcccagagagacattaccttgttgccagtaactggcagagctaagcccagatctctagtcaccagacagttgctgtttttaaaggcctttaccacgtattttctttctttttttagtgaggtgaaattcacataattttttttttttttttttgagacagagtcttaccctgtcgcccaggctggagtgcagtggcgccatctcggttcactgcaagctccgcctcctgggttcacaccattctcctgcctcagcctcccgagtagctgggactacaggcg

SEQ ID NO: 10198 - protein, 60 aa, Homo sapiens
MAAAAAAGEARRVLVYGGRGALGSRCVQAFRARNWWVASVDVVENEEASASIIVKMTKSH

SEQ ID NO: 10199 - DNA, 1967 bp, Homo sapiens
ggggcgccccgagcgtggcagcgcgctaggcggcagcagcgggcgcggagcggggcgcggccgccgcgcgttccctcttggcggggttggccggccggggcggggcgcggcgctccggctcgaggcattcggagctgcgggagccgggctggcaggagcaggatggcggcggcggcggctgcaggcgaggcgcgccgggtgctggtgtacggcggcaggggcgctctgggttctcgatgcgtgcaggcttttcgggcccgcaactggtgggttgccagcgttgatgtggtggagaatgaagaggccagcgctagcatcattgttaaaatgacagactcgttcactgagcaggctgaccaggtgactgctgaggttggaaagctcttgggtgaagagaaggtggatgcaattctttgcgttgctggaggatgggccgggggcaatgccaaatccaagtctctctttaagaactgtgacctgatgtggaagcagagcatatggacatcgaccatctccagccatctggctaccaagcatctcaaggaaggaggcctcctgaccttggctggcgcaaaggctgccctggatgggactcctgggttaccctggataccccgatgaacaggaaatcaatgcctgaggctgacttcagctcctggacacccttagaattcctagttgaaactttccatgactggatcacagggaaaaaccgaccgagctcaggaagcctaatccaggtggtaaccacagaaggaaggacggaactcaccccagcatatttttaggcctcatctcagtgcctatgaggggcctgccagaaaagtcactaacctgtctcagtgtggccttgtccagccttgtgttttctgtaacccctgtttgtggtacgagataatgagtcctatttttctctcacataatatgcatttgctctcctaggacagtgtaatacatttatgtgaagtaaagacatgcgagactggtggcctgcaaatagcatccgttgatctgtgttaactgcatagggagggctctgcatagcacctgctatagcggtgtcatgttggatcgcttttgtgactgttcatctgtccttgacagtggctgtcatcttgactactttgttgatttgttggtattggggacattttaaaggctgagttatttttgaatgtcatgtttatgtcatagacgtagttttcgcatccttgaattaaactgccttaactccttttgtggtataagcaaaactacatggactctgtcctggtatccttttcctgtgtggttgccccgtgtcctctggcctagggttaagtgtgcaagataactactcgtgagtattcagaatgttgttcctaataaatgcacttgttgtctgtcttctttaatcaaatcacatcttatatacagcagtcagagatgagtatactagaatcatggattgctggaggtcttttaatctgatgttctcagaagggggtggatttaaatcctgaaataaatatttcaacacaagaacacaggcctgattctgccttggacatgtcaaaatctgggggtgatgggatggccctgtgcatttagaagcagctctccacatatggccaatgtaggctgtcctggttgagaactagtagtggtttaatccaacccgatcattttacagatgaggaaactgaggcccagagagacattaccttgttgccagtaactggcagagctaagcccagatctctagtcaccagacagttgctgtttttaaaggcctttaccacgtattttctttctttttttagtgaggtgaaattcacataattttttttttttttttttgagacagagtcttaccctgtcgcccaggctggagtgcagtggcgccatctcggttcactgcaagctccgcctcctgggttcacaccattctcctgcctcagcctcccgagtagctgggactacaggcg

SEQ ID NO: 10200 - protein, 152 aa, Homo sapiens
MAAAAAAGEARRVLVYGGRGALGSRCVQAFRARNWWVASVDVVENEEASASIIVKMTDSFTEQADQVTAEVGKLLGEEKVDAILCVAGGWAGGNAKSKSLFKNCDLMWKQSIWTSTISSHLATKHLKEGGLLTLAGAKAALDGTPGLPWIPR

SEQ ID NO: 10201 - DNA, 2009 bp, Homo sapiens
ggggcgccccgagcgtggcagcgcgctaggcggcagcagcgggcgcggagcggggcgcggccgccgcgcgttccctcttggcggggttggccggccggggcggggcgcggcgctccggctcgaggcattcggagctgcgggagccgggctggcaggagcaggatggcggcggcggcggctgcaggcgaggcgcgccgggtgctggtgtacggcggcaggggcgctctgggttctcgatgcgtgcaggcttttcgggcccgcaactggatttgagtaacaacagataccatatggccagcaaagcctaagtgggttgccagcgttgatgtggtggagaatgaagaggccagcgctagcatcattgttaaaatgacagactcgttcactgagcaggctgaccaggtgactgctgaggttggaaagctcttgggtgaagagaaggtggatgcaattctttgcgttgctggaggatgggccgggggcaatgccaaatccaagtctctctttaagaactgtgacctgatgtggaagcagagcatatggacatcgaccatctccagccatctggctaccaagcatctcaaggaaggaggcctcctgaccttggctggcgcaaaggctgccctggatgggactcctgggttaccctggataccccgatgaacaggaaatcaatgcctgaggctgacttcagctcctggacacccttagaattcctagttgaaactttccatgactggatcacagggaaaaaccgaccgagctcaggaagcctaatccaggtggtaaccacagaaggaaggacggaactcaccccagcatatttttaggcctcatctcagtgcctatgaggggcctgccagaaaagtcactaacctgtctcagtgtggccttgtccagccttgtgttttctgtaacccctgtttgtggtacgagataatgagtcctatttttctctcacataatatgcatttgctctcctaggacagtgtaatacatttatgtgaagtaaagacatgcgagactggtggcctgcaaatagcatccgttgatctgtgttaactgcatagggagggctctgcatagcacctgctatagcggtgtcatgttggatcgcttttgtgactgttcatctgtccttgacagtggctgtcatcttgactactttgttgatttgttggtattggggacattttaaaggctgagttatttttgaatgtcatgtttatgtcatagacgtagttttcgcatccttgaattaaactgccttaactccttttgtggtataagcaaaactacatggactctgtcctggtatccttttcctgtgtggttgccccgtgtcctctggcctagggttaagtgtgcaagataactactcgtgagtattcagaatgttgttcctaataaatgcacttgttgtctgtcttctttaatcaaatcacatcttatatacagcagtcagagatgagtatactagaatcatggattgctggaggtcttttaatctgatgttctcagaagggggtggatttaaatcctgaaataaatatttcaacacaagaacacaggcctgattctgccttggacatgtcaaaatctgggggtgatgggatggccctgtgcatttagaagcagctctccacatatggccaatgtaggctgtcctggttgagaactagtagtggtttaatccaacccgatcattttacagatgaggaaactgaggcccagagagacattaccttgttgccagtaactggcagagctaagcccagatctctagtcaccagacagttgctgtttttaaaggcctttaccacgtattttctttctttttttagtgaggtgaaattcacataattttttttttttttttttgagacagagtcttaccctgtcgcccaggctggagtgcagtggcgccatctcggttcactgcaagctccgcctcctgggttcacaccattctcctgcctcagcctcccgagtagctgggactacaggcg

SEQ ID NO: 10202 - protein, 97 aa, Homo sapiens
MTDSFTEQADQVTAEVGKLLGEEKVDAILCVAGGWAGGNAKSKSLFKNCDLMWKQSIWTSTISSHLATKHLKEGGLLTLAGAKAALDGTPGLPWIPR

SEQ ID NO: 10203 - DNA, 1979 bp, Homo sapiens
ggggcgccccgagcgtggcagcgcgctaggcggcagcagcgggcgcggagcggggcgcggccgccgcgcgttccctcttggcggggttggccggccggggcggggcgcggcgctccggctcgaggcattcggagctgcgggagccgggctggcaggagcaggatggcggcggcggcggctgcaggcgaggcgcgccgggtgctggtgtacggcggcaggggcgctctgggttctcgatgcgtgcaggcttttcgggcccgcaactggtgggttgccagcgttgatgtggtggagaatgaagaggccagcgctagcatcattgttaaaatgacagactcgttcactgagcaggctgaccagctctctttaagaactgtgacctgatgtggaagcagagcatatggacatcgaccatctccagccatctggctaccaagcatctcaaggaaggaggcctcctgaccttggctggcgcaaaggctgccctggatgggactcctggtatgatcgggtacggcatggccaagggtgctgttcaccagctctgccagagcctggctgggaagaacagcggcatgccgcccggggcagccgccatcgctgtgctcccggttaccctggataccccgatgaacaggaaatcaatgcctgaggctgacttcagctcctggacacccttagaattcctagttgaaactttccatgactggatcacagggaaaaaccgaccgagctcaggaagcctaatccaggtggtaaccacagaaggaaggacggaactcaccccagcatatttttaggcctcatctcagtgcctatgaggggcctgccagaaaagtcactaacctgtctcagtgtggccttgtccagccttgtgttttctgtaacccctgtttgtggtacgagataatgagtcctatttttctctcacataatatgcatttgctctcctaggacagtgtaatacatttatgtgaagtaaagacatgcgagactggtggcctgcaaatagcatccgttgatctgtgttaactgcatagggagggctctgcatagcacctgctatagcggtgtcatgttggatcgcttttgtgactgttcatctgtccttgacagtggctgtcatcttgactactttgttgatttgttggtattggggacattttaaaggctgagttatttttgaatgtcatgtttatgtcatagacgtagttttcgcatccttgaattaaactgccttaactccttttgtggtataagcaaaactacatggactctgtcctggtatccttttcctgtgtggttgccccgtgtcctctggcctagggttaagtgtgcaagataactactcgtgagtattcagaatgttgttcctaataaatgcacttgttgtctgtcttctttaatcaaatcacatcttatatacagcagtcagagatgagtatactagaatcatggattgctggaggtcttttaatctgatgttctcagaagggggtggatttaaatcctgaaataaatatttcaacacaagaacacaggcctgattctgccttggacatgtcaaaatctgggggtgatgggatggccctgtgcatttagaagcagctctccacatatggccaatgtaggctgtcctggttgagaactagtagtggtttaatccaacccgatcattttacagatgaggaaactgaggcccagagagacattaccttgttgccagtaactggcagagctaagcccagatctctagtcaccagacagttgctgtttttaaaggcctttaccacgtattttctttctttttttagtgaggtgaaattcacataattttttttttttttttttgagacagagtcttaccctgtcgcccaggctggagtgcagtggcgccatctcggttcactgcaagctccgcctcctgggttcacaccattctcctgcctcagcctcccgagtagctgggactacaggcg

SEQ ID NO: 10204 - protein, 138 aa, Homo sapiens [sequence omitted]

SEQ ID NO: 10205 - DNA, 1892 bp, Homo sapiens
acagtccctccgggtggcggggcgccccgagcgtggcagcgcgctaggcggcagcagcgggcgcggagcggggcgcggccgccgcgcgttccctcttggcggggttggccggccggggcggggcgcggcgctccggctcgaggcattcggagctgcgggagccgggctggcaggagcaggatggcggcggcggcggctgcaggcgaggcgcgccgggtgctggtgtacggcggcaggggcgctctgggttctcgatgcgtgcaggcttttcgggcccgcaactgggtgactgctgaggttggaaagctcttgggtgaagagaaggtggatgcaattctttgcgttgctggaggatgggccgggggcaatgccaaatccaagtctctctttaagaactgtgacctgatgtggaagcagagcatatggacatcgaccatctccagccatctggctaccaagcatctcaaggaaggaggcctcctgaccttggctggcgcaaaggctgccctggatgggactcctgggttaccctggataccccgatgaacaggaaatcaatgcctgaggctgacttcagctcctggacacccttagaattcctagttgaaactttccatgactggatcacagggaaaaaccgaccgagctcaggaagcctaatccaggtggtaaccacagaaggaaggacggaactcaccccagcatatttttaggcctcatctcagtgcctatgaggggcctgccagaaaagtcactaacctgtctcagtgtggccttgtccagccttgtgttttctgtaacccctgtttgtggtacgagataatgagtcctatttttctctcacataatatgcatttgctctcctaggacagtgtaatacatttatgtgaagtaaagacatgcgagactggtggcctgcaaatagcatccgttgatctgtgttaactgcatagggagggctctgcatagcacctgctatagcggtgtcatgttggatcgcttttgtgactgttcatctgtccttgacagtggctgtcatcttgactactttgttgatttgttggtattggggacattttaaaggctgagttatttttgaatgtcatgtttatgtcatagacgtagttttcgcatccttgaattaaactgccttaactccttttgtggtataagcaaaactacatggactctgtcctggtatccttttcctgtgtggttgccccgtgtcctctggcctagggttaagtgtgcaagataactactcgtgagtattcagaatgttgttcctaataaatgcacttgttgtctgtcttctttaatcaaatcacatcttatatacagcagtcagagatgagtatactagaatcatggattgctggaggtcttttaatctgatgttctcagaagggggtggatttaaatcctgaaataaatatttcaacacaagaacacaggcctgattctgccttggacatgtcaaaatctgggggtgatgggatggccctgtgcatttagaagcagctctccacatatggccaatgtaggctgtcctggttgagaactagtagtggtttaatccaacccgatcattttacagatgaggaaactgaggcccagagagacattaccttgttgccagtaactggcagagctaagcccagatctctagtcaccagacagttgctgtttttaaaggcctttaccacgtattttctttctttttttagtgaggtgaaattcacataattttttttttttttttttgagacagagtcttaccctgtcgcccaggctggagtgcagtggcgccatctcggttcactgcaagctccgcctcctgggttcacaccattctcctgcctcagcctcccgagtagctgggactacaggcg

SEQ ID NO: 10206 - protein, 121 aa, Homo sapiens
MAAAAAAGEARRVLVYGGRGALGSRCVQAFRARNWVTAEVGKLLGEEKVDAILCVAGGWAGGNAKSKSLFKNCDLMWKQSIWTSTISSHLATKHLKEGGLLTLAGAKAALDGTPGLPWIPR

SEQ ID NO: 10207 - DNA, 2001 bp, Homo sapiens
acagtccctccgggtggcggggcgccccgagcgtggcagcgcgctaggcggcagcagcgggcgcggagcggggcgcggccgccgcgcgttccctcttggcggggttggccggccggggcggggcgcggcgctccggctcgaggcattcggagctgcgggagccgggctggcaggagcaggatggcggcggcggcggctgcaggcgaggcgcgccgggtgctggtgtacggcggcaggggcgctctgggttctcgatgcgtgcaggcttttcgggcccgcaactgggtgactgctgaggttggaaagctcttgggtgaagagaaggtggatgcaattctttgcgttgctggaggatgggccgggggcaatgccaaatccaagtctctctttaagaactgtgacctgatgtggaagcagagcatatggacatcgaccatctccagccatctggctaccaagcatctcaaggaaggaggcctcctgaccttggctggcgcaaaggctgccctggatgggactcctggtatgatcgggtacggcatggccaagggtgctgttcaccagctctgccagagcctggctgggaagaacagcggcatgccgcccggggcagccgccatcgctgtgctcccggttaccctggataccccgatgaacaggaaatcaatgcctgaggctgacttcagctcctggacacccttagaattcctagttgaaactttccatgactggatcacagggaaaaaccgaccgagctcaggaagcctaatccaggtggtaaccacagaaggaaggacggaactcaccccagcatatttttaggcctcatctcagtgcctatgaggggcctgccagaaaagtcactaacctgtctcagtgtggccttgtccagccttgtgttttctgtaacccctgtttgtggtacgagataatgagtcctatttttctctcacataatatgcatttgctctcctaggacagtgtaatacatttatgtgaagtaaagacatgcgagactggtggcctgcaaatagcatccgttgatctgtgttaactgcatagggagggctctgcatagcacctgctatagcggtgtcatgttggatcgcttttgtgactgttcatctgtccttgacagtggctgtcatcttgactactttgttgatttgttggtattggggacattttaaaggctgagttatttttgaatgtcatgtttatgtcatagacgtagttttcgcatccttgaattaaactgccttaactccttttgtggtataagcaaaactacatggactctgtcctggtatccttttcctgtgtggttgccccgtgtcctctggcctagggttaagtgtgcaagataactactcgtgagtattcagaatgttgttcctaataaatgcacttgttgtctgtcttctttaatcaaatcacatcttatatacagcagtcagagatgagtatactagaatcatggattgctggaggtcttttaatctgatgttctcagaagggggtggatttaaatcctgaaataaatatttcaacacaagaacacaggcctgattctgccttggacatgtcaaaatctgggggtgatgggatggccctgtgcatttagaagcagctctccacatatggccaatgtaggctgtcctggttgagaactagtagtggtttaatccaacccgatcattttacagatgaggaaactgaggcccagagagacattaccttgttgccagtaactggcagagctaagcccagatctctagtcaccagacagttgctgtttttaaaggcctttaccacgtattttctttctttttttagtgaggtgaaattcacataattttttttttttttttttgagacagagtcttaccctgtcgcccaggctggagtgcagtggcgccatctcggttcactgcaagctccgcctcctgggttcacaccattctcctgcctcagcctcccgagtagctgggactacaggcg

SEQ ID NO: 10208 - protein, 213 aa, Homo sapiens
MAAAAAAGEARRVLVYGGRGALGSRCVQAFRARNWVTAEVGKLLGEEKVDAILCVAGGWAGGNAKSKSLFKNCDLMWKQSIWTSTISSHLATKHLKEGGLLTLAGAKAALDGTPGMIGYGMAKGAVHQLCQSLAGKNSGMPPGAAAIAVLPVTLDTPMNRKSMPEADFSSWTPLEFLVETFHDWITGKNRPSSGSLIQVVTTEGRTELTPAYF

SEQ ID NO: 10209 - DNA, 2059 bp, Homo sapiens
agttacagtccctccgggtggcggggcgccccgagcgtggcagcgcgctaggcggcagcagcgggcgcggagcggggcgcggccgccgcgcgttccctcttggcggggttggccggccggggcggggcgcggcgctccggctcgaggcattcggagctgcgggagccgggctggcaggagcaggatggcggcggcggcggctgcaggcgaggcgcgccgggtgctggtgtacggcggcaggggcgctctgggttctcgatgcgtgcaggcttttcgggcccgcaactggtgggttgccagcgttgatgtggtggagaatgaagaggccagcgctagcatcattgttaaaatgacagactcgttcactgagcaggctgaccaggtgactgctgaggttggaaagctcttgggtgaagagaaggtggatgcaattctttgcgttgctggaggatgggccgggggcaatgccaaatccaagtctctctttaagaactgtgacctgatgtggaagcagagcatatggacatcgaccatctccagccatctggctaccaagcatctcaaggaaggaggcctcctgaccttggctggcgcaaaggctgccctggatgggactcctggtatgatcgggtacggcatggccaagggtgctgttcaccagctctgccagagcctggctgggaagaacagcggcatgccgcccggggcagccgccatcgctgtgctcccggttaccctggataccccgatgaacaggaaatcaatgcctgaggctgacttcagctcctggacacccttagaattcctagttgaaactttccatgactggatcacagggaaaaaccgaccgagctcaggaagcctaatccaggtggtaaccacagaaggaaggacggaactcaccccagcatatttttaggcctcatctcagtgcctatgaggggcctgccagaaaagtcactaacctgtctcagtgtggccttgtccagccttgtgttttctgtaacccctgtttgtggtacgagataatgagtcctatttttctctcacataatatgcatttgctctcctaggacagtgtaatacatttatgtgaagtaaagacatgcgagatgcatagggagggctctgcatagcacctgctatagcggtgtcatgttggatcgcttttgtgactgttcatctgtccttgacagtggctgtcatcttgactactttgttgatttgttggtattggggacattttaaaggctgagttatttttgaatgtcatgtttatgtcatagacgtagttttcgcatccttgaattaaactgccttaactccttttgtggtataagcaaaactacatggactctgtcctggtatccttttcctgtgtggttgccccgtgtcctctggcctagggttaagtgtgcaagataactactcgtgagtattcagaatgttgttcctaataaatgcacttgttgtctgtcttctttaatcaaatcacatcttatatacagcagtcagagatgagtatactagaatcatggattgctggaggtcttttaatctgatgttctcagaagggggtggatttaaatcctgaaataaatatttcaacacaagaacacaggcctgattctgccttggacatgtcaaaatctgggggtgatgggatggccctgtgcatttagaagcagctctccacatatggccaatgtaggctgtcctggttgagaactagtagtggtttaatccaacccgatcattttacagatgaggaaactgaggcccagagagacattaccttgttgccagtaactggcagagctaagcccagatctctagtcaccagacagttgctgtttttaaaggcctttaccacgtattttctttctttttttagtgaggtgaaattcacataattttttttttttttttttgagacagagtcttaccctgtcgcccaggctggagtgcagtggcgccatctcggttcactgcaagctccgcctcctgggttcacaccattctcctgcctcagcctcccgagtagctgggactacaggcg

SEQ ID NO: 10210 - protein, 244 aa, Homo sapiens
MAAAAAAGEARRVLVYGGRGALGSRCVQAFRARNWWVASVDVVENEEASASIIVKMTDSFTEQADQVTAEVGKLLGEEKVDAILCVAGGWAGGNAKSKSLFKNCDLMWKQSIWTSTISSHLATKHLKEGGLLTLAGAKAALDGTPGMIGYGMAKGAVHQLCQSLAGKNSGMPPGAAAIAVLPVTLDTPMNRKSMPEADFSSWTPLEFLVETFHDWITGKNRPSSGSLIQVVTTEGRTELTPAYF

SEQ ID NO: 10211 - DNA, 2098 bp, Homo sapiens
agttacagtccctccgggtggcggggcgccccgagcgtggcagcgcgctaggcggcagcagcgggcgcggagcggggcgcggccgccgcgcgttccctcttggcggggttggccggccggggcggggcgcggcgctccggctcgaggcattcggagctgcgggagccgggctggcaggagcaggatggcggcggcggcggctgcaggcgaggcgcgccgggtgctggtgtacggcggcaggggcgctctgggttctcgatgcgtgcaggcttttcgggcccgcaactggtgggttgccagcgttgatgtggtggagaatgaagaggccagcgctagcatcattgttaaaatgacagactcgttcactgagcaggctgaccaggtgactgctgaggttggaaagctcttgggtgaagagaaggtggatgcaattctttgcgttgctggaggatgggccgggggcaatgccaaatccaagtctctctttaagaactgtgacctgatgtggaagcagagcatatggacatcgaccatctccagccatctggctaccaagcatctcaaggaaggaggcctcctgaccttggctggcgcaaaggctgccctggatgggactcctggtatgatcgggtacggcatggccaagggtgctgttcaccagctctgccagagcctggctgggaagaacagcggcatgccgcccggggcagccgccatcgctgtgctcccggttaccctggataccccgatgaacaggaaatcaatgcctgaggctgacttcagctcctggacacccttagaattcctagttgaaactttccatgactggatcacagggaaaaaccgaccgagctcaggaagcctaatccaggtggtaaccacagaaggaaggacggaactcaccccagcatatttttaggcctcatctcagtgcctatgaggggcctgccagaaaagtcactaacctgtctcagtgtggccttgtccagccttgtgttttctgtaacccctgtttgtggtacgagataatgagtcctatttttctctcacataatatgcatttgctctcctaggacagtgtaatacatttatgtgaagtaaagacatgcgagactggtggcctgcaaatagcatccgttgatctgtgttaactgcatagggagggctctgcatagcacctgctatagcggtgtcatgttggatcgcttttgtgactgttcatctgtccttgacagtggctgtcatcttgactactttgttgatttgttggtattggggacattttaaaggctgagttatttttgaatgtcatgtttatgtcatagacgtagttttcgcatccttgaattaaactgccttaactccttttgtggtataagcaaaactacatggactctgtcctggtatccttttcctgtgtggttgccccgtgtcctctggcctagggttaagtgtgcaagataactactcgtgagtattcagaatgttgttcctaataaatgcacttgttgtctgtcttctttaatcaaatcacatcttatatacagcagtcagagatgagtatactagaatcatggattgctggaggtcttttaatctgatgttctcagaagggggtggatttaaatcctgaaataaatatttcaacacaagaacacaggcctgattctgccttggacatgtcaaaatctgggggtgatgggatggccctgtgcatttagaagcagctctccacatatggccaatgtaggctgtcctggttgagaactagtagtggtttaatccaacccgatcattttacagatgaggaaactgaggcccagagagacattaccttgttgccagtaactggcagagctaagcccagatctctagtcaccagacagttgctgtttttaaaggcctttaccacgtattttctttctttttttagtgaggtgaaattcacataattttttttttttttttttgagacagagtcttaccctgtcgcccaggctggagtgcagtggcgccatctcggttcactgcaagctccgcctcctgggttcacaccattctcctgcctcagcctcccgagtagctgggactacaggcg

SEQ ID NO: 10212 - protein, 244 aa, Homo sapiens; identical to SEQ ID NO: 10210

SEQ ID NO: 10213 - DNA, 883 bp, Homo sapiens
ctgacttcagctcctggacacccttagaattcctagttgaaactttccatgactggatcacagggaaaaaccgaccgagctcaggaagcctaatccaggtggtaaccacagaaggaaggacggaactcaccccagcatatttttaggcctcatctcagtgcctatgaggggcctgccagaaaagtcactaacctgtctcagtgtggccttgtccagccttgtgttttctgtaacccctgtttgtggtacgagataatgagtcctatttttctctcacataatatgcatttgctctcctaggacagtgtaatacatttatgtgaagtaaagacatgcgagactggtggcctgcaaatagcatccgttgatctgtgttaactgcatagggagggctctgcatagcacctgctatagcggtgtcatgttggatcgcttttgtgactgttcatctgtccttgacagtggctgtcatcttgactactttgttgatttgttggtattggggacattttaaaggctgagttatttttgaatgtcatgtttatgtcatagacgtagttttcgcatccttgaattaaactgccttaactccttttgtggtataagcaaaactacatggactctgtcctggtatccttttcctgtgtggttgccccgtgtcctctggcctagggttaagtgtgcaagataactactcgtgagtattcagaatgttgttcctaataaatgcacttgttgtctgtcttctttaatcaaatcacatcttatatacagcagtcagagatgagtatactagaatcatggattgctggaggtcttttaatctgatgttctcagaagggggtggatttaaatcctgaaataaatatttcaacacaagaac

SEQ ID NO: 10214 - protein, 52 aa, Homo sapiens; identical to SEQ ID NO: 10184

SEQ ID NO: 10215 - DNA, 1209 bp, Homo sapiens
gctctctgccattttttgatgggggttggtgagggcgtctgacctgaaggaggaggccagatgcagctatttataaagtttttagggaatagagatctcaagagaagattgcatgtccttgctgtccccctggccgccagtggtcactgagccatcttctccccatttcccaggtatgatcgggtacggcatggccaagggtgctgttcaccagctctgccagagcctggctgggaagaacagcggcatgccgcccggggcagccgccatcgctgtgctcccggttaccctggataccccgatgaacaggaaatcaatgcctgaggctgacttcagctcctggacacccttagaattcctagttgaaactttccatgactggatcacagggaaaaaccgaccgagctcaggaagcctaatccaggtggtaaccacagaaggaaggacggaactcaccccagcatatttttaggcctcatctcagtgcctatgaggggcctgccagaaaagtcactaacctgtctcagtgtggccttgtccagccttgtgttttctgtaacccctgtttgtggtacgagataatgagtcctatttttctctcacataatatgcatttgctctcctaggacagtgtaatacatttatgtgaagtaaagacatgcgagactggtggcctgcaaatagcatccgttgatctgtgttaactgcatagggagggctctgcatagcacctgctatagcggtgtcatgttggatcgcttttgtgactgttcatctgtccttgacagtggctgtcatcttgactactttgttgatttgttggtattggggacattttaaaggctgagttatttttgaatgtcatgtttatgtcatagacgtagttttcgcatccttgaattaaactgccttaactccttttgtggtataagcaaaactacatggactctgtcctggtatccttttcctgtgtggttgccccgtgtcctctggcctagggttaagtgtgcaagataactactcgtgagtattcagaatgttgttcctaataaatgcacttgttgtctgtcttctttaatcaaatcacatcttatatacagcagtcagagatgagtatactagaatcatggattgctggaggtcttttaatctgatgttctcagaagggggtggatttaaatcctgaaataaatatttcaacacaagaac

SEQ ID NO: 10216 - protein, 119 aa, Homo sapiens; identical to SEQ ID NO: 10186

SEQ ID NO: 10217 - DNA, 1441 bp, Homo sapiens
ggggcgccccgagcgtggcagcgcgctaggcggcagcagcgggcgcggagcggggcgcggccgccgcgcgttccctcttggcggggttggccggccggggcggggcgcggcgctccggctcgaggcattcggagctgcgggagccgggctggcaggagcaggatggcggcggcggcggctgcaggcgaggcgcgccgggtgctggtgtacggcggcaggggcgctctgggttctcgatgcgtgcaggcttttcgggcccgcaactggtgggttgccagcgttgatgtggtggagaatgaagaggccagcgctagcatcattgttaaaatgacagactcgttcactgagcaggctgaccaggtgactgctgaggttggaaagctcttgggtgaagagaaggtggatgcaattctttgcgttgctggaggatgggccgggggcaatgccaaatccaagtctctctttaagaactgtgacctgatgtggaagcagagcatatggacatcgaccatctccagccatctggctaccaagcatctcaaggaaggaggcctcctgaccttggctggcgcaaaggctgccctggatgggactcctgaactttccatgactggatcacagggaaaaaccgaccgagctcaggaagcctaatccaggtggtaaccacagaaggaaggacggaactcaccccagcatatttttaggcctcatctcagtgcctatgaggggcctgccagaaaagtcactaacctgtctcagtgtggccttgtccagccttgtgttttctgtaacccctgtttgtggtacgagataatgagtcctatttttctctcacataatatgcatttgctctcctaggacagtgtaatacatttatgtgaagtaaagacatgcgagactggtggcctgcaaatagcatccgttgatctgtgttaactgcatagggagggctctgcatagcacctgctatagcggtgtcatgttggatcgcttttgtgactgttcatctgtccttgacagtggctgtcatcttgactactttgttgatttgttggtattggggacattttaaaggctgagttatttttgaatgtcatgtttatgtcatagacgtagttttcgcatccttgaattaaactgccttaactccttttgtggtataagcaaaactacatggactctgtcctggtatccttttcctgtgtggttgccccgtgtcctctggcctagggttaagtgtgcaagataactactcgtgagtattcagaatgttgttcctaataaatgcacttgttgtctgtcttctttaatcaaatcacatcttatatacagcagtcagagatgagtatactagaatcatggattgctggaggtcttttaatctgatgttctcagaagggggtggatttaaatcctgaaataaatatttcaacacaagaac

SEQ ID NO: 10218 - protein, 162 aa, Homo sapiens; identical to SEQ ID NO: 10192

SEQ ID NO: 10219 - DNA, 1233 bp, Homo sapiens
ggggcgccccgagcgtggcagcgcgctaggcggcagcagcgggcgcggagcggggcgcggccgccgcgcgttccctcttggcggggttggccggccggggcggggcgcggcgctccggctcgaggcattcggagctgcgggagccgggctggcaggagcaggatggcggcggcggcggctgcaggcgaggcgcgccgggtgctggtgtacggcggcaggggcgctctgggttctcgatgcgtgcaggcttttcgggcccgcaactggcggcatgccgcccggggcagccgccatcgctgtgctcccggttaccctggataccccgatgaacaggaaatcaatgcctgaggctgacttcagctcctggacacccttagaattcctagttgaaactttccatgactggatcacagggaaaaaccgaccgagctcaggaagcctaatccaggtggtaaccacagaaggaaggacggaactcaccccagcatatttttaggcctcatctcagtgcctatgaggggcctgccagaaaagtcactaacctgtctcagtgtggccttgtccagccttgtgttttctgtaacccctgtttgtggtacgagataatgagtcctatttttctctcacataatatgcatttgctctcctaggacagtgtaatacatttatgtgaagtaaagacatgcgagactggtggcctgcaaatagcatccgttgatctgtgttaactgcatagggagggctctgcatagcacctgctatagcggtgtcatgttggatcgcttttgtgactgttcatctgtccttgacagtggctgtcatcttgactactttgttgatttgttggtattggggacattttaaaggctgagttatttttgaatgtcatgtttatgtcatagacgtagttttcgcatccttgaattaaactgccttaactccttttgtggtataagcaaaactacatggactctgtcctggtatccttttcctgtgtggttgccccgtgtcctctggcctagggttaagtgtgcaagataactactcgtgagtattcagaatgttgttcctaataaatgcacttgttgtctgtcttctttaatcaaatcacatcttatatacagcagtcagagatgagtatactagaatcatggattgctggaggtcttttaatctgatgttctcagaagggggtggatttaaatcctgaaataaatatttcaacacaagaac

SEQ ID NO: 10220 - protein, 74 aa, Homo sapiens; identical to SEQ ID NO: 10194

SEQ ID NO: 10221 - DNA, 1258 bp, Homo sapiens
ggggcgccccgagcgtggcagcgcgctaggcggcagcagcgggcgcggagcggggcgcggccgccgcgcgttccctcttggcggggttggccggccggggcggggcgcggcgctccggctcgaggcattcggagctgcgggagccgggctggcaggagcaggatggcggcggcggcggctgcaggcgaggcgcgccgggtgctggtgtacggcggcaggggcgctctgggttctcgatgcgtgcaggcttttcgggcccgcaactggtgggttgccagcgttgatgtggtggagaatgaagaggccagcgctagcatcattgttaaaatgacagactcgttcactgagcaggctgaccaggtacaatgcctgaggctgacttcagctcctggacacccttagaattcctagttgaaactttccatgactggatcacagggaaaaaccgaccgagctcaggaagcctaatccaggtggtaaccacagaaggaaggacggaactcaccccagcatatttttaggcctcatctcagtgcctatgaggggcctgccagaaaagtcactaacctgtctcagtgtggccttgtccagccttgtgttttctgtaacccctgtttgtggtacgagataatgagtcctatttttctctcacataatatgcatttgctctcctaggacagtgtaatacatttatgtgaagtaaagacatgcgagactggtggcctgcaaatagcatccgttgatctgtgttaactgcatagggagggctctgcatagcacctgctatagcggtgtcatgttggatcgcttttgtgactgttcatctgtccttgacagtggctgtcatcttgactactttgttgatttgttggtattggggacattttaaaggctgagttatttttgaatgtcatgtttatgtcatagacgtagttttcgcatccttgaattaaactgccttaactccttttgtggtataagcaaaactacatggactctgtcctggtatccttttcctgtgtggttgccccgtgtcctctggcctagggttaagtgtgcaagataactactcgtgagtattcagaatgttgttcctaataaatgcacttgttgtctgtcttctttaatcaaatcacatcttatatacagcagtcagagatgagtatactagaatcatggattgctggaggtcttttaatctgatgttctcagaagggggtggatttaaatcctgaaataaatatttcaacacaagaac

SEQ ID NO: 10222 - protein, 79 aa, Homo sapiens; identical to SEQ ID NO: 10196

SEQ ID NO: 10223 - DNA, 1037 bp, Homo sapiens
ggggcgccccgagcgtggcagcgcgctaggcggcagcagcgggcgcggagcggggcgcggccgccgcgcgttccctcttggcggggttggccggccggggcggggcgcggcgctccggctcgaggcattcggagctgcgggagccgggctggcaggagcaggatggcggcggcggcggctgcaggcgaggcgcgccgggtgctggtgtacggcggcaggggcgctctgggttctcgatgcgtgcaggcttttcgggcccgcaactggtgggttgccagcgttgatgtggtggagaatgaagaggccagcgctagcatcattgttaaaatgacaaaaagtcactaacctgtctcagtgtggccttgtccagccttgtgttttctgtaacccctgtttgtggtacgagataatgagtcctatttttctctcacataatatgcatttgctctcctaggacagtgtaatacatttatgtgaagtaaagacatgcgagactggtggcctgcaaatagcatccgttgatctgtgttaactgcatagggagggctctgcatagcacctgctatagcggtgtcatgttggatcgcttttgtgactgttcatctgtccttgacagtggctgtcatcttgactactttgttgatttgttggtattggggacattttaaaggctgagttatttttgaatgtcatgtttatgtcatagacgtagttttcgcatccttgaattaaactgccttaactccttttgtggtataagcaaaactacatggactctgtcctggtatccttttcctgtgtggttgccccgtgtcctctggcctagggttaagtgtgcaagataactactcgtgagtattcagaatgttgttcctaataaatgcacttgttgtctgtcttctttaatcaaatcacatcttatatacagcagtcagagatgagtatactagaatcatggattgctggaggtcttttaatctgatgttctcagaagggggtggatttaaatcctgaaataaatatttcaacacaagaac

SEQ ID NO: 10224 - protein, 60 aa, Homo sapiens; identical to SEQ ID NO: 10198

SEQ ID NO: 10225 - DNA, 1525 bp, Homo sapiens
ggggcgccccgagcgtggcagcgcgctaggcggcagcagcgggcgcggagcggggcgcggccgccgcgcgttccctcttggcggggttggccggccggggcggggcgcggcgctccggctcgaggcattcggagctgcgggagccgggctggcaggagcaggatggcggcggcggcggctgcaggcgaggcgcgccgggtgctggtgtacggcggcaggggcgctctgggttctcgatgcgtgcaggcttttcgggcccgcaactggtgggttgccagcgttgatgtggtggagaatgaagaggccagcgctagcatcattgttaaaatgacagactcgttcactgagcaggctgaccaggtgactgctgaggttggaaagctcttgggtgaagagaaggtggatgcaattctttgcgttgctggaggatgggccgggggcaatgccaaatccaagtctctctttaagaactgtgacctgatgtggaagcagagcatatggacatcgaccatctccagccatctggctaccaagcatctcaaggaaggaggcctcctgaccttggctggcgcaaaggctgccctggatgggactcctgggttaccctggataccccgatgaacaggaaatcaatgcctgaggctgacttcagctcctggacacccttagaattcctagttgaaactttccatgactggatcacagggaaaaaccgaccgagctcaggaagcctaatccaggtggtaaccacagaaggaaggacggaactcaccccagcatatttttaggcctcatctcagtgcctatgaggggcctgccagaaaagtcactaacctgtctcagtgtggccttgtccagccttgtgttttctgtaacccctgtttgtggtacgagataatgagtcctatttttctctcacataatatgcatttgctctcctaggacagtgtaatacatttatgtgaagtaaagacatgcgagactggtggcctgcaaatagcatccgttgatctgtgttaactgcatagggagggctctgcatagcacctgctatagcggtgtcatgttggatcgcttttgtgactgttcatctgtccttgacagtggctgtcatcttgactactttgttgatttgttggtattggggacattttaaaggctgagttatttttgaatgtcatgtttatgtcatagacgtagttttcgcatccttgaattaaactgccttaactccttttgtggtataagcaaaactacatggactctgtcctggtatccttttcctgtgtggttgccccgtgtcctctggcctagggttaagtgtgcaagataactactcgtgagtattcagaatgttgttcctaataaatgcacttgttgtctgtcttctttaatcaaatcacatcttatatacagcagtcagagatgagtatactagaatcatggattgctggaggtcttttaatctgatgttctcagaagggggtggatttaaatcctgaaataaatatttcaacacaagaac

SEQ ID NO: 10226 - protein, 152 aa, Homo sapiens; identical to SEQ ID NO: 10200

SEQ ID NO: 10227 - DNA, 1567 bp, Homo sapiens
ggggcgccccgagcgtggcagcgcgctaggcggcagcagcgggcgcggagcggggcgcggccgccgcgcgttccctcttggcggggttggccggccggggcggggcgcggcgctccggctcgaggcattcggagctgcgggagccgggctggcaggagcaggatggcggcggcggcggctgcaggcgaggcgcgccgggtgctggtgtacggcggcaggggcgctctgggttctcgatgcgtgcaggcttttcgggcccgcaactggatttgagtaacaacagataccatatggccagcaaagcctaagtgggttgccagcgttgatgtggtggagaatgaagaggccagcgctagcatcattgttaaaatgacagactcgttcactgagcaggctgaccaggtgactgctgaggttggaaagctcttgggtgaagagaaggtggatgcaattctttgcgttgctggaggatgggccgggggcaatgccaaatccaagtctctctttaagaactgtgacctgatgtggaagcagagcatatggacatcgaccatctccagccatctggctaccaagcatctcaaggaaggaggcctcctgaccttggctggcgcaaaggctgccctggatgggactcctgggttaccctggataccccgatgaacaggaaatcaatgcctgaggctgacttcagctcctggacacccttagaattcctagttgaaactttccatgactggatcacagggaaaaaccgaccgagctcaggaagcctaatccaggtggtaaccacagaaggaaggacggaactcaccccagcatatttttaggcctcatctcagtgcctatgaggggcctgccagaaaagtcactaacctgtctcagtgtggccttgtccagccttgtgttttctgtaacccctgtttgtggtacgagataatgagtcctatttttctctcacataatatgcatttgctctcctaggacagtgtaatacatttatgtgaagtaaagacatgcgagactggtggcctgcaaatagcatccgttgatctgtgttaactgcatagggagggctctgcatagcacctgctatagcggtgtcatgttggatcgcttttgtgactgttcatctgtccttgacagtggctgtcatcttgactactttgttgatttgttggtattggggacattttaaaggctgagttatttttgaatgtcatgtttatgtcatagacgtagttttcgcatccttgaattaaactgccttaactccttttgtggtataagcaaaactacatggactctgtcctggtatccttttcctgtgtggttgccccgtgtcctctggcctagggttaagtgtgcaagataactactcgtgagtattcagaatgttgttcctaataaatgcacttgttgtctgtcttctttaatcaaatcacatcttatatacagcagtcagagatgagtatactagaatcatggattgctggaggtcttttaatctgatgttctcagaagggggtggatttaaatcctgaaataaatatttcaacacaagaac

SEQ ID NO: 10228 - protein, 97 aa, Homo sapiens; identical to SEQ ID NO: 10202

SEQ ID NO: 10229 - DNA, 1537 bp, Homo sapiens
ggggcgccccgagcgtggcagcgcgctaggcggcagcagcgggcgcggagcggggcgcggccgccgcgcgttccctcttggcggggttggccggccggggcggggcgcggcgctccggctcgaggcattcggagctgcgggagccgggctggcaggagcaggatggcggcggcggcggctgcaggcgaggcgcgccgggtgctggtgtacggcggcaggggcgctctgggttctcgatgcgtgcaggcttttcgggcccgcaactggtgggttgccagcgttgatgtggtggagaatgaagaggccagcgctagcatcattgttaaaatgacagactcgttcactgagcaggctgaccagctctctttaagaactgtgacctgatgtggaagcagagcatatggacatcgaccatctccagccatctggctaccaagcatctcaaggaaggaggcctcctgaccttggctggcgcaaaggctgccctggatgggactcctggtatgatcgggtacggcatggccaagggtgctgttcaccagctctgccagagcctggctgggaagaacagcggcatgccgcccggggcagccgccatcgctgtgctcccggttaccctggataccccgatgaacaggaaatcaatgcctgaggctgacttcagctcctggacacccttagaattcctagttgaaactttccatgactggatcacagggaaaaaccgaccgagctcaggaagcctaatccaggtggtaaccacagaaggaaggacggaactcaccccagcatatttttaggcctcatctcagtgcctatgaggggcctgccagaaaagtcactaacctgtctcagtgtggccttgtccagccttgtgttttctgtaacccctgtttgtggtacgagataatgagtcctatttttctctcacataatatgcatttgctctcctaggacagtgtaatacatttatgtgaagtaaagacatgcgagactggtggcctgcaaatagcatccgttgatctgtgttaactgcatagggagggctctgcatagcacctgctatagcggtgtcatgttggatcgcttttgtgactgttcatctgtccttgacagtggctgtcatcttgactactttgttgatttgttggtattggggacattttaaaggctgagttatttttgaatgtcatgtttatgtcatagacgtagttttcgcatccttgaattaaactgccttaactccttttgtggtataagcaaaactacatggactctgtcctggtatccttttcctgtgtggttgccccgtgtcctctggcctagggttaagtgtgcaagataactactcgtgagtattcagaatgttgttcctaataaatgcacttgttgtctgtcttctttaatcaaatcacatcttatatacagcagtcagagatgagtatactagaatcatggattgctggaggtcttttaatctgatgttctcagaagggggtggatttaaatcctgaaataaatatttcaacacaagaac

SEQ ID NO: 10230 - protein, 138 aa, Homo sapiens [sequence omitted]

SEQ ID NO: 10231 - DNA, 1342 bp, Homo sapiens
ggggcgccccgagcgtggcagcgcgctaggcggcagcagcgggcgcggagcggggcgcggccgccgcgcgttccctcttggcggggttggccggccggggcggggcgcggcgctccggctcgaggcattcggagctgcgggagccgggctggcaggagcaggatggcggcggcggcggctgcaggcgaggcgcgccgggtgctggtgtacggcggcaggggcgctctgggttctcgatgcgtgcaggcttttcgggcccgcaactggtgggttgccagcgttgatgtggtggagaatgaagaggccagcgctagcatcattgttaaaatgacagactcgttcactgagcaggctgaccaggtgactgctgaggttggaaagctcttgggtgaagagaaggtggatgcaattctttgcgttgctggaggatgggccgggggcaatgccaaatccaagtctctctttaagaactgtgacctgatgtggaagcagagcatatggacatcgaccatctccagccatctggctaccaagcatctcaaggaagcctaatccaggtggtaaccacagaaggaaggacggaactcaccccagcatatttttaggcctcatctcagtgcctatgaggggcctgccagaaaagtcactaacctgtctcagtgtggccttgtccagccttgtgttttctgtaacccctgtttgtggtacgagataatgagtcctatttttctctcacataatatgcatttgctctcctaggacagtgtaatacatttatgtgaagtaaagacatgcgagactggtggcctgcaaatagcatccgttgatctgtgttaactgcatagggagggctctgcatagcacctgctatagcggtgtcatgttggatcgcttttgtgactgttcatctgtccttgacagtggctgtcatcttgactactttgttgatttgttggtattggggacattttaaaggctgagttatttttgaatgtcatgtttatgtcatagacgtagttttcgcatccttgaattaaactgccttaactccttttgtggtataagcaaaactacatggactctgtcctggtatccttttcctgtgtggttgccccgtgtcctctggcctagggttaagtgtgcaagataactactcgtgagtattcagaatgttgttcctaataaatgcacttgttgtctgtcttctttaatcaaatcacatcttatatacagcagtcagagatgagtatactagaatcatggattgctggaggtcttttaatctgatgttctcagaagggggtggatttaaatcctgaaataaatatttcaacacaagaac

SEQ ID NO: 10232 - protein, 129 aa, Homo sapiens; identical to SEQ ID NO: 10188

SEQ ID NO: 10233 - DNA, 1451 bp, Homo sapiens
ggggcgccccgagcgtggcagcgcgctaggcggcagcagcgggcgcggagcggggcgcggccgccgcgcgttccctcttggcggggttggccggccggggcggggcgcggcgctccggctcgaggcattcggagctgcgggagccgggctggcaggagcaggatggcggcggcggcggctgcaggcgaggcgcgccgggtgctggtgtacggcggcaggggcgctctgggttctcgatgcgtgcaggcttttcgggcccgcaactggtgggttgccagcgttgatgtggtggagaatgaagaggccagcgctagcatcattgttaaaatgacagactcgttcactgagcagcatctcaaggaaggaggcctcctgaccttggctggcgcaaaggctgccctggatgggactcctggtatgatcgggtacggcatggccaagggtgctgttcaccagctctgccagagcctggctgggaagaacagcggcatgccgcccggggcagccgccatcgctgtgctcccggttaccctggataccccgatgaacaggaaatcaatgcctgaggctgacttcagctcctggacacccttagaattcctagttgaaactttccatgactggatcacagggaaaaaccgaccgagctcaggaagcctaatccaggtggtaaccacagaaggaaggacggaactcaccccagcatatttttaggcctcatctcagtgcctatgaggggcctgccagaaaagtcactaacctgtctcagtgtggccttgtccagccttgtgttttctgtaacccctgtttgtggtacgagataatgagtcctatttttctctcacataatatgcatttgctctcctaggacagtgtaatacatttatgtgaagtaaagacatgcgagactggtggcctgcaaatagcatccgttgatctgtgttaactgcatagggagggctctgcatagcacctgctatagcggtgtcatgttggatcgcttttgtgactgttcatctgtccttgacagtggctgtcatcttgactactttgttgatttgttggtattggggacattttaaaggctgagttatttttgaatgtcatgtttatgtcatagacgtagttttcgcatccttgaattaaactgccttaactccttttgtggtataagcaaaactacatggactctgtcctggtatccttttcctgtgtggttgccccgtgtcctctggcctagggttaagtgtgcaagataactactcgtgagtattcagaatgttgttcctaataaatgcacttgttgtctgtcttctttaatcaaatcacatcttatatacagcagtcagagatgagtatactagaatcatggattgctggaggtcttttaatctgatgttctcagaagggggtggatttaaatcctgaaataaatatttcaacacaagaac

SEQ ID NO: 10234 - protein, 183 aa, Homo sapiens; identical to SEQ ID NO: 10190

SEQ ID NO: 10235 - DNA, 1450 bp, Homo sapiens
acagtccctccgggtggcggggcgccccgagcgtggcagcgcgctaggcggcagcagcgggcgcggagcggggcgcggccgccgcgcgttccctcttggcggggttggccggccggggcggggcgcggcgctccggctcgaggcattcggagctgcgggagccgggctggcaggagcaggatggcggcggcggcggctgcaggcgaggcgcgccgggtgctggtgtacggcggcaggggcgctctgggttctcgatgcgtgcaggcttttcgggcccgcaactgggtgactgctgaggttggaaagctcttgggtgaagagaaggtggatgcaattctttgcgttgctggaggatgggccgggggcaatgccaaatccaagtctctctttaagaactgtgacctgatgtggaagcagagcatatggacatcgaccatctccagccatctggctaccaagcatctcaaggaaggaggcctcctgaccttggctggcgcaaaggctgccctggatgggactcctgggttaccctggataccccgatgaacaggaaatcaatgcctgaggctgacttcagctcctggacacccttagaattcctagttgaaactttccatgactggatcacagggaaaaaccgaccgagctcaggaagcctaatccaggtggtaaccacagaaggaaggacggaactcaccccagcatatttttaggcctcatctcagtgcctatgaggggcctgccagaaaagtcactaacctgtctcagtgtggccttgtccagccttgtgttttctgtaacccctgtttgtggtacgagataatgagtcctatttttctctcacataatatgcatttgctctcctaggacagtgtaatacatttatgtgaagtaaagacatgcgagactggtggcctgcaaatagcatccgttgatctgtgttaactgcatagggagggctctgcatagcacctgctatagcggtgtcatgttggatcgcttttgtgactgttcatctgtccttgacagtggctgtcatcttgactactttgttgatttgttggtattggggacattttaaaggctgagttatttttgaatgtcatgtttatgtcatagacgtagttttcgcatccttgaattaaactgccttaactccttttgtggtataagcaaaactacatggactctgtcctggtatccttttcctgtgtggttgccccgtgtcctctggcctagggttaagtgtgcaagataactactcgtgagtattcagaatgttgttcctaataaatgcacttgttgtctgtcttctttaatcaaatcacatcttatatacagcagtcagagatgagtatactagaatcatggattgctggaggtcttttaatctgatgttctcagaagggggtggatttaaatcctgaaataaatatttcaacacaagaac

SEQ ID NO: 10236 - protein, 121 aa, Homo sapiens; identical to SEQ ID NO: 10206

SEQ ID NO: 10237 - DNA, 1559 bp, Homo sapiens
acagtccctccgggtggcggggcgccccgagcgtggcagcgcgctaggcggcagcagcgggcgcggagcggggcgcggccgccgcgcgttccctcttggcggggttggccggccggggcggggcgcggcgctccggctcgaggcattcggagctgcgggagccgggctggcaggagcaggatggcggcggcggcggctgcaggcgaggcgcgccgggtgctggtgtacggcggcaggggcgctctgggttctcgatgcgtgcaggcttttcgggcccgcaactgggtgactgctgaggttggaaagctcttgggtgaagagaaggtggatgcaattctttgcgttgctggaggatgggccgggggcaatgccaaatccaagtctctctttaagaactgtgacctgatgtggaagcagagcatatggacatcgaccatctccagccatctggctaccaagcatctcaaggaaggaggcctcctgaccttggctggcgcaaaggctgccctggatgggactcctggtatgatcgggtacggcatggccaagggtgctgttcaccagctctgccagagcctggctgggaagaacagcggcatgccgcccggggcagccgccatcgctgtgctcccggttaccctggataccccgatgaacaggaaatcaatgcctgaggctgacttcagctcctggacacccttagaattcctagttgaaactttccatgactggatcacagggaaaaaccgaccgagctcaggaagcctaatccaggtggtaaccacagaaggaaggacggaactcaccccagcatatttttaggcctcatctcagtgcctatgaggggcctgccagaaaagtcactaacctgtctcagtgtggccttgtccagccttgtgttttctgtaacccctgtttgtggtacgagataatgagtcctatttttctctcacataatatgcatttgctctcctaggacagtgtaatacatttatgtgaagtaaagacatgcgagactggtggcctgcaaatagcatccgttgatctgtgttaactgcatagggagggctctgcatagcacctgctatagcggtgtcatgttggatcgcttttgtgactgttcatctgtccttgacagtggctgtcatcttgactactttgttgatttgttggtattggggacattttaaaggctgagttatttttgaatgtcatgtttatgtcatagacgtagttttcgcatccttgaattaaactgccttaactccttttgtggtataagcaaaactacatggactctgtcctggtatccttttcctgtgtggttgccccgtgtcctctggcctagggttaagtgtgcaagataactactcgtgagtattcagaatgttgttcctaataaatgcacttgttgtctgtcttctttaatcaaatcacatcttatatacagcagtcagagatgagtatactagaatcatggattgctggaggtcttttaatctgatgttctcagaagggggtggatttaaatcctgaaataaatatttcaacacaagaac

SEQ ID NO: 10238 - protein, 213 aa, Homo sapiens; identical to SEQ ID NO: 10208

SEQ ID NO: 10239 - DNA, 1617 bp, Homo sapiens
agttacagtccctccgggtggcggggcgccccgagcgtggcagcgcgctaggcggcagcagcgggcgcggagcggggcgcggccgccgcgcgttccctcttggcggggttggccggccggggcggggcgcggcgctccggctcgaggcattcggagctgcgggagccgggctggcaggagcaggatggcggcggcggcggctgcaggcgaggcgcgccgggtgctggtgtacggcggcaggggcgctctgggttctcgatgcgtgcaggcttttcgggcccgcaactggtgggttgccagcgttgatgtggtggagaatgaagaggccagcgctagcatcattgttaaaatgacagactcgttcactgagcaggctgaccaggtgactgctgaggttggaaagctcttgggtgaagagaaggtggatgcaattctttgcgttgctggaggatgggccgggggcaatgccaaatccaagtctctctttaagaactgtgacctgatgtggaagcagagcatatggacatcgaccatctccagccatctggctaccaagcatctcaaggaaggaggcctcctgaccttggctggcgcaaaggctgccctggatgggactcctggtatgatcgggtacggcatggccaagggtgctgttcaccagctctgccagagcctggctgggaagaacagcggcatgccgcccggggcagccgccatcgctgtgctcccggttaccctggataccccgatgaacaggaaatcaatgcctgaggctgacttcagctcctggacacccttagaattcctagttgaaactttccatgactggatcacagggaaaaaccgaccgagctcaggaagcctaatccaggtggtaaccacagaaggaaggacggaactcaccccagcatatttttaggcctcatctcagtgcctatgaggggcctgccagaaaagtcactaacctgtctcagtgtggccttgtccagccttgtgttttctgtaacccctgtttgtggtacgagataatgagtcctatttttctctcacataatatgcatttgctctcctaggacagtgtaatacatttatgtgaagtaaagacatgcgagatgcatagggagggctctgcatagcacctgctatagcggtgtcatgttggatcgcttttgtgactgttcatctgtccttgacagtggctgtcatcttgactactttgttgatttgttggtattggggacattttaaaggctgagttatttttgaatgtcatgtttatgtcatagacgtagttttcgcatccttgaattaaactgccttaactccttttgtggtataagcaaaactacatggactctgtcctggtatccttttcctgtgtggttgccccgtgtcctctggcctagggttaagtgtgcaagataactactcgtgagtattcagaatgttgttcctaataaatgcacttgttgtctgtcttctttaatcaaatcacatcttatatacagcagtcagagatgagtatactagaatcatggattgctggaggtcttttaatctgatgttctcagaagggggtggatttaaatcctgaaataaatatttcaacacaagaac

SEQ ID NO: 10240 - protein, 244 aa, Homo sapiens; identical to SEQ ID NO: 10210

SEQ ID NO: 10241 - DNA, 1656 bp, Homo sapiens
agttacagtccctccgggtggcggggcgccccgagcgtggcagcgcgctaggcggcagcagcgggcgcggagcggggcgcggccgccgcgcgttccctcttggcggggttggccggccggggcggggcgcggcgctccggctcgaggcattcggagctgcgggagccgggctggcaggagcaggatggcggcggcggcggctgcaggcgaggcgcgccgggtgctggtgtacggcggcaggggcgctctgggttctcgatgcgtgcaggcttttcgggcccgcaactggtgggttgccagcgttgatgtggtggagaatgaagaggccagcgctagcatcattgttaaaatgacagactcgttcactgagcaggctgaccaggtgactgctgaggttggaaagctcttgggtgaagagaaggtggatgcaattctttgcgttgctggaggatgggccgggggcaatgccaaatccaagtctctctttaagaactgtgacctgatgtggaagcagagcatatggacatcgaccatctccagccatctggctaccaagcatctcaaggaaggaggcctcctgaccttggctggcgcaaaggctgccctggatgggactcctggtatgatcgggtacggcatggccaagggtgctgttcaccagctctgccagagcctggctgggaagaacagcggcatgccgcccggggcagccgccatcgctgtgctcccggttaccctggataccccgatgaacaggaaatcaatgcctgaggctgacttcagctcctggacacccttagaattcctagttgaaactttccatgactggatcacagggaaaaaccgaccgagctcaggaagcctaatccaggtggtaaccacagaaggaaggacggaactcaccccagcatatttttaggcctcatctcagtgcctatgaggggcctgccagaaaagtcactaacctgtctcagtgtggccttgtccagccttgtgttttctgtaacccctgtttgtggtacgagataatgagtcctatttttctctcacataatatgcatttgctctcctaggacagtgtaatacatttatgtgaagtaaagacatgcgagactggtggcctgcaaatagcatccgttgatctgtgttaactgcatagggagggctctgcatagcacctgctatagcggtgtcatgttggatcgcttttgtgactgttcatctgtccttgacagtggctgtcatcttgactactttgttgatttgttggtattggggacattttaaaggctgagttatttttgaatgtcatgtttatgtcatagacgtagttttcgcatccttgaattaaactgccttaactccttttgtggtataagcaaaactacatggactctgtcctggtatccttttcctgtgtggttgccccgtgtcctctggcctagggttaagtgtgcaagataactactcgtgagtattcagaatgttgttcctaataaatgcacttgttgtctgtcttctttaatcaaatcacatcttatatacagcagtcagagatgagtatactagaatcatggattgctggaggtcttttaatctgatgttctcagaagggggtggatttaaatcctgaaataaatatttcaacacaagaac

SEQ ID NO: 10242 - protein, 244 aa, Homo sapiens; identical to SEQ ID NO: 10210

SEQ ID NO: 10243 - DNA, 764 bp, Homo sapiens
ggggcgccccgagcgtggcagcgcgctaggcggcagcagcgggcgcggagcggggcgcggccgccgcgcgttccctcttggcggggttggccggccggggcggggcgcggcgctccggctcgaggcattcggagctgcgggagccgggctggcaggagcaggatggcggcggcggcggctgcaggcgaggcgcgccgggtgctggtgtacggcggcaggggcgctctgggttctcgatgcgtgcaggcttttcgggcccgcaactggtgggttgccagcgttgatgtggtggagaatgaagaggccagcgctagcatcattgttaaaatgacagactcgttcactgagcaggctgaccaggtgactgctgaggttggaaagctcttgggtgaagagaaggtggatgcaattctttgcgttgctggaggatgggccgggggcaatgccaaatccaagtctctctttaagaactgtgacctgattggtataagcaaaactacatggactctgtcctggtatccttttcctgtgtggttgccccgtgtcctctggcctagggttaagtgtgcaagataactactcgtgagtattcagaatgttgttcctaataaatgcacttgttgtctgtcttctttaatcaaatcacatcttatatacagcagtcagagatgagtatactagaatcatggattgctggaggtcttttaatctgatgttctcagaagggggtggatttaaatcctgaaataaatatttcaacacaa

SEQ ID NO: 10244 - protein, 137 aa, Homo sapiens [sequence omitted]

SEQ ID NO: 10245 - DNA, 754 bp, Homo sapiens
ctgacttcagctcctggacacccttagaattcctagttgaaactttccatgactggatcacagggaaaaaccgaccgagctcaggaagcctaatccaggtggtaaccacagaaggaaggacggaactcaccccagcatatttttaggcctcatctcagtgcctatgaggggcctgccagaaaagtcactaacctgtctcagtgtggccttgtccagccttgtgttttctgtaacccctgtttgtggtacgagataatgagtcctatttttctctcacataatatgcatttgctctcctaggacagtgtaatacatttatgtgaagtaaagacatgcgagactggtggcctgcaaatagcatccgttgatctgtgttaactgcatagggagggctctgcatagcacctgctatagcggtgtcatgttggatcgcttttgtgactgttcatctgtccttgacagtggctgtcatcttgactactttgttgatttgttggtattggggacattttaaaggctgagttatttttgaatgtcatgtttatgtcatagacgtagttttcgcatccttgaattaaactgccttaactccttttgtggtataagcaaaactacatggactctgtcctggtatccttttcctgtgtggttgccccgtgtcctctggcctagggttaagtgtgcaagataactactcgtgagtattcagaatgttgttcctaataaatgcacttgttgtctgtcttctttaatc

SEQ ID NO: 10246 - protein, 52 aa, Homo sapiens; identical to SEQ ID NO: 10184

SEQ ID NO: 10247 - DNA, 1080 bp, Homo sapiens
gctctctgccattttttgatgggggttggtgagggcgtctgacctgaaggaggaggccagatgcagctatttataaagtttttagggaatagagatctcaagagaagattgcatgtccttgctgtccccctggccgccagtggtcactgagccatcttctccccatttcccaggtatgatcgggtacggcatggccaagggtgctgttcaccagctctgccagagcctggctgggaagaacagcggcatgccgcccggggcagccgccatcgctgtgctcccggttaccctggataccccgatgaacaggaaatcaatgcctgaggctgacttcagctcctggacacccttagaattcctagttgaaactttccatgactggatcacagggaaaaaccgaccgagctcaggaagcctaatccaggtggtaaccacagaaggaaggacggaactcaccccagcatatttttaggcctcatctcagtgcctatgaggggcctgccagaaaagtcactaacctgtctcagtgtggccttgtccagccttgtgttttctgtaacccctgtttgtggtacgagataatgagtcctatttttctctcacataatatgcatttgctctcctaggacagtgtaatacatttatgtgaagtaaagacatgcgagactggtggcctgcaaatagcatccgttgatctgtgttaactgcatagggagggctctgcatagcacctgctatagcggtgtcatgttggatcgcttttgtgactgttcatctgtccttgacagtggctgtcatcttgactactttgttgatttgttggtattggggacattttaaaggctgagttatttttgaatgtcatgtttatgtcatagacgtagttttcgcatccttgaattaaactgccttaactccttttgtggtataagcaaaactacatggactctgtcctggtatccttttcctgtgtggttgccccgtgtcctctggcctagggttaagtgtgcaagataactactcgtgagtattcagaatgttgttcctaataaatgcacttgttgtctgtcttctttaatc

SEQ ID NO: 10248 - protein, 119 aa, Homo sapiens; identical to SEQ ID NO: 10186

SEQ ID NO: 10249 - DNA, 1312 bp, Homo sapiens
ggggcgccccgagcgtggcagcgcgctaggcggcagcagcgggcgcggagcggggcgcggccgccgcgcgttccctcttggcggggttggccggccggggcggggcgcggcgctccggctcgaggcattcggagctgcgggagccgggctggcaggagcaggatggcggcggcggcggctgcaggcgaggcgcgccgggtgctggtgtacggcggcaggggcgctctgggttctcgatgcgtgcaggcttttcgggcccgcaactggtgggttgccagcgttgatgtggtggagaatgaagaggccagcgctagcatcattgttaaaatgacagactcgttcactgagcaggctgaccaggtgactgctgaggttggaaagctcttgggtgaagagaaggtggatgcaattctttgcgttgctggaggatgggccgggggcaatgccaaatccaagtctctctttaagaactgtgacctgatgtggaagcagagcatatggacatcgaccatctccagccatctggctaccaagcatctcaaggaaggaggcctcctgaccttggctggcgcaaaggctgccctggatgggactcctgaactttccatgactggatcacagggaaaaaccgaccgagctcaggaagcctaatccaggtggtaaccacagaaggaaggacggaactcaccccagcatatttttaggcctcatctcagtgcctatgaggggcctgccagaaaagtcactaacctgtctcagtgtggccttgtccagccttgtgttttctgtaacccctgtttgtggtacgagataatgagtcctatttttctctcacataatatgcatttgctctcctaggacagtgtaatacatttatgtgaagtaaagacatgcgagactggtggcctgcaaatagcatccgttgatctgtgttaactgcatagggagggctctgcatagcacctgctatagcggtgtcatgttggatcgcttttgtgactgttcatctgtccttgacagtggctgtcatcttgactactttgttgatttgttggtattggggacattttaaaggctgagttatttttgaatgtcatgtttatgtcatagacgtagttttcgcatccttgaattaaactgccttaactccttttgtggtataagcaaaactacatggactctgtcctggtatccttttcctgtgtggttgccccgtgtcctctggcctagggttaagtgtgcaagataactactcgtgagtattcagaatgttgttcctaataaatgcacttgttgtctgtcttctttaatc

SEQ ID NO: 10250 - protein, 162 aa, Homo sapiens; identical to SEQ ID NO: 10192

SEQ ID NO: 10251 - DNA, 1104 bp, Homo sapiens
ggggcgccccgagcgtggcagcgcgctaggcggcagcagcgggcgcggagcggggcgcggccgccgcgcgttccctcttggcggggttggccggccggggcggggcgcggcgctccggctcgaggcattcggagctgcgggagccgggctggcaggagcaggatggcggcggcggcggctgcaggcgaggcgcgccgggtgctggtgtacggcggcaggggcgctctgggttctcgatgcgtgcaggcttttcgggcccgcaactggcggcatgccgcccggggcagccgccatcgctgtgctcccggttaccctggataccccgatgaacaggaaatcaatgcctgaggctgacttcagctcctggacacccttagaattcctagttgaaactttccatgactggatcacagggaaaaaccgaccgagctcaggaagcctaatccaggtggtaaccacagaaggaaggacggaactcaccccagcatatttttaggcctcatctcagtgcctatgaggggcctgccagaaaagtcactaacctgtctcagtgtggccttgtccagccttgtgttttctgtaacccctgtttgtggtacgagataatgagtcctatttttctctcacataatatgcatttgctctcctaggacagtgtaatacatttatgtgaagtaaagacatgcgagactggtggcctgcaaatagcatccgttgatctgtgttaactgcatagggagggctctgcatagcacctgctatagcggtgtcatgttggatcgcttttgtgactgttcatctgtccttgacagtggctgtcatcttgactactttgttgatttgttggtattggggacattttaaaggctgagttatttttgaatgtcatgtttatgtcatagacgtagttttcgcatccttgaattaaactgccttaactccttttgtggtataagcaaaactacatggactctgtcctggtatccttttcctgtgtggttgccccgtgtcctctggcctagggttaagtgtgcaagataactactcgtgagtattcagaatgttgttcctaataaatgcacttgttgtctgtcttctttaatc

SEQ ID NO: 10252 - protein, 74 aa, Homo sapiens; identical to SEQ ID NO: 10194

SEQ ID NO: 10253 - DNA, 1129 bp, Homo sapiens
ggggcgccccgagcgtggcagcgcgctaggcggcagcagcgggcgcggagcggggcgcggccgccgcgcgttccctcttggcggggttggccggccggggcggggcgcggcgctccggctcgaggcattcggagctgcgggagccgggctggcaggagcaggatggcggcggcggcggctgcaggcgaggcgcgccgggtgctggtgtacggcggcaggggcgctctgggttctcgatgcgtgcaggcttttcgggcccgcaactggtgggttgccagcgttgatgtggtggagaatgaagaggccagcgctagcatcattgttaaaatgacagactcgttcactgagcaggctgaccaggtacaatgcctgaggctgacttcagctcctggacacccttagaattcctagttgaaactttccatgactggatcacagggaaaaaccgaccgagctcaggaagcctaatccaggtggtaaccacagaaggaaggacggaactcaccccagcatatttttaggcctcatctcagtgcctatgaggggcctgccagaaaagtcactaacctgtctcagtgtggccttgtccagccttgtgttttctgtaacccctgtttgtggtacgagataatgagtcctatttttctctcacataatatgcatttgctctcctaggacagtgtaatacatttatgtgaagtaaagacatgcgagactggtggcctgcaaatagcatccgttgatctgtgttaactgcatagggagggctctgcatagcacctgctatagcggtgtcatgttggatcgcttttgtgactgttcatctgtccttgacagtggctgtcatcttgactactttgttgatttgttggtattggggacattttaaaggctgagttatttttgaatgtcatgtttatgtcatagacgtagttttcgcatccttgaattaaactgccttaactccttttgtggtataagcaaaactacatggactctgtcctggtatccttttcctgtgtggttgccccgtgtcctctggcctagggttaagtgtgcaagataactactcgtgagtattcagaatgttgttcctaataaatgcacttgttgtctgtcttctttaatc

SEQ ID NO: 10254 - protein, 79 aa, Homo sapiens; identical to SEQ ID NO: 10196

SEQ ID NO: 10255 - DNA, 908 bp, Homo sapiens
ggggcgccccgagcgtggcagcgcgctaggcggcagcagcgggcgcggagcggggcgcggccgccgcgcgttccctcttggcggggttggccggccggggcggggcgcggcgctccggctcgaggcattcggagctgcgggagccgggctggcaggagcaggatggcggcggcggcggctgcaggcgaggcgcgccgggtgctggtgtacggcggcaggggcgctctgggttctcgatgcgtgcaggcttttcgggcccgcaactggtgggttgccagcgttgatgtggtggagaatgaagaggccagcgctagcatcattgttaaaatgacaaaaagtcactaacctgtctcagtgtggccttgtccagccttgtgttttctgtaacccctgtttgtggtacgagataatgagtcctatttttctctcacataatatgcatttgctctcctaggacagtgtaatacatttatgtgaagtaaagacatgcgagactggtggcctgcaaatagcatccgttgatctgtgttaactgcatagggagggctctgcatagcacctgctatagcggtgtcatgttggatcgcttttgtgactgttcatctgtccttgacagtggctgtcatcttgactactttgttgatttgttggtattggggacattttaaaggctgagttatttttgaatgtcatgtttatgtcatagacgtagttttcgcatccttgaattaaactgccttaactccttttgtggtataagcaaaactacatggactctgtcctggtatccttttcctgtgtggttgccccgtgtcctctggcctagggttaagtgtgcaagataactactcgtgagtattcagaatgttgttcctaataaatgcacttgttgtctgtcttctttaatc

SEQ ID NO: 10256 - protein, 60 aa, Homo sapiens; identical to SEQ ID NO: 10198

SEQ ID NO: 10257 - DNA, 1396 bp, Homo sapiens
ggggcgccccgagcgtggcagcgcgctaggcggcagcagcgggcgcggagcggggcgcggccgccgcgcgttccctcttggcggggttggccggccggggcggggcgcggcgctccggctcgaggcattcggagctgcgggagccgggctggcaggagcaggatggcggcggcggcggctgcaggcgaggcgcgccgggtgctggtgtacggcggcaggggcgctctgggttctcgatgcgtgcaggcttttcgggcccgcaactggtgggttgccagcgttgatgtggtggagaatgaagaggccagcgctagcatcattgttaaaatgacagactcgttcactgagcaggctgaccaggtgactgctgaggttggaaagctcttgggtgaagagaaggtggatgcaattctttgcgttgctggaggatgggccgggggcaatgccaaatccaagtctctctttaagaactgtgacctgatgtggaagcagagcatatggacatcgaccatctccagccatctggctaccaagcatctcaaggaaggaggcctcctgaccttggctggcgcaaaggctgccctggatgggactcctgggttaccctggataccccgatgaacaggaaatcaatgcctgaggctgacttcagctcctggacacccttagaattcctagttgaaactttccatgactggatcacagggaaaaaccgaccgagctcaggaagcctaatccaggtggtaaccacagaaggaaggacggaactcaccccagcatatttttaggcctcatctcagtgcctatgaggggcctgccagaaaagtcactaacctgtctcagtgtggccttgtccagccttgtgttttctgtaacccctgtttgtggtacgagataatgagtcctatttttctctcacataatatgcatttgctctcctaggacagtgtaatacatttatgtgaagtaaagacatgcgagactggtggcctgcaaatagcatccgttgatctgtgttaactgcatagggagggctctgcatagcacctgctatagcggtgtcatgttggatcgcttttgtgactgttcatctgtccttgacagtggctgtcatcttgactactttgttgatttgttggtattggggacattttaaaggctgagttatttttgaatgtcatgtttatgtcatagacgtagttttcgcatccttgaattaaactgccttaactccttttgtggtataagcaaaactacatggactctgtcctggtatccttttcctgtgtggttgccccgtgtcctctggcctagggttaagtgtgcaagataactactcgtgagtattcagaatgttgttcctaataaatgcacttgttgtctgtcttctttaatc

SEQ ID NO: 10258 - protein, 152 aa, Homo sapiens; identical to SEQ ID NO: 10200

SEQ ID NO: 10259 - DNA, 1438 bp, Homo sapiens
ggggcgccccgagcgtggcagcgcgctaggcggcagcagcgggcgcggagcggggcgcggccgccgcgcgttccctcttggcggggttggccggccggggcggggcgcggcgctccggctcgaggcattcggagctgcgggagccgggctggcaggagcaggatggcggcggcggcggctgcaggcgaggcgcgccgggtgctggtgtacggcggcaggggcgctctgggttctcgatgcgtgcaggcttttcgggcccgcaactggatttgagtaacaacagataccatatggccagcaaagcctaagtgggttgccagcgttgatgtggtggagaatgaagaggccagcgctagcatcattgttaaaatgacagactcgttcactgagcaggctgaccaggtgactgctgaggttggaaagctcttgggtgaagagaaggtggatgcaattctttgcgttgctggaggatgggccgggggcaatgccaaatccaagtctctctttaagaactgtgacctgatgtggaagcagagcatatggacatcgaccatctccagccatctggctaccaagcatctcaaggaaggaggcctcctgaccttggctggcgcaaaggctgccctggatgggactcctgggttaccctggataccccgatgaacaggaaatcaatgcctgaggctgacttcagctcctggacacccttagaattcctagttgaaactttccatgactggatcacagggaaaaaccgaccgagctcaggaagcctaatccaggtggtaaccacagaaggaaggacggaactcaccccagcatatttttaggcctcatctcagtgcctatgaggggcctgccagaaaagtcactaacctgtctcagtgtggccttgtccagccttgtgttttctgtaacccctgtttgtggtacgagataatgagtcctatttttctctcacataatatgcatttgctctcctaggacagtgtaatacatttatgtgaagtaaagacatgcgagactggtggcctgcaaatagcatccgttgatctgtgttaactgcatagggagggctctgcatagcacctgctatagcggtgtcatgttggatcgcttttgtgactgttcatctgtccttgacagtggctgtcatcttgactactttgttgatttgttggtattggggacattttaaaggctgagttatttttgaatgtcatgtttatgtcatagacgtagttttcgcatccttgaattaaactgccttaactccttttgtggtataagcaaaactacatggactctgtcctggtatccttttcctgtgtggttgccccgtgtcctctggcctagggttaagtgtgcaagataactactcgtgagtattcagaatgttgttcctaataaatgcacttgttgtctgtcttctttaatc

SEQ ID NO: 10260 - protein, 97 aa, Homo sapiens; identical to SEQ ID NO: 10202

SEQ ID NO: 10261 - DNA, 1408 bp, Homo sapiens
ggggcgccccgagcgtggcagcgcgctaggcggcagcagcgggcgcggagcggggcgcggccgccgcgcgttccctcttggcggggttggccggccggggcggggcgcggcgctccggctcgaggcattcggagctgcgggagccgggctggcaggagcaggatggcggcggcggcggctgcaggcgaggcgcgccgggtgctggtgtacggcggcaggggcgctctgggttctcgatgcgtgcaggcttttcgggcccgcaactggtgggttgccagcgttgatgtggtggagaatgaagaggccagcgctagcatcattgttaaaatgacagactcgttcactgagcaggctgaccagctctctttaagaactgtgacctgatgtggaagcagagcatatggacatcgaccatctccagccatctggctaccaagcatctcaaggaaggaggcctcctgaccttggctggcgcaaaggctgccctggatgggactcctggtatgatcgggtacggcatggccaagggtgctgttcaccagctctgccagagcctggctgggaagaacagcggcatgccgcccggggcagccgccatcgctgtgctcccggttaccctggataccccgatgaacaggaaatcaatgcctgaggctgacttcagctcctggacacccttagaattcctagttgaaactttccatgactggatcacagggaaaaaccgaccgagctcaggaagcctaatccaggtggtaaccacagaaggaaggacggaactcaccccagcatatttttaggcctcatctcagtgcctatgaggggcctgccagaaaagtcactaacctgtctcagtgtggccttgtccagccttgtgttttctgtaacccctgtttgtggtacgagataatgagtcctatttttctctcacataatatgcatttgctctcctaggacagtgtaatacatttatgtgaagtaaagacatgcgagactggtggcctgcaaatagcatccgttgatctgtgttaactgcatagggagggctctgcatagcacctgctatagcggtgtcatgttggatcgcttttgtgactgttcatctgtccttgacagtggctgtcatcttgactactttgttgatttgttggtattggggacattttaaaggctgagttatttttgaatgtcatgtttatgtcatagacgtagttttcgcatccttgaattaaactgccttaactccttttgtggtataagcaaaactacatggactctgtcctggtatccttttcctgtgtggttgccccgtgtcctctggcctagggttaagtgtgcaagataactactcgtgagtattcagaatgttgttcctaataaatgcacttgttgtctgtcttctttaatc

SEQ ID NO: 10262 - protein, 138 aa, Homo sapiens [sequence omitted]

SEQ ID NO: 10263 - DNA, 1213 bp, Homo sapiens
ggggcgccccgagcgtggcagcgcgctaggcggcagcagcgggcgcggagcggggcgcggccgccgcgcgttccctcttggcggggttggccggccggggcggggcgcggcgctccggctcgaggcattcggagctgcgggagccgggctggcaggagcaggatggcggcggcggcggctgcaggcgaggcgcgccgggtgctggtgtacggcggcaggggcgctctgggttctcgatgcgtgcaggcttttcgggcccgcaactggtgggttgccagcgttgatgtggtggagaatgaagaggccagcgctagcatcattgttaaaatgacagactcgttcactgagcaggctgaccaggtgactgctgaggttggaaagctcttgggtgaagagaaggtggatgcaattctttgcgttgctggaggatgggccgggggcaatgccaaatccaagtctctctttaagaactgtgacctgatgtggaagcagagcatatggacatcgaccatctccagccatctggctaccaagcatctcaaggaagcctaatccaggtggtaaccacagaaggaaggacggaactcaccccagcatatttttaggcctcatctcagtgcctatgaggggcctgccagaaaagtcactaacctgtctcagtgtggccttgtccagccttgtgttttctgtaacccctgtttgtggtacgagataatgagtcctatttttctctcacataatatgcatttgctctcctaggacagtgtaatacatttatgtgaagtaaagacatgcgagactggtggcctgcaaatagcatccgttgatctgtgttaactgcatagggagggctctgcatagcacctgctatagcggtgtcatgttggatcgcttttgtgactgttcatctgtccttgacagtggctgtcatcttgactactttgttgatttgttggtattggggacattttaaaggctgagttatttttgaatgtcatgtttatgtcatagacgtagttttcgcatccttgaattaaactgccttaactccttttgtggtataagcaaaactacatggactctgtcctggtatccttttcctgtgtggttgccccgtgtcctctggcctagggttaagtgtgcaagataactactcgtgagtattcagaatgttgttcctaataaatgcacttgttgtctgtcttctttaatc

SEQ ID NO: 10264 - protein, 129 aa, Homo sapiens; identical to SEQ ID NO: 10188

SEQ ID NO: 10265 - DNA, 1322 bp, Homo sapiens
ggggcgccccgagcgtggcagcgcgctaggcggcagcagcgggcgcggagcggggcgcggccgccgcgcgttccctcttggcggggttggccggccggggcggggcgcggcgctccggctcgaggcattcggagctgcgggagccgggctggcaggagcaggatggcggcggcggcggctgcaggcgaggcgcgccgggtgctggtgtacggcggcaggggcgctctgggttctcgatgcgtgcaggcttttcgggcccgcaactggtgggttgccagcgttgatgtggtggagaatgaagaggccagcgctagcatcattgttaaaatgacagactcgttcactgagcagcatctcaaggaaggaggcctcctgaccttggctggcgcaaaggctgccctggatgggactcctggtatgatcgggtacggcatggccaagggtgctgttcaccagctctgccagagcctggctgggaagaacagcggcatgccgcccggggcagccgccatcgctgtgctcccggttaccctggataccccgatgaacaggaaatcaatgcctgaggctgacttcagctcctggacacccttagaattcctagttgaaactttccatgactggatcacagggaaaaaccgaccgagctcaggaagcctaatccaggtggtaaccacagaaggaaggacggaactcaccccagcatatttttaggcctcatctcagtgcctatgaggggcctgccagaaaagtcactaacctgtctcagtgtggccttgtccagccttgtgttttctgtaacccctgtttgtggtacgagataatgagtcctatttttctctcacataatatgcatttgctctcctaggacagtgtaatacatttatgtgaagtaaagacatgcgagactggtggcctgcaaatagcatccgttgatctgtgttaactgcatagggagggctctgcatagcacctgctatagcggtgtcatgttggatcgcttttgtgactgttcatctgtccttgacagtggctgtcatcttgactactttgttgatttgttggtattggggacattttaaaggctgagttatttttgaatgtcatgtttatgtcatagacgtagttttcgcatccttgaattaaactgccttaactccttttgtggtataagcaaaactacatggactctgtcctggtatccttttcctgtgtggttgccccgtgtcctctggcctagggttaagtgtgcaagataactactcgtgagtattcagaatgttgttcctaataaatgcacttgttgtctgtcttctttaatc

SEQ ID NO: 10266 - protein, 183 aa, Homo sapiens; identical to SEQ ID NO: 10190

SEQ ID NO: 10267 - DNA, 1321 bp, Homo sapiens
acagtccctccgggtggcggggcgccccgagcgtggcagcgcgctaggcggcagcagcgggcgcggagcggggcgcggccgccgcgcgttccctcttggcggggttggccggccggggcggggcgcggcgctccggctcgaggcattcggagctgcgggagccgggctggcaggagcaggatggcggcggcggcggctgcaggcgaggcgcgccgggtgctggtgtacggcggcaggggcgctctgggttctcgatgcgtgcaggcttttcgggcccgcaactgggtgactgctgaggttggaaagctcttgggtgaagagaaggtggatgcaattctttgcgttgctggaggatgggccgggggcaatgccaaatccaagtctctctttaagaactgtgacctgatgtggaagcagagcatatggacatcgaccatctccagccatctggctaccaagcatctcaaggaaggaggcctcctgaccttggctggcgcaaaggctgccctggatgggactcctgggttaccctggataccccgatgaacaggaaatcaatgcctgaggctgacttcagctcctggacacccttagaattcctagttgaaactttccatgactggatcacagggaaaaaccgaccgagctcaggaagcctaatccaggtggtaaccacagaaggaaggacggaactcaccccagcatatttttaggcctcatctcagtgcctatgaggggcctgccagaaaagtcactaacctgtctcagtgtggccttgtccagccttgtgttttctgtaacccctgtttgtggtacgagataatgagtcctatttttctctcacataatatgcatttgctctcctaggacagtgtaatacatttatgtgaagtaaagacatgcgagactggtggcctgcaaatagcatccgttgatctgtgttaactgcatagggagggctctgcatagcacctgctatagcggtgtcatgttggatcgcttttgtgactgttcatctgtccttgacagtggctgtcatcttgactactttgttgatttgttggtattggggacattttaaaggctgagttatttttgaatgtcatgtttatgtcatagacgtagttttcgcatccttgaattaaactgccttaactccttttgtggtataagcaaaactacatggactctgtcctggtatccttttcctgtgtggttgccccgtgtcctctggcctagggttaagtgtgcaagataactactcgtgagtattcagaatgttgttcctaataaatgcacttgttgtctgtcttctttaatc

SEQ ID NO: 10268 - protein, 121 aa, Homo sapiens; identical to SEQ ID NO: 10206

SEQ ID NO: 10269 - DNA, 1430 bp, Homo sapiens
acagtccctccgggtggcggggcgccccgagcgtggcagcgcgctaggcggcagcagcgggcgcggagcggggcgcggccgccgcgcgttccctcttggcggggttggccggccggggcggggcgcggcgctccggctcgaggcattcggagctgcgggagccgggctggcaggagcaggatggcggcggcggcggctgcaggcgaggcgcgccgggtgctggtgtacggcggcaggggcgctctgggttctcgatgcgtgcaggcttttcgggcccgcaactgggtgactgctgaggttggaaagctcttgggtgaagagaaggtggatgcaattctttgcgttgctggaggatgggccgggggcaatgccaaatccaagtctctctttaagaactgtgacctgatgtggaagcagagcatatggacatcgaccatctccagccatctggctaccaagcatctcaaggaaggaggcctcctgaccttggctggcgcaaaggctgccctggatgggactcctggtatgatcgggtacggcatggccaagggtgctgttcaccagctctgccagagcctggctgggaagaacagcggcatgccgcccggggcagccgccatcgctgtgctcccggttaccctggataccccgatgaacaggaaatcaatgcctgaggctgacttcagctcctggacacccttagaattcctagttgaaactttccatgactggatcacagggaaaaaccgaccgagctcaggaagcctaatccaggtggtaaccacagaaggaaggacggaactcaccccagcatatttttaggcctcatctcagtgcctatgaggggcctgccagaaaagtcactaacctgtctcagtgtggccttgtccagccttgtgttttctgtaacccctgtttgtggtacgagataatgagtcctatttttctctcacataatatgcatttgctctcctaggacagtgtaatacatttatgtgaagtaaagacatgcgagactggtggcctgcaaatagcatccgttgatctgtgttaactgcatagggagggctctgcatagcacctgctatagcggtgtcatgttggatcgcttttgtgactgttcatctgtccttgacagtggctgtcatcttgactactttgttgatttgttggtattggggacattttaaaggctgagttatttttgaatgtcatgtttatgtcatagacgtagttttcgcatccttgaattaaactgccttaactccttttgtggtataagcaaaactacatggactctgtcctggtatccttttcctgtgtggttgccccgtgtcctctggcctagggttaagtgtgcaagataactactcgtgagtattcagaatgttgttcctaataaatgcacttgttgtctgtcttctttaatc

SEQ ID NO: 10270 - protein, 213 aa, Homo sapiens; identical to SEQ ID NO: 10208

SEQ ID NO: 10271 - DNA, 1527 bp, Homo sapiens
agttacagtccctccgggtggcggggcgccccgagcgtggcagcgcgctaggcggcagcagcgggcgcggagcggggcgcggccgccgcgcgttccctcttggcggggttggccggccggggcggggcgcggcgctccggctcgaggcattcggagctgcgggagccgggctggcaggagcaggatggcggcggcggcggctgcaggcgaggcgcgccgggtgctggtgtacggcggcaggggcgctctgggttctcgatgcgtgcaggcttttcgggcccgcaactggtgggttgccagcgttgatgtggtggagaatgaagaggccagcgctagcatcattgttaaaatgacagactcgttcactgagcaggctgaccaggtgactgctgaggttggaaagctcttgggtgaagagaaggtggatgcaattctttgcgttgctggaggatgggccgggggcaatgccaaatccaagtctctctttaagaactgtgacctgatgtggaagcagagcatatggacatcgaccatctccagccatctggctaccaagcatctcaaggaaggaggcctcctgaccttggctggcgcaaaggctgccctggatgggactcctggtatgatcgggtacggcatggccaagggtgctgttcaccagctctgccagagcctggctgggaagaacagcggcatgccgcccggggcagccgccatcgctgtgctcccggttaccctggataccccgatgaacaggaaatcaatgcctgaggctgacttcagctcctggacacccttagaattcctagttgaaactttccatgactggatcacagggaaaaaccgaccgagctcaggaagcctaatccaggtggtaaccacagaaggaaggacggaactcaccccagcatatttttaggcctcatctcagtgcctatgaggggcctgccagaaaagtcactaacctgtctcagtgtggccttgtccagccttgtgttttctgtaacccctgtttgtggtacgagataatgagtcctatttttctctcacataatatgcatttgctctcctaggacagtgtaatacatttatgtgaagtaaagacatgcgagactggtggcctgcaaatagcatccgttgatctgtgttaactgcatagggagggctctgcatagcacctgctatagcggtgtcatgttggatcgcttttgtgactgttcatctgtccttgacagtggctgtcatcttgactactttgttgatttgttggtattggggacattttaaaggctgagttatttttgaatgtcatgtttatgtcatagacgtagttttcgcatccttgaattaaactgccttaactccttttgtggtataagcaaaactacatggactctgtcctggtatccttttcctgtgtggttgccccgtgtcctctggcctagggttaagtgtgcaagataactactcgtgagtattcagaatgttgttcctaataaatgcacttgttgtctgtcttctttaatc

SEQ ID NO: 10272 - protein, 244 aa, Homo sapiens; identical to SEQ ID NO: 10210

SEQ ID NO: 10273 - DNA, 607 bp, Homo sapiens
ctgacttcagctcctggacacccttagaattcctagttgaaactttccatgactggatcacagggaaaaaccgaccgagctcaggaagcctaatccaggtggtaaccacagaaggaaggacggaactcaccccagcatatttttaggcctcatctcagtgcctatgaggggcctgccagaaaagtcactaacctgtctcagtgtggccttgtccagccttgtgttttctgtaacccctgtttgtggtacgagataatgagtcctatttttctctcacataatatgcatttgctctcctaggacagtgtaatacatttatgtgaagtaaagacatgcgagactggtggcctgcaaatagcatccgttgatctgtgttaactgcatagggagggctctgcatagcacctgctatagcggtgtcatgttggatcgcttttgtgactgttcatctgtccttgacagtggctgtcatcttgactactttgttgatttgttggtattggggacattttaaaggctgagttatttttgaatgtcatgtttatgtcatagacgtagttttcgcatccttgaattaaactgccttaactccttttgtggtataagc

SEQ ID NO: 10274 - protein, 30 aa, Homo sapiens
MRGLPEKSLTCLSVALSSLVFSVTPVCGTR

SEQ ID NO: 10275 - DNA, 933 bp, Homo sapiens
gctctctgccattttttgatgggggttggtgagggcgtctgacctgaaggaggaggccagatgcagctatttataaagtttttagggaatagagatctcaagagaagattgcatgtccttgctgtccccctggccgccagtggtcactgagccatcttctccccatttcccaggtatgatcgggtacggcatggccaagggtgctgttcaccagctctgccagagcctggctgggaagaacagcggcatgccgcccggggcagccgccatcgctgtgctcccggttaccctggataccccgatgaacaggaaatcaatgcctgaggctgacttcagctcctggacacccttagaattcctagttgaaactttccatgactggatcacagggaaaaaccgaccgagctcaggaagcctaatccaggtggtaaccacagaaggaaggacggaactcaccccagcatatttttaggcctcatctcagtgcctatgaggggcctgccagaaaagtcactaacctgtctcagtgtggccttgtccagccttgtgttttctgtaacccctgtttgtggtacgagataatgagtcctatttttctctcacataatatgcatttgctctcctaggacagtgtaatacatttatgtgaagtaaagacatgcgagactggtggcctgcaaatagcatccgttgatctgtgttaactgcatagggagggctctgcatagcacctgctatagcggtgtcatgttggatcgcttttgtgactgttcatctgtccttgacagtggctgtcatcttgactactttgttgatttgttggtattggggacattttaaaggctgagttatttttgaatgtcatgtttatgtcatagacgtagttttcgcatccttgaattaaactgccttaactccttttgtggtataagc

SEQ ID NO: 10276 - protein, 119 aa, Homo sapiens; identical to SEQ ID NO: 10186

SEQ ID NO: 10277 - DNA, 1165 bp, Homo sapiens
ggggcgccccgagcgtggcagcgcgctaggcggcagcagcgggcgcggagcggggcgcggccgccgcgcgttccctcttggcggggttggccggccggggcggggcgcggcgctccggctcgaggcattcggagctgcgggagccgggctggcaggagcaggatggcggcggcggcggctgcaggcgaggcgcgccgggtgctggtgtacggcggcaggggcgctctgggttctcgatgcgtgcaggcttttcgggcccgcaactggtgggttgccagcgttgatgtggtggagaatgaagaggccagcgctagcatcattgttaaaatgacagactcgttcactgagcaggctgaccaggtgactgctgaggttggaaagctcttgggtgaagagaaggtggatgcaattctttgcgttgctggaggatgggccgggggcaatgccaaatccaagtctctctttaagaactgtgacctgatgtggaagcagagcatatggacatcgaccatctccagccatctggctaccaagcatctcaaggaaggaggcctcctgaccttggctggcgcaaaggctgccctggatgggactcctgaactttccatgactggatcacagggaaaaaccgaccgagctcaggaagcctaatccaggtggtaaccacagaaggaaggacggaactcaccccagcatatttttaggcctcatctcagtgcctatgaggggcctgccagaaaagtcactaacctgtctcagtgtggccttgtccagccttgtgttttctgtaacccctgtttgtggtacgagataatgagtcctatttttctctcacataatatgcatttgctctcctaggacagtgtaatacatttatgtgaagtaaagacatgcgagactggtggcctgcaaatagcatccgttgatctgtgttaactgcatagggagggctctgcatagcacctgctatagcggtgtcatgttggatcgcttttgtgactgttcatctgtccttgacagtggctgtcatcttgactactttgttgatttgttggtattggggacattttaaaggctgagttatttttgaatgtcatgtttatgtcatagacgtagttttcgcatccttgaattaaactgccttaactccttttgtggtataagc

SEQ ID NO: 10278 - protein, 162 aa, Homo sapiens; identical to SEQ ID NO: 10192

SEQ ID NO: 10279 - DNA, 957 bp, Homo sapiens
ggggcgccccgagcgtggcagcgcgctaggcggcagcagcgggcgcggagcggggcgcggccgccgcgcgttccctcttggcggggttggccggccggggcggggcgcggcgctccggctcgaggcattcggagctgcgggagccgggctggcaggagcaggatggcggcggcggcggctgcaggcgaggcgcgccgggtgctggtgtacggcggcaggggcgctctgggttctcgatgcgtgcaggcttttcgggcccgcaactggcggcatgccgcccggggcagccgccatcgctgtgctcccggttaccctggataccccgatgaacaggaaatcaatgcctgaggctgacttcagctcctggacacccttagaattcctagttgaaactttccatgactggatcacagggaaaaaccgaccgagctcaggaagcctaatccaggtggtaaccacagaaggaaggacggaactcaccccagcatatttttaggcctcatctcagtgcctatgaggggcctgccagaaaagtcactaacctgtctcagtgtggccttgtccagccttgtgttttctgtaacccctgtttgtggtacgagataatgagtcctatttttctctcacataatatgcatttgctctcctaggacagtgtaatacatttatgtgaagtaaagacatgcgagactggtggcctgcaaatagcatccgttgatctgtgttaactgcatagggagggctctgcatagcacctgctatagcggtgtcatgttggatcgcttttgtgactgttcatctgtccttgacagtggctgtcatcttgactactttgttgatttgttggtattggggacattttaaaggctgagttatttttgaatgtcatgtttatgtcatagacgtagttttcgcatccttgaattaaactgccttaactccttttgtggtataagc

SEQ ID NO: 10280 - protein, 74 aa, Homo sapiens; identical to SEQ ID NO: 10194

SEQ ID NO: 10281 - DNA, 982 bp, Homo sapiens
ggggcgccccgagcgtggcagcgcgctaggcggcagcagcgggcgcggagcggggcgcggccgccgcgcgttccctcttggcggggttggccggccggggcggggcgcggcgctccggctcgaggcattcggagctgcgggagccgggctggcaggagcaggatggcggcggcggcggctgcaggcgaggcgcgccgggtgctggtgtacggcggcaggggcgctctgggttctcgatgcgtgcaggcttttcgggcccgcaactggtgggttgccagcgttgatgtggtggagaatgaagaggccagcgctagcatcattgttaaaatgacagactcgttcactgagcaggctgaccaggtacaatgcctgaggctgacttcagctcctggacacccttagaattcctagttgaaactttccatgactggatcacagggaaaaaccgaccgagctcaggaagcctaatccaggtggtaaccacagaaggaaggacggaactcaccccagcatatttttaggcctcatctcagtgcctatgaggggcctgccagaaaagtcactaacctgtctcagtgtggccttgtccagccttgtgttttctgtaacccctgtttgtggtacgagataatgagtcctatttttctctcacataatatgcatttgctctcctaggacagtgtaatacatttatgtgaagtaaagacatgcgagactggtggcctgcaaatagcatccgttgatctgtgttaactgcatagggagggctctgcatagcacctgctatagcggtgtcatgttggatcgcttttgtgactgttcatctgtccttgacagtggctgtcatcttgactactttgttgatttgttggtattggggacattttaaaggctgagttatttttgaatgtcatgtttatgtcatagacgtagttttcgcatccttgaattaaactgccttaactccttttgtggtataagc

SEQ ID NO: 10282 - protein, 79 aa, Homo sapiens; identical to SEQ ID NO: 10196

SEQ ID NO: 10283 - DNA, 761 bp, Homo sapiens
ggggcgccccgagcgtggcagcgcgctaggcggcagcagcgggcgcggagcggggcgcggccgccgcgcgttccctcttggcggggttggccggccggggcggggcgcggcgctccggctcgaggcattcggagctgcgggagccgggctggcaggagcaggatggcggcggcggcggctgcaggcgaggcgcgccgggtgctggtgtacggcggcaggggcgctctgggttctcgatgcgtgcaggcttttcgggcccgcaactggtgggttgccagcgttgatgtggtggagaatgaagaggccagcgctagcatcattgttaaaatgacaaaaagtcactaacctgtctcagtgtggccttgtccagccttgtgttttctgtaacccctgtttgtggtacgagataatgagtcctatttttctctcacataatatgcatttgctctcctaggacagtgtaatacatttatgtgaagtaaagacatgcgagactggtggcctgcaaatagcatccgttgatctgtgttaactgcatagggagggctctgcatagcacctgctatagcggtgtcatgttggatcgcttttgtgactgttcatctgtccttgacagtggctgtcatcttgactactttgttgatttgttggtattggggacattttaaaggctgagttatttttgaatgtcatgtttatgtcatagacgtagttttcgcatccttgaattaaactgccttaactccttttgtggtataagc

SEQ ID NO: 10284 - protein, 60 aa, Homo sapiens; identical to SEQ ID NO: 10198

SEQ ID NO: 10285 - DNA, 1249 bp, Homo sapiens
ggggcgccccgagcgtggcagcgcgctaggcggcagcagcgggcgcggagcggggcgcggccgccgcgcgttccctcttggcggggttggccggccggggcggggcgcggcgctccggctcgaggcattcggagctgcgggagccgggctggcaggagcaggatggcggcggcggcggctgcaggcgaggcgcgccgggtgctggtgtacggcggcaggggcgctctgggttctcgatgcgtgcaggcttttcgggcccgcaactggtgggttgccagcgttgatgtggtggagaatgaagaggccagcgctagcatcattgttaaaatgacagactcgttcactgagcaggctgaccaggtgactgctgaggttggaaagctcttgggtgaagagaaggtggatgcaattctttgcgttgctggaggatgggccgggggcaatgccaaatccaagtctctctttaagaactgtgacctgatgtggaagcagagcatatggacatcgaccatctccagccatctggctaccaagcatctcaaggaaggaggcctcctgaccttggctggcgcaaaggctgccctggatgggactcctgggttaccctggataccccgatgaacaggaaatcaatgcctgaggctgacttcagctcctggacacccttagaattcctagttgaaactttccatgactggatcacagggaaaaaccgaccgagctcaggaagcctaatccaggtggtaaccacagaaggaaggacggaactcaccccagcatatttttaggcctcatctcagtgcctatgaggggcctgccagaaaagtcactaacctgtctcagtgtggccttgtccagccttgtgttttctgtaacccctgtttgtggtacgagataatgagtcctatttttctctcacataatatgcatttgctctcctaggacagtgtaatacatttatgtgaagtaaagacatgcgagactggtggcctgcaaatagcatccgttgatctgtgttaactgcatagggagggctctgcatagcacctgctatagcggtgtcatgttggatcgcttttgtgactgttcatctgtccttgacagtggctgtcatcttgactactttgttgatttgttggtattggggacattttaaaggctgagttatttttgaatgtcatgtttatgtcatagacgtagttttcgcatccttgaattaaactgccttaactccttttgtggtataagc

SEQ ID NO: 10286 - protein, 152 aa, Homo sapiens; identical to SEQ ID NO: 10200

SEQ ID NO: 10287 - DNA, 1291 bp, Homo sapiens
ggggcgccccgagcgtggcagcgcgctaggcggcagcagcgggcgcggagcggggcgcggccgccgcgcgttccctcttggcggggttggccggccggggcggggcgcggcgctccggctcgaggcattcggagctgcgggagccgggctggcaggagcaggatggcggcggcggcggctgcaggcgaggcgcgccgggtgctggtgtacggcggcaggggcgctctgggttctcgatgcgtgcaggcttttcgggcccgcaactggatttgagtaacaacagataccatatggccagcaaagcctaagtgggttgccagcgttgatgtggtggagaatgaagaggccagcgctagcatcattgttaaaatgacagactcgttcactgagcaggctgaccaggtgactgctgaggttggaaagctcttgggtgaagagaaggtggatgcaattctttgcgttgctggaggatgggccgggggcaatgccaaatccaagtctctctttaagaactgtgacctgatgtggaagcagagcatatggacatcgaccatctccagccatctggctaccaagcatctcaaggaaggaggcctcctgaccttggctggcgcaaaggctgccctggatgggactcctgggttaccctggataccccgatgaacaggaaatcaatgcctgaggctgacttcagctcctggacacccttagaattcctagttgaaactttccatgactggatcacagggaaaaaccgaccgagctcaggaagcctaatccaggtggtaaccacagaaggaaggacggaactcaccccagcatatttttaggcctcatctcagtgcctatgaggggcctgccagaaaagtcactaacctgtctcagtgtggccttgtccagccttgtgttttctgtaacccctgtttgtggtacgagataatgagtcctatttttctctcacataatatgcatttgctctcctaggacagtgtaatacatttatgtgaagtaaagacatgcgagactggtggcctgcaaatagcatccgttgatctgtgttaactgcatagggagggctctgcatagcacctgctatagcggtgtcatgttggatcgcttttgtgactgttcatctgtccttgacagtggctgtcatcttgactactttgttgatttgttggtattggggacattttaaaggctgagttatttttgaatgtcatgtttatgtcatagacgtagttttcgcatccttgaattaaactgccttaactccttttgtggtataagc

SEQ ID NO: 10288 - protein, 97 aa, Homo sapiens; identical to SEQ ID NO: 10202

SEQ ID NO: 10289 - DNA, 1261 bp, Homo sapiens
ggggcgccccgagcgtggcagcgcgctaggcggcagcagcgggcgcggagcggggcgcggccgccgcgcgttccctcttggcggggttggccggccggggcggggcgcggcgctccggctcgaggcattcggagctgcgggagccgggctggcaggagcaggatggcggcggcggcggctgcaggcgaggcgcgccgggtgctggtgtacggcggcaggggcgctctgggttctcgatgcgtgcaggcttttcgggcccgcaactggtgggttgccagcgttgatgtggtggagaatgaagaggccagcgctagcatcattgttaaaatgacagactcgttcactgagcaggctgaccagctctctttaagaactgtgacctgatgtggaagcagagcatatggacatcgaccatctccagccatctggctaccaagcatctcaaggaaggaggcctcctgaccttggctggcgcaaaggctgccctggatgggactcctggtatgatcgggtacggcatggccaagggtgctgttcaccagctctgccagagcctggctgggaagaacagcggcatgccgcccggggcagccgccatcgctgtgctcccggttaccctggataccccgatgaacaggaaatcaatgcctgaggctgacttcagctcctggacacccttagaattcctagttgaaactttccatgactggatcacagggaaaaaccgaccgagctcaggaagcctaatccaggtggtaaccacagaaggaaggacggaactcaccccagcatatttttaggcctcatctcagtgcctatgaggggcctgccagaaaagtcactaacctgtctcagtgtggccttgtccagccttgtgttttctgtaacccctgtttgtggtacgagataatgagtcctatttttctctcacataatatgcatttgctctcctaggacagtgtaatacatttatgtgaagtaaagacatgcgagactggtggcctgcaaatagcatccgttgatctgtgttaactgcatagggagggctctgcatagcacctgctatagcggtgtcatgttggatcgcttttgtgactgttcatctgtccttgacagtggctgtcatcttgactactttgttgatttgttggtattggggacattttaaaggctgagttatttttgaatgtcatgtttatgtcatagacgtagttttcgcatccttgaattaaactgccttaactccttttgtggtataagc

SEQ ID NO: 10290 - protein, 138 aa, Homo sapiens [sequence omitted]

SEQ ID NO: 10291 - DNA, 1066 bp, Homo sapiens
ggggcgccccgagcgtggcagcgcgctaggcggcagcagcgggcgcggagcggggcgcggccgccgcgcgttccctcttggcggggttggccggccggggcggggcgcggcgctccggctcgaggcattcggagctgcgggagccgggctggcaggagcaggatggcggcggcggcggctgcaggcgaggcgcgccgggtgctggtgtacggcggcaggggcgctctgggttctcgatgcgtgcaggcttttcgggcccgcaactggtgggttgccagcgttgatgtggtggagaatgaagaggccagcgctagcatcattgttaaaatgacagactcgttcactgagcaggctgaccaggtgactgctgaggttggaaagctcttgggtgaagagaaggtggatgcaattctttgcgttgctggaggatgggccgggggcaatgccaaatccaagtctctctttaagaactgtgacctgatgtggaagcagagcatatggacatcgaccatctccagccatctggctaccaagcatctcaaggaagcctaatccaggtggtaaccacagaaggaaggacggaactcaccccagcatatttttaggcctcatctcagtgcctatgaggggcctgccagaaaagtcactaacctgtctcagtgtggccttgtccagccttgtgttttctgtaacccctgtttgtggtacgagataatgagtcctatttttctctcacataatatgcatttgctctcctaggacagtgtaatacatttatgtgaagtaaagacatgcgagactggtggcctgcaaatagcatccgttgatctgtgttaactgcatagggagggctctgcatagcacctgctatagcggtgtcatgttggatcgcttttgtgactgttcatctgtccttgacagtggctgtcatcttgactactttgttgatttgttggtattggggacattttaaaggctgagttatttttgaatgtcatgtttatgtcatagacgtagttttcgcatccttgaattaaactgccttaactccttttgtggtataagc

SEQ ID NO: 10292 - protein, 129 aa, Homo sapiens; identical to SEQ ID NO: 10188

SEQ ID NO: 10293 - DNA, 1175 bp, Homo sapiens
ggggcgccccgagcgtggcagcgcgctaggcggcagcagcgggcgcggagcggggcgcggccgccgcgcgttccctcttggcggggttggccggccggggcggggcgcggcgctccggctcgaggcattcggagctgcgggagccgggctggcaggagcaggatggcggcggcggcggctgcaggcgaggcgcgccgggtgctggtgtacggcggcaggggcgctctgggttctcgatgcgtgcaggcttttcgggcccgcaactggtgggttgccagcgttgatgtggtggagaatgaagaggccagcgctagcatcattgttaaaatgacagactcgttcactgagcagcatctcaaggaaggaggcctcctgaccttggctggcgcaaaggctgccctggatgggactcctggtatgatcgggtacggcatggccaagggtgctgttcaccagctctgccagagcctggctgggaagaacagcggcatgccgcccggggcagccgccatcgctgtgctcccggttaccctggataccccgatgaacaggaaatcaatgcctgaggctgacttcagctcctggacacccttagaattcctagttgaaactttccatgactggatcacagggaaaaaccgaccgagctcaggaagcctaatccaggtggtaaccacagaaggaaggacggaactcaccccagcatatttttaggcctcatctcagtgcctatgaggggcctgccagaaaagtcactaacctgtctcagtgtggccttgtccagccttgtgttttctgtaacccctgtttgtggtacgagataatgagtcctatttttctctcacataatatgcatttgctctcctaggacagtgtaatacatttatgtgaagtaaagacatgcgagactggtggcctgcaaatagcatccgttgatctgtgttaactgcatagggagggctctgcatagcacctgctatagcggtgtcatgttggatcgcttttgtgactgttcatctgtccttgacagtggctgtcatcttgactactttgttgatttgttggtattggggacattttaaaggctgagttatttttgaatgtcatgtttatgtcatagacgtagttttcgcatccttgaattaaactgccttaactccttttgtggtataagc

SEQ ID NO: 10294 - protein, 183 aa, Homo sapiens; identical to SEQ ID NO: 10190

SEQ ID NO: 10295 - DNA, 1174 bp, Homo sapiens
acagtccctccgggtggcggggcgccccgagcgtggcagcgcgctaggcggcagcagcgggcgcggagcggggcgcggccgccgcgcgttccctcttggcggggttggccggccggggcggggcgcggcgctccggctcgaggcattcggagctgcgggagccgggctggcaggagcaggatggcggcggcggcggctgcaggcgaggcgcgccgggtgctggtgtacggcggcaggggcgctctgggttctcgatgcgtgcaggcttttcgggcccgcaactgggtgactgctgaggttggaaagctcttgggtgaagagaaggtggatgcaattctttgcgttgctggaggatgggccgggggcaatgccaaatccaagtctctctttaagaactgtgacctgatgtggaagcagagcatatggacatcgaccatctccagccatctggctaccaagcatctcaaggaaggaggcctcctgaccttggctggcgcaaaggctgccctggatgggactcctgggttaccctggataccccgatgaacaggaaatcaatgcctgaggctgacttcagctcctggacacccttagaattcctagttgaaactttccatgactggatcacagggaaaaaccgaccgagctcaggaagcctaatccaggtggtaaccacagaaggaaggacggaactcaccccagcatatttttaggcctcatctcagtgcctatgaggggcctgccagaaaagtcactaacctgtctcagtgtggccttgtccagccttgtgttttctgtaacccctgtttgtggtacgagataatgagtcctatttttctctcacataatatgcatttgctctcctaggacagtgtaatacatttatgtgaagtaaagacatgcgagactggtggcctgcaaatagcatccgttgatctgtgttaactgcatagggagggctctgcatagcacctgctatagcggtgtcatgttggatcgcttttgtgactgttcatctgtccttgacagtggctgtcatcttgactactttgttgatttgttggtattggggacattttaaaggctgagttatttttgaatgtcatgtttatgtcatagacgtagttttcgcatccttgaattaaactgccttaactccttttgtggtataagc

SEQ ID NO: 10296 - protein, 121 aa, Homo sapiens; identical to SEQ ID NO: 10206

SEQ ID NO: 10297 - DNA, 1283 bp, Homo sapiens
acagtccctccgggtggcggggcgccccgagcgtggcagcgcgctaggcggcagcagcgggcgcggagcggggcgcggccgccgcgcgttccctcttggcggggttggccggccggggcggggcgcggcgctccggctcgaggcattcggagctgcgggagccgggctggcaggagcaggatggcggcggcggcggctgcaggcgaggcgcgccgggtgctggtgtacggcggcaggggcgctctgggttctcgatgcgtgcaggcttttcgggcccgcaactgggtgactgctgaggttggaaagctcttgggtgaagagaaggtggatgcaattctttgcgttgctggaggatgggccgggggcaatgccaaatccaagtctctctttaagaactgtgacctgatgtggaagcagagcatatggacatcgaccatctccagccatctggctaccaagcatctcaaggaaggaggcctcctgaccttggctggcgcaaaggctgccctggatgggactcctggtatgatcgggtacggcatggccaagggtgctgttcaccagctctgccagagcctggctgggaagaacagcggcatgccgcccggggcagccgccatcgctgtgctcccggttaccctggataccccgatgaacaggaaatcaatgcctgaggctgacttcagctcctggacacccttagaattcctagttgaaactttccatgactggatcacagggaaaaaccgaccgagctcaggaagcctaatccaggtggtaaccacagaaggaaggacggaactcaccccagcatatttttaggcctcatctcagtgcctatgaggggcctgccagaaaagtcactaacctgtctcagtgtggccttgtccagccttgtgttttctgtaacccctgtttgtggtacgagataatgagtcctatttttctctcacataatatgcatttgctctcctaggacagtgtaatacatttatgtgaagtaaagacatgcgagactggtggcctgcaaatagcatccgttgatctgtgttaactgcatagggagggctctgcatagcacctgctatagcggtgtcatgttggatcgcttttgtgactgttcatctgtccttgacagtggctgtcatcttgactactttgttgatttgttggtattggggacattttaaaggctgagttatttttgaatgtcatgtttatgtcatagacgtagttttcgcatccttgaattaaactgccttaactccttttgtggtataagc

SEQ ID NO: 10298 - protein, 213 aa, Homo sapiens; identical to SEQ ID NO: 10208

SEQ ID NO: 10299 - DNA, 1380 bp, Homo sapiens
agttacagtccctccgggtggcggggcgccccgagcgtggcagcgcgctaggcggcagcagcgggcgcggagcggggcgcggccgccgcgcgttccctcttggcggggttggccggccggggcggggcgcggcgctccggctcgaggcattcggagctgcgggagccgggctggcaggagcaggatggcggcggcggcggctgcaggcgaggcgcgccgggtgctggtgtacggcggcaggggcgctctgggttctcgatgcgtgcaggcttttcgggcccgcaactggtgggttgccagcgttgatgtggtggagaatgaagaggccagcgctagcatcattgttaaaatgacagactcgttcactgagcaggctgaccaggtgactgctgaggttggaaagctcttgggtgaagagaaggtggatgcaattctttgcgttgctggaggatgggccgggggcaatgccaaatccaagtctctctttaagaactgtgacctgatgtggaagcagagcatatggacatcgaccatctccagccatctggctaccaagcatctcaaggaaggaggcctcctgaccttggctggcgcaaaggctgccctggatgggactcctggtatgatcgggtacggcatggccaagggtgctgttcaccagctctgccagagcctggctgggaagaacagcggcatgccgcccggggcagccgccatcgctgtgctcccggttaccctggataccccgatgaacaggaaatcaatgcctgaggctgacttcagctcctggacacccttagaattcctagttgaaactttccatgactggatcacagggaaaaaccgaccgagctcaggaagcctaatccaggtggtaaccacagaaggaaggacggaactcaccccagcatatttttaggcctcatctcagtgcctatgaggggcctgccagaaaagtcactaacctgtctcagtgtggccttgtccagccttgtgttttctgtaacccctgtttgtggtacgagataatgagtcctatttttctctcacataatatgcatttgctctcctaggacagtgtaatacatttatgtgaagtaaagacatgcgagactggtggcctgcaaatagcatccgttgatctgtgttaactgcatagggagggctctgcatagcacctgctatagcggtgtcatgttggatcgcttttgtgactgttcatctgtccttgacagtggctgtcatcttgactactttgttgatttgttggtattggggacattttaaaggctgagttatttttgaatgtcatgtttatgtcatagacgtagttttcgcatccttgaattaaactgccttaactccttttgtggtataagc

SEQ ID NO: 10300 - protein, 244 aa, Homo sapiens; identical to SEQ ID NO: 10210

SEQ ID NO: 10301 - DNA, 1335 bp, Homo sapiens
agttacagtccctccgggtggcggggcgccccgagcgtggcagcgcgctaggcggcagcagcgggcgcggagcggggcgcggccgccgcgcgttccctcttggcggggttggccggccggggcggggcgcggcgctccggctcgaggcattcggagctgcgggagccgggctggcaggagcaggatggcggcggcggcggctgcaggcgaggcgcgccgggtgctggtgtacggcggcaggggcgctctgggttctcgatgcgtgcaggcttttcgggcccgcaactggtgggttgccagcgttgatgtggtggagaatgaagaggccagcgctagcatcattgttaaaatgacagactcgttcactgagcaggctgaccaggtgactgctgaggttggaaagctcttgggtgaagagaaggtggatgcaattctttgcgttgctggaggatgggccgggggcaatgccaaatccaagtctctctttaagaactgtgacctgatgtggaagcagagcatatggacatcgaccatctccagccatctggctaccaagcatctcaaggaaggaggcctcctgaccttggctggcgcaaaggctgccctggatgggactcctggtatgatcgggtacggcatggccaagggtgctgttcaccagctctgccagagcctggctgggaagaacagcggcatgccgcccggggcagccgccatcgctgtgctcccggttaccctggataccccgatgaacaggaaatcaatgcctgaggctgacttcagctcctggacacccttagaattcctagttgaaactttccatgactggatcacagggaaaaaccgaccgagctcaggaagcctaatccaggtggtaaccacagaaggaaggacggaactcaccccagcatatttttaggcctcatctcagtgcctatgaggggcctgccagaaaagtcactaacctgtctcagtgtggccttgtccagccttgtgttttctgtaacccctgtttgtggtacgagataatgagtcctatttttctctcacataatatgcatttgctctcctaggacagtgtaatacatttatgtgaagtaaagacatgcgagatgcatagggagggctctgcatagcacctgctatagcggtgtcatgttggatcgcttttgtgactgttcatctgtccttgacagtggctgtcatcttgactactttgttgatttgttggtattggggacattttaaaggctgagttatttttgaatgtcatgtttatgtcatagacgtagttttcgcatccttgaattaaactgccttaactccttttgtggt

SEQ ID NO: 10302 - protein, 244 aa, Homo sapiens; identical to SEQ ID NO: 10210

SEQ ID NO: 10303 - DNA, 1707 bp, Homo sapiens
agttacagtccctccgggtggcggggcgccccgagcgtggcagcgcgctaggcggcagcagcgggcgcggagcggggcgcggccgccgcgcgttccctcttggcggggttggccggccggggcggggcgcggcgctccggctcgaggcattcggagctgcgggagccgggctggcaggagcaggatggcggcggcggcggctgcaggcgaggcgcgccgggtgctggtgtacggcggcaggggcgctctgggttctcgatgcgtgcaggcttttcgggcccgcaactggtgggttgccagcgttgatgtggtggagaatgaagaggccagcgctagcatcattgttaaaatgacagactcgttcactgagcaggctgaccaggtgactgctgaggttggaaagctcttgggtgaagagaaggtggatgcaattctttgcgttgctggaggatgggccgggggcaatgccaaatccaagtctctctttaagaactgtgacctgatgtggaagcagagcatatggacatcgaccatctccagccatctggctaccaagcatctcaaggaaggaggcctcctgaccttggctggcgcaaaggctgccctggatgggactcctggtatgatcgggtacggcatggccaagggtgctgttcaccagctctgccagagcctggctgggaagaacagcggcatgccgcccggggcagccgccatcgctgtgctcccggttaccctggataccccgatgaacaggaaatcaatgcctgaggctgacttcagctcctggacacccttagaattcctagttgagccgacactcccaccacacttgagatactgatctaagacctactctagatggaacatctgggatcttgtgtctgaactcgtgctgagccacagacccacagaggacgggctgtcacaggcccccttttgttctagagatcacatccacccatttgtggtatttgaaaactctcagaaaagctggcataaagtttgctttgagatgtctgtgagcacatccttcctctaccatccctggttagaatggcgttctcactcacctatccacgctgcagatgagggtgaagaagtaaaaccatttaaaacatgcatcgcagcaaaccaacatggcacatgcatacctgtgtagcaaacctgcacgctgtgcacatgtagcctagatcttaaagtataaaaaaacaaaacaacaaaaaaacatgtgtaaccaacacacaaaaccctacacaaccaaacggcactggtctctttcagagccttccctcaccaagccctaccctgtccccagagatgaggccatgacatgacagtactttagagagttttagcaacgctttgttttttgagcccatgtgctcatatgagcttgttcaaaccccagagtaggggcctgaatgactggacctttacacatcagcgctggcccagaaggttacagattggcactgggagtctcccaggaaggaaatgctgagcactttttagttaatgaaggtccgaagtctcagctggtgaattgtcaaaatggatgatgtactcaaatgtaaatgttttgtgttaaagaattatcatctacttcttgtttcttgtgaatttcttttgccctttttcattcctgtcttcttagagggtctttttgactgctgcaagtggggtcagttgctcctctcctcagat

SEQ ID NO: 10304 - protein, 219 aa, Homo sapiens
MAAAAAAGEARRVLVYGGRGALGSRCVQAFRARNWWVASVDVVENEEASASIIVKMTDSFTEQADQVTAEVGKLLGEEKVDAILCVAGGWAGGNAKSKSLFKNCDLMWKQSIWTSTISSHLATKHLKEGGLLTLAGAKAALDGTPGMIGYGMAKGAVHQLCQSLAGKNSGMPPGAAAIAVLPVTLDTPMNRKSMPEADFSSWTPLEFLVEPTLPPHLRY

SEQ ID NO: 10305 - DNA, 771 bp, Homo sapiens
ggggcgccccgagcgtggcagcgcgctaggcggcagcagcgggcgcggagcggggcgcggccgccgcgcgttccctcttggcggggttggccggccggggcggggcgcggcgctccggctcgaggcattcggagctgcgggagccgggctggcaggagcaggatggcggcggcggcggctgcaggcgaggcgcgccgggtgctggtgtacggcggcaggggcgctctgggttctcgatgcgtgcaggcttttcgggcccgcaactggtgggttgccagcgttgatgtggtggagaatgaagaggccagcgctagcatcattgttaaaatgacagactcgttcactgagcaggctgaccaggtgactgctgaggttggaaagctcttgggtgaagagaaggtggatgcaattctttgcgttgctggaggatgggccgggggcaatgccaaatccaagtctctctttaagaactgtgacctgatgtggaagcagagcatatggacatcgaccatctccagccatctggctaccaagcatctcaaggaaggaggcctcctgaccttggctggcgcaaaggctgccctggatgggactcctggtatcctttgattacattttgggtagtggttaagactgcaggctctggaactgtgcacgttggacttctcttaaggctctgccacttactgtgacacgttcggcaagttacttcgcctttctgagtctgcgttttgtcatctgtaaaataagataaaatagtgtctcctttat

SEQ ID NO: 10306 - protein, 148 aa, Homo sapiens
MAAAAAAGEARRVLVYGGRGALGSRCVQAFRARNWWVASVDVVENEEASASIIVKMTDSFTEQADQVTAEVGKLLGEEKVDAILCVAGGWAGGNAKSKSLFKNCDLMWKQSIWTSTISSHLATKHLKEGGLLTLAGAKAALDGTPGIL

SEQ ID NO: 10307 - DNA, 716 bp, Homo sapiens
gcactcattctccaagcccacatgtgatccgattcatccagtacaccaagtgtccagggacatctagatgatagaagttccttcagatgggtccctggtgtgagggtgtcctgtatcagactgcctattgaagttcaacctgtggttcaagacaggatctcattcagaatactactttcattcaggctggagtgcagtggcatgatcttagctctctgcaacttccgcctcctgggctcaagcgattctcctgtctcaggctccggagtagctgggactacaggcatgcgccacaacaccagggaaaaaaacaaaccaaccaacaaactgagcctgaaactgataacacagatacgtacagcatcatatttaagtaaccaatcggaattattgcagtggagatgttttattggtgggaaatacggtatcacaccatttcagacatcaggagataattatccctgtcttctcggaaccagcttcttcaaaggagtcaggaattatttatgatagaaactactgaaacaatactaaggagttcataggttgctgagaaggtagcttcctgccctctgcttgaggaacacggatggaagaaaggagaagatctggtcaacacagctcctgaaatgctgattaagcattatgggatttaaggtttcctggccaagtctgagctaaaatgttaacactcctgaagaacaccataaagaaag

SEQ ID NO: 10308 - protein, 102 aa, Homo sapiens
MILALCNFRLLGSSDSPVSGSGVAGTTGMRHNTREKNKPTNKLSLKLITQIRTASYLSNQSELLQWRCFIGGKYGITPFQTSGDNYPCLLGTSFFKGVRNYL

SEQ ID NO: 10309 - DNA, 731 bp, Homo sapiens
caggcaccgcaggccatcgatcgtcagaaagacacggagtttggccagaattatcagagaagagtttggccagaggggtcagagaagactccagcggaaaaccatctcccctgtgactccagaatcttctgagagctacttctacttaataaaaccttgcactcattctccaagcccacatgtgatccgattcatccagtacaccaagtgtccagggacatctagatgatagaagttccttcagatgggtccctggtgtgagggtgtcctgtatcagactgcctattgaagttcaacctgtggttcaagacaggatctcattcagaatactactttcattcaggctggagtgcagtggcatgatcttagctctctgcaacttccgcctcctgggctcaagcgattctcctgtctcaggctccggagtagctgggactacaggcatgcgccacaacaccaggaaaaaacttctaggggaattggatgtgaaaagtgtccctggtcctatgatcacaaagatttgcagcaaggtcaagacacagaagtaacaaatgcttccagcttcagcaaatggtgccccatcttctgcatgggaatacccattattccaagcctgttttcggggaaagtgatagacaatggtggtgcccagggtgcagggaacaaagggaactggacagatggaaaatacgcattggggttataaaatacaattctgcagaggtcctttt

SEQ ID NO: 10310 - protein, 62 aa, Homo sapiens
MILALCNFRLLGSSDSPVSGSGVAGTTGMRHNTRKKLLGELDVKSVPGPMITKICSKVKTQK

SEQ ID NO: 10311 - DNA, 712 bp, Homo sapiens
gcagatggacaagctttataacattgaaactgcaaaccaggaaattctgtcagtttgccactgcctgctctgctccagctgaaaatactttagctcaggttcagaaatcttctcagtgagctgctattcagactcagaaagtagcttggagaatactccagacgttaggctttgcgagtttttgtttgtttacatagaaaagtctcttttaaatttccttattcttacactgcaaagagacctaaccttgatgggtcccatctgcaatgctcctcctgaaaagagacagagctgtttaactgaactgacctatttggaggacgaatagactgattgaaaaaggtgcccaggaagtcctggaactgagtcctggggcaaggttctggaagttgggacaagaagattcctagaaaagaggaaaacaatcactctagaactgttataagcatgctaaccaggacttcagagaaaggaaaaaaaaaggctgaacctcgctggtgattcagatggatcatgaggatctttcaacaaagctaagttcccgtcttttaacgcagttattctcatacttttatactgaaatatccagaatagcaaatgagttaaatatgttttctgtggggttctgtacaaagaagatttagagctttatgaacctaaaataacatatcacaaggagaaaatttacttgaagtgggagacttggcttaaa

SEQ ID NO: 10312 - protein, 45 aa, Homo sapiens
MDHEDLSTKLSSRLLTQLFSYFYTEISRIANELNMFSVGFCTKKI

SEQ ID NO: 10313 - DNA, 550 bp, Homo sapiens
cctcagctttgggtggtggccgctgccgggcatcggcttccagtccgcggagggcgaggcggcgtggacagcggccccggcacccagcgccccgccgcccggaagccgcgcgcccgtccgccgcgccccgagcccgccgcttcctatctcagcgccctgccgccgccgccgcggcccagcgagcggccctgatgcaggccatcaagtttgtggtggtgggagacggagctgtagggtctagccatggctaaggagattggtgctgtaaaatacctggagcgctcggcgctcacacagcgaggcatcaagacagtgtttgacgaagcgatccgagcagtcctctgcccgcctcccgtgaagaagaggaagagaaaatgcctgctgttgtaaatgtctcagcccctcgttcttggtcctgtcccttggaacctttgtacgctttgctcaaaaaaaaaaaaaaaaaccaagaaaaaaaacggtggagccttcgcactcaatgccaactttttgttacagattaatttttccataaaaccattttttgaaccaa

SEQ ID NO: 10314 - protein, 52 aa, Homo sapiens
MSQPLVLGPVPWNLCTLCSKKKKKTKKKNGGAFALNANFLLQINFSIKPFFE

SEQ ID NO: 10315 - DNA, 781 bp, Homo sapiens
gcagttttcctcagctttgggtggtggccgctgccgggcatcggcttccagtccgcggagggcgaggcggcgtggacagcggccccggcacccagcgccccgccgcccggaagccgcgcgcccgtccgccgcgccccgagcccgccgcttcctatctcagcgccctgccgccgccgccgcggcccagcgagcggccctgatgcaggccatcaagtttgtggtggtgggagacggagctgtaggtaaaacttgcctactgatcagttacacaaccaatgcatttcctggagaatatatccctactgtctttgacaattattctgccaatgttatggtagatggaaaaccggtgaatctgggcttatgggatacagctggacaagaagattatgacagattacgccccctatcctatccgcaaacagatgtgttcttaatttgcttttcccttgtgagtcctgcatcatttgaaaatgtccgtgcaaaattggtgctgtaaaatacctggagcgctcggcgctcacacagcgaggcatcaagacagtgtttgacgaagcgatccgagcagtcctctgcccgcctcccgtgaagaagaggaagagaaaatgcctgctgttgtaaatgtctcagcccctcgttcttggtcctgtcccttggaacctttgtacgctttgctcaaaaaaaaaaaaaaaaaccaagaaaaaaaacggtggagccttcgcactcaatgccaactttttgttacagattaatttttccataaaaccattttttgaaccaa

SEQ ID NO: 10316 - protein, 99 aa, Homo sapiens
MQAIKFVVVGDGAVGKTCLLISYTTNAFPGEYIPTVFDNYSANVMVDGKPVNLGLWDTAGQEDYDRLRPLSYPQTDVFLICFSLVSPASFENVRAKLVL

SEQ ID NO: 10317 - DNA, 939 bp, Homo sapiens
ggcagttttcctcagctttgggtggtggccgctgccgggcatcggcttccagtccgcggagggcgaggcggcgtggacagcggccccggcacccagcgccccgccgcccggaagccgcgcgcccgtccgccgcgccccgagcccgccgcttcctatctcagcgccctgccgccgccgccgcggcccagcgagcggccctgatgcaggccatcaagtttgtggtggtgggagacggagctgtaggtaaaacttgcctactgatcagttacacaaccaatgcatttcctggagaatatatccctactgtctttgacaattattctgccaatgttatggtagatggaaaaccggtgaatctgggcttatgggatacagctggacaagaagattatgacagattacgccccctatcctatccgcaaacagatgtgttcttaatttgcttttcccttgtgagtcctgcatcatttgaaaatgtccgtgcaaagtggtatcctgaggtgcggcaccactgtcccaacactcccatcatcctagtgggaactaaacttgatcttagggatgataaagacccgatcgagaaactgaaggagaagaagctgactcccatcacctatccgcagggtctagccatggctaaggagattggtgctgtaaaatacctggagcgctcggcgctcacacagcgaggcatcaagacagtgtttgacgaagcgatccgagcagtcctctgcccgcctcccgtgaagaagaggaagagaaaatgcctgctgttgtaaatgtctcagcccctcgttcttggtcctgtcccttggaacctttgtacgctttgctcaaaaaaaaaaaaaaaaaccaagaaaaaaaacggtggagccttcgcactcaatgccaactttttgttacagattaatttttccataaaaccattttttgaaccaa

SEQ ID NO: 10318 - protein, 192 aa, Homo sapiens [sequence omitted]

SEQ ID NO: 10319 - DNA, 629 bp, Homo sapiens
ggcagttttcctcagctttgggtggtggccgctgccgggcatcggcttccagtccgcggagggcgaggcggcgtggacagcggccccggcacccagcgccccgccgcccggaagccgcgcgcccgtccgccgcgccccgagcccgccgcttcctatctcagcgccctgccgccgccgccgcggcccagcgagcggccctgatgcaggccatcaagtttgtggtggtgggagacggagctgtaggtaaaacttgcctactgatcagttacacaaccaatgcatttcctggagaatatatccctactgtctttgacaattattctgccaatgttatggtagatggaaaaccggtgaatctgggcttatgggatacagctggacaagaagattatgacagattacgccccctatcctatccgcaaacagatgtgttcttaatttgcttttcccttgtgagtcctgcatcatttgaaaatgtccgtgcaaagtggtatcctgaggtgcggcaccactgtcccaacactcccatcatcctagtgggaactaaacttgatcttagggatgataaagacccgatcgagaaagtgaagaagaggaagagaaaatgcctgctgttgtaaatgtctcag

SEQ ID NO: 10320 - protein, 139 aa, Homo sapiens
MQAIKFVVVGDGAVGKTCLLISYTTNAFPGEYIPTVFDNYSANVMVDGKPVNLGLWDTAGQEDYDRLRPLSYPQTDVFLICFSLVSPASFENVRAKWYPEVRHHCPNTPIILVGTKLDLRDDKDPIEKVKKRKRKCLLL

SEQ ID NO: 10321 - DNA, 618 bp, Homo sapiens
aatttgcctctgcgccgtctttttttgcctgttacctgtgacgtccttgaaaatgaaaagctttcttaagacaataggacgggccgggcgcggtggctcatgcctgtaatcctaacactctgggaggccgaggttggcggatcacgaggaagcagaatctgaaactttctgaggagagcatttgagcttcagatttctaacagcctctttgcaacaaaatagaccagtagctgaaggcaactgcaatccttcatgatgtttcccttggccagaaatgcactaagcagtctcaagattcaaagcattctgcaaagcatggcaagacatagccatgtaaaacactcaccagattttcatgataaatatggtaatgctgtgctagccagtggaactgctttctgtgttgctacatgggtgtttacagccactcagattggaatagaatggaacctatcccctgttggcagagttaccccaaaagagtggaaacatcagtaaccatcacagttgctgtaatgacagaattgtttaaaaaaccaacttgtcatgtaagcactctactgcttattaaaatatagcacaattgaaaaaataaaatgtgttttaaatctttaaaaa

SEQ ID NO: 10322 - protein, 81 aa, Homo sapiens
MMFPLARNALSSLKIQSILQSMARHSHVKHSPDFHDKYGNAVLASGTAFCVATWVFTATQIGIEWNLSPVGRVTPKEWKHQ

SEQ ID NO: 10323 - DNA, 492 bp, Homo sapiens
gtgatcatcttttctttgacattggaagcagaatctgaaactttctgaggagagcatttgagcttcagatttctaacagcctctttgcaacaaaatagaccagtagctgaaggcaactgcaatccttcatgatgtttcccttggccagaaatgcactaagcagtctcaagattcaaagcattctgcaaagcatggcaagacatagccatgtaaaacactcaccagattttcatgataaatatggtaatgctgtgctagccagtggaactgctttctgtgttgctacatgggtgtttacagccactcagattggaatagaatggaacctatcccctgttggcagagttaccccaaaagagtggaaacatcagtaaccatcacagttgctgtaatgacagaattgtttaaaaaaccaacttgtcatgtaagcactctactgcttattaaaatatagcacaattgaaaaaataaaatgtgttttaaatctttaaa

SEQ ID NO: 10324 - protein, 81 aa, Homo sapiens; identical to SEQ ID NO: 10322

SEQ ID NO: 10325 - DNA, 533 bp, Homo sapiens
aaacggaaaggttcggaatttgcctctgcgccgtctttttttgcctgttacctgtgacgtccttggaagcagaatctgaaactttctgaggagagcatttgagcttcagatttctaacagcctctttgcaacaaaatagaccagtagctgaaggcaactgcaatccttcatgatgtttcccttggccagaaatgcactaagcagtctcaagattcaaagcattctgcaaagcatggcaagacatagccatgtaaaacactcaccagattttcatgataaatatggtaatgctgtgctagccagtggaactgctttctgtgttgctacatgggtgtttacagccactcagattggaatagaatggaacctatcccctgttggcagagttaccccaaaagagtggaaacatcagtaaccatcacagttgctgtaatgacagaattgtttaaaaaaccaacttgtcatgtaagcactctactgcttattaaaatatagcacaattgaaaaaataaaatgtgttttaaatctttaaa

SEQ ID NO: 10326 - protein, 81 aa, Homo sapiens; identical to SEQ ID NO: 10322

SEQ ID NO: 10327 - DNA, 8192 bp, Homo sapiens
agtcaacctctggaagtaagtcaactccattctgaaaaagaagagtgtcgcaagaagtgaaagtgattttgaccagaggtcgcttgtctccacctctcccctcctctccagaaaaggatggagcagcaaagcggagggtgtgcgcgtgtctggtggaggcgggtaaagaaatggggtgtctttaaagcaatagcttagcaaatactgggactagagtgcggctcgagtccacttcccaatagtttggcgagagtccgccgggtgagctgcaacccctgttaccaggaagaatctttctgctttcattgctctccctaccgccccccataacacctgaatgggagggtctcaaaggtggtttgagcccggacttgatcccctctcctcaccaccgctaccacccgacgcccagcagtccccgtcacccgccctttctccacctccaaccttgactctgggtacaaacaggtcctcgcacaacctgatgacagaggagcttcattggttagatccaaatcccagcggaagggagggggccaggaggtaggaggacgaacactgctgtgggcggggagcccacttggggtcgggggctgcgaagccggaggaggggcgagagaccccgttcctcatccccggagttacagtcggaacaaacttgccgagtcttgcagcgcaagcgcgcggatacgaaccccagaaccttcagcgcgcgggcacgaaagggtgtggagcggtatacatagctctacatacacattgagcgctgagcgagaaaggagggggcgaggaaggcaggttccgcctcccctggccccgtgcacacacacgcccaccgcggctcgggctggctgagcgcgggcgagtgtgagcgcgagtgtgcgcacgccgcgggagcctctctgccctctcctcgcaccctgctcagggcatctgaagagcctggaaacgtgaacaggcttgaagtatggcatgttgcaaagatggtttctgccaagaaggtacccgcgatcgctctgtccgccggggtcagtttcgccctcctgcgcttcctgtgcctggcggtttgtttaaacgaatccccaggacagaaccaaaaggaggagaaattgtgcacagaaaatttcacccgcatcctggacagtttgctcgatggttatgacaacaggctgcgtcctggatttgggggtcctgttacagaagtgaaaactgacatatatgtcaccagctttggacctgtttctgatgttgaaatggaatacacaatggatgtgttcttcaggcagacatggattgacaaaagattaaaatatgacggccccattgaaattttgagattgaacaatatgatggtaacgaaagtgtggacccctgatactttcttcaggaatggaaagaaatctgtctcacataatatgacagctccaaataagctttttagaattatgagaaatggtactattttatacacaatgagactcaccataagtgcggagtgtcccatgagattggtggattttcccatggatggtcatgcatgccctttgaaattcgggagttatgcctatccaaagagtgagatgatctatacctggacaaaaggtcctgagaaatcagttgaagttccgaaggagtcttccagcttagttcaatatgatttgattgggcaaaccgtatcaagtgaaaccatcaaatcaattacgggtgaatatattgttatgacggtttacttccacctcagacggaagatgggttattttatgattcagacctatattccgtgcattatgacagtgattctttctcaagtttcattttggataaataaagaatcagttcccgctaggactgtatttggaataacaactgtcctcaccatgaccacactaagcatcagtgcacgacattctttgcccaaagtgtcctatgctaccgccatggactggttcatagctgtctgctttgcttttgtattttcggcccttatcgagtttgctgctgtcaactatttcaccaatattcaaatggaaaaagccaaaaggaagacatcaaagccccctcaggaagttcccgctgctccagtgcagagagagaagcatcctgaagcccctctgcagaatacaaatgccaatttgaacatgagaaaaagaacaaatgctttggttcactctgaatctgatgttggcaacagaactgaggtgggaaaccattcaagcaaatcttccacagttgttcaagaatcttctaaaggcacacctcggtcttacttagcttccagtccaaacccattcagccgtgcaaatgcagctgaaaccatatctgcagcaagagcacttccatctgcttctcctacttctatccgaactggatatatgcctcgaaaggcttcagttggatctgcttctactcgtcacgtgtttggatcaagactgcagaggataaagaccacagttaataccataggggctactgggaagttgtcagctactcctcctccatcggctccaccaccttctggatctggcacaagtaaaatagacaaatatgcccgtattctctttccagtcacatttggggcatttaacatggtttattgggttgtttatttatctaaggacactatggagaaatcagaaagtctaatgtaatttcgttgctatagtagtttgctaaaagatgatgaaaatgcagaatgtctttttaaatgtttttaaatataaacaaatattctttactaaaataaaaactctgtgtaatttttccatttaaagatataagccagttattgggagagttaattaattcctgagtgaaaaagtgaactatgttttttttcagaaaaattattttaaaagaactcagcattcagttagatagaatacacaccatcctggaaagttgggataagagaaatagagctattagagacaagtggcgcatattttttcattgatatttgaaaacagactatgacattttaaaaatctgccctatgagtatcaacctgccaccctaaatttcccagtggcactacccttaaccagaattgtttattagatgtcatatgcagtgacctttggtgatcttcttaggaacttcaagaaaaggaattttcctgttaaattaaacattggcaaaaggaaatggaatagtataaacactgatcaatagagtaaaatatctgctgcataaaaaactaagacaaagaccagaggaaatatcttccctttcttatgttggctaaacagtacttaacagttgacttgaaattttgttctctgagccaaagtttaactcattgtatgaattctttttcatggtagttcattcagttatgtgtttatttactacatagttattcagagcctactgtgttccaggaactatgctagaaactgtctctctaggaaagctcttgcacctttatctacaatattacttaaaaagtagaacagtcaatgcatgccaaagaaccataaactagcagaggacattgcattctttagtgaaggacatttatttagagtctgacaacatattcaaaatatttttcagcctctactgatagtggataacaaatatatttgttcacataaccactttgatgtcagtacaacttcagcaattggttttcaaaatagatgagaatatggtacagattgttctataagtgaaaagcattatgtacttgaaagtaaaaatcagggcaatataagacttaatagattaactgtcgcaaatttgatcagagtcacagagtagaatttgatcagaatcacagaatcatcagacataggaactgagcacaggctttttcaggtgctttccccaagatagatctagatattagctagtgaaatgctaaattttgaagagttttgtgtccgtagttctgtaattctgggcagtcatcatgttggtttttttgggagtttttttaaggtttaataactaaggggaatattttaaaattaagagagcagcaaatgaaaggagtaaagaaaaaaatagctgtcgggtaggatgccactgactctgctatgtgatttatcagggttttcatctactgacttctttctcattaggtaggcttaacaacttacttgagaattttgcaactgtctatgcagctgaatctaagtatggttttttgtcatattgcctctagattttcttctgtgcttctctctatctgctctggaatggatgagtgaatgtgttctgggtgttttagggaacatattgatagaaatgaccaccttgcagacaaaatctctctctctctttttgtttttatagaaaagaagtgatagtagttaattggcatcgatttttcagatattgcactaccttataatggttgtttttgatacctgaaaattgtgcaaatgccaaatattaattgtaagtcatatctgagaaatcattcttggctgtctttctaggtattccatagaatcaacacattttaaggctgaaagatactgtcgaaatcacccagtcccaaccccccaatttaaaattgattctagtaaaattaggtccagtaacacctgtatatatgtatatatttaataaagagtacttgtacaaaaaagcttatcataaattatttcatgaatgtgaatagatttctggccttgaggacgatgtttggaaatatggttggaagcacaattcattcgctactagttattcagagcgtactttgttccaggaactatgctggaaactgatagttcactattctgatgaaaaggctggttttgttgttgttgttgttgttgttgttgttgtttttggtgaggaactcttactctttgctaatctattggcctatcttaagaaataattatttggttattcattggcttcctttaaaaaaaagtgttcttctacaaatcttacagagtgtaaagagataaaaagaaatgattttttttcttacctttacatatgaaggtttaaaaatacatcatgtggccaaagaatgagaaaggacagaattaaccaaggattcttaattgttaatttgaagaacacattaaccagaaagcttaaacattattattaaaataaattatttcatttgcacacaatgataataatgatgataataataataataataataataataataataataataataatatgttgtttgctttccttaactgaatttcatcaaattcattcagtgatttttattttggtcattatttctatcttcccaataacccagaggtacatcaagtaaaaacacttttgcaaagagccagtcacttttccctcttagaaaatctcagaagaatgattaggggcacccaaagttctggttatctatgaataataatgaataattttggctgagaatggtacctttatataactcttttaaagatgaaattcagaataattttattcaggacctagtatctgcagtccatgttggccactaactgctacataattactttcaatttcctccaggcatgactaggtataaacatatatttacatgattaatccacattttaaaatgacttgcacttgtgcatatacatagtactttgaataatgtatattttaaattggacctcacaaatcttgtattaaagtaggtagagagtagagtcacactttttttgatgaaatgagtcacagagaagttacatgacaaagataaaatcacagggttggaaagaactttgaaaggtcatttttcaataatctcaccttaaaagtgaccccttttcaaacaaagcataaacaatttatttgtggcttattttacccatgagctggccaatacttcctggcctagaaaaatatctccactctccccattcctgttcttaatggtcttctcttctcaatttgtaaatattctccagtaaaagacaccaggtgtggagatgggtcacttaatttcaagttctgagtgtcttgtggttttaaacaagtctcttaacctctctaagactgattcctcatttataacagggaggaggtggattatgtaatatctaagagcttttcagttttaatactctctgattctcatagtaaatacaagcatactcttgtaagaaaaacactgaatactttgaaccacaaataagtgtttatggacaaaaatttagttctactgcttgattactttaagttcattgcttgcttcaaactaaggtttccctaccttcaaaaatatatataacatctctccatttagataaagtatattcttccccagggaagactgtattctttaaagacagtagaatattggctatttctcttttctgggatttcctgggcttttattcactaaatgggctcctgcccagtttgggtactgtgctgatttttagatatacagagataaaaatagcccctttccttgcaggtagtcacagtccggaagagatgatagatgcatagacaaaaaattatgggatgtaactaatgcttcagtagaatacagcagggccaaaactagagtgatactcatctcaggcacaaatatatatggggacatcaaaacttcaataatcaagatacctaatatttaagtgaatatttttaaaactcaaaattaatgcaaaagatttatgatgaacagaatatacaaattttaaataaattaatagaatcagtagtaataatattttcttctgcctcaggctccaaaattgctcagcatagcactgatctagatagaggtggataaaagatccacataacttaattacattgttgaaggagaggaacaagagtgatagcagagaaggtttcacagatataatcttaagctaaattttatagaatgatttggagttcttatagcctccattcccacttccacaaacaaacaaaaaaatgaaagcgcaattttatcagcacctgaggcaggagaagagatgaggatgtggaaagtcaaggggaactcttactacaaattcttagttctgtgtttggaggtaagggtgaatgcagggaagtgagagttgttgatgttggaaagacctaaagagcctggattaggaagagttttgtgtaaattactgaaggaatggaatttgatcaggattagtggcaatttattaaaaatcttgaagaataatacgatgaaaactaacatccttatttttctgttttagagaaagcacctgattattgtgtgaactatggtttggagggccacaaatctagaggtagtggaacagttgagatctcttattttttctttcctgtcttaaactttgccttctattccttttttctttttttgaccgcaatgacttcattgtcatttgtaaaagtgatacatgactgttaaagatagacattgtagaaacttaaaaacaatctcaaaattctaccacccagaaatcagaaatattttgtatttggatatgtttgtctagaagagtagattgcttgattaaaagacagagttttataaatgtagaagccaatatgacatacatgctgccattaaataataaaaaattaaattgacttttatctcaagataagattaaaattggagggtaaaactgaagaaattgttgaaatttggatggtgcttctttaaagcaagagatttagagagtcagagctttttatcccaggtttcaatctttatttcaggaaaattttctgcaattttgtctaagttaattttttttttttaagaaatgccaattatgtcaaatcccttttgtctctatacaatagtccccaactgttttggcaacaggcacgggtgagggtgggggaatggttttcagatgaaattgttccatctcagatcatcaggcattagtcgattctcataaggagcggacaaccttgcatgccctcctatgagaatctaatgccgccgctaatctgacaggaggcagagctcaggcgataatgctcaatgggtgccactcacctcctgttgtgctgcccaattcctaacaggtcatggataagtactggtcagtggcccaggggttggggaccactgctctgtaactatttacagtattctttgtaactactttggtatctttaaaattttctttaacttttgtcaaccataaccctagtgagttttcagttgtgattattctattttgtaacttccaatgtacttttcaacttcataatggttaattttgttttccattgctttcttg

SEQ ID NO: 10328 - protein, 554 aa, Homo sapiens [sequence omitted]

SEQ ID NO: 10329 - DNA, 4591 bp, Homo sapiens
agtcaacctctggaagtaagtcaactccattctgaaaaagaagagtgtcgcaagaagtgaaagtgattttgaccagaggtcgcttgtctccacctctcccctcctctccagaaaaggatggagcagcaaagcggagggtgtgcgcgtgtctggtggaggcgggtaaagaaatggggtgtctttaaagcaatagcttagcaaatactgggactagagtgcggctcgagtccacttcccaatagtttggcgagagtccgccgggtgagctgcaacccctgttaccaggaagaatctttctgctttcattgctctccctaccgccccccataacacctgaatgggagggtctcaaaggtggtttgagcccggacttgatcccctctcctcaccaccgctaccacccgacgcccagcagtccccgtcacccgccctttctccacctccaaccttgactctgggtacaaacaggtcctcgcacaacctgatgacagaggagcttcattggttagatccaaatcccagcggaagggagggggccaggaggtaggaggacgaacactgctgtgggcggggagcccacttggggtcgggggctgcgaagccggaggaggggcgagagaccccgttcctcatccccggagttacagtcggaacaaacttgccgagtcttgcagcgcaagcgcgcggatacgaaccccagaaccttcagcgcgcgggcacgaaagggtgtggagcggtatacatagctctacatacacattgagcgctgagcgagaaaggagggggcgaggaaggcaggttccgcctcccctggccccgtgcacacacacgcccaccgcggctcgggctggctgagcgcgggcgagtgtgagcgcgagtgtgcgcacgccgcgggagcctctctgccctctcctcgcaccctgctcagggcatctgaagagcctggaaacgtgaacaggcttgaagtatggcatgttgcaaagatggtttctgccaagaaggtacccgcgatcgctctgtccgccggggtcagtttcgccctcctgcgcttcctgtgcctggcggtttgtttaaacgaatccccaggacagaaccaaaaggaggagaaattgtgcacagaaaatttcacccgcatcctggacagtttgctcgatggttatgacaacaggctgcgtcctggatttgggggtcctgttacagaagtgaaaactgacatatatgtcaccagctttggacctgtttctgatgttgaaatggaatacacaatggatgtgttcttcaggcagacatggattgacaaaagattaaaatatgacggccccattgaaattttgagattgaacaatatgatggtaacgaaagtgtggacccctgatactttcttcaggaatggaaagaaatctgtctcacataatatgacagctccaaataagctttttagaattatgagaaatggtactattttatacacaatgagactcaccataagtgcggagtgtcccatgagattggtggattttcccatggatggtcatgcatgccctttgaaattcgggagttatgcctatccaaagagtgagatgatctatacctggacaaaaggtcctgagaaatcagttgaagttccgaaggagtcttccagcttagttcaatatgatttgattgggcaaaccgtatcaagtgaaaccatcaaatcaattacgggtgaatatattgttatgacggtttacttccacctcagacggaagatgggttattttatgattcagacctatattccgtgcattatgacagtgattctttctcaagtttcattttggataaataaagaatcagttcccgctaggactgtatttggaataacaactgtcctcaccatgaccacactaagcatcagtgcacgacattctttgcccaaagtgtcctatgctaccgccatggactggttcatagctgtctgctttgcttttgtattttcggcccttatcgagtttgctgctgtcaactatttcaccaatattcaaatggaaaaagccaaaaggaagacatcaaagccccctcaggaagttcccgctgctccagtgcagagagagaagcatcctgaagcccctctgcagaatacaaatgccaatttgaacatgagaaaaagaacaaatgctttggttcactctgaatctgatgttggcaacagaactgaggtgggaaaccattcaagcaaatcttccacagttgttcaagaatcttctaaaggcacacctcggtcttacttagcttccagtccaaacccattcagccgtgcaaatgcagctgaaaccatatctgcagcaagagcacttccatctgcttctcctacttctatccgaactggatatatgcctcgaaaggcttcagttggatctgcttctactcgtcacgtgtttggatcaagactgcagaggataaagaccacagttaataccataggggctactgggaagttgtcagctactcctcctccatcggctccaccaccttctggatctggcacaagtaaaatagacaaatatgcccgtattctctttccagtcacatttggggcatttaacatggtttattgggttgtttatttatctaaggacactatggagaaatcagaaagtctaatgtaatttcgttgctatagtagtttgctaaaagatgatgaaaatgcagaatgtctttttaaatgtttttaaatataaacaaatattctttactaaaataaaaactctgtgtaatttttccatttaaagatataagccagttattgggagagttaattaattcctgagtgaaaaagtgaactatgttttttttcagaaaaattattttaaaagaactcagcattcagttagatagaatacacaccatcctggaaagttgggataagagaaatagagctattagagacaagtggcgcatattttttcattgatatttgaaaacagactatgacattttaaaaatctgccctatgagtatcaacctgccaccctaaatttcccagtggcactacccttaaccagaattgtttattagatgtcatatgcagtgacctttggtgatcttcttaggaacttcaagaaaaggaattttcctgttaaattaaacattggcaaaaggaaatggaatagtataaacactgatcaatagagtaaaatatctgctgcataaaaaactaagacaaagaccagaggaaatatcttccctttcttatgttggctaaacagtacttaacagttgacttgaaattttgttctctgagccaaagtttaactcattgtatgaattctttttcatggtagttcattcagttatgtgtttatttactacatagttattcagagcctactgtgttccaggaactatgctagaaactgtctctctaggaaagctcttgcacctttatctacaatattacttaaaaagtagaacagtcaatgcatgccaaagaaccataaactagcagaggacattgcattctttagtgaaggacatttatttagagtctgacaacatattcaaaatatttttcagcctctactgatagtggataacaaatatatttgttcacataaccactttgatgtcagtacaacttcagcaattggttttcaaaatagatgagaatatggtacagattgttctataagtgaaaagcattatgtacttgaaagtaaaaatcagggcaatataagacttaatagattaactgtcgcaaatttgatcagagtcacagagtagaatttgatcagaatcacagaatcatcagacataggaactgagcacaggctttttcaggtgctttccccaagatagatctagatattagctagtgaaatgctaaattttgaagagttttgtgtccgtagttctgtaattctgggcagtcatcatgttggtttttttgggagtttttttaaggtttaataactaaggggaatattttaaaattaagagagcagcaaatgaaaggagtaaagaaaaaaatagctgtcgggtaggatgccactgactctgctatgtgatttatcagggttttcatctactgacttctttctcattaggtaggcttaacaacttacttgagaattttgcaactgtctatgcagctgaatctaagtatggttttttgtcatattgcctctagattttcttctgtgcttctctctatctgctctggaatggatgagtgaatgtgttctgggtgttttagggaacatattgatagaaatgaccaccttgcagacaaaatctctctctctctttttgtttttatagaaaagaagtgatagtagttaattggcatcgatttttcagatattgcactaccttataatggttgtttttgatacctgaaaattgtgcaaatgccaaatattaattgtaagtcatatctgagaaatcattcttggctgtctttctaggtattccatagaatcaacacattttaaggctgaaagatactgtcgaaatcacccagtcccaaccccccaatttaaaattgattctagtaaaattaggtccagtaacacctgtatatatgtatatatttaataaagagtacttgtac

SEQ ID NO: 10330 - protein, 554 aa, Homo sapiens [sequence omitted]

SEQ ID NO: 10331 - DNA, 1613 bp, Homo sapiens
ctgccctctcctcgcaccctgctcagggcatctgaagagcctggaaacgtgaacaggcttgaagtatggcatgttgcaaagatggtttctgccaagaagtttaaacgaatccccaggacagaaccaaaaggaggagaaattgtgcacagaaaatttcacccgcatcctggacagtttgctcgatggttatgacaacaggctgcgtcctggatttgggggtcctgttacagaagtgaaaactgacatatatgtcaccagctttggacctgtttctgatgttgaaatggaatacacaatggatgtgttcttcaggcagacatggattgacaaaagattaaaatatgacggccccattgaaattttgagattgaacaatatgatggtaacgaaagtgtggacccctgatactttcttcaggaatggaaagaaatctgtctcacataatatgacagctccaaataagctttttagaattatgagaaatggtactattttatacacaatgagactcaccataagtgcggagtgtcccatgagattggtggattttcccatggatggtcatgcatgccctttgaaattcgggagttatgcctatccaaagagtgagatgatctatacctggacaaaaggtcctgagaaatcagttgaagttccgaaggagtcttccagcttagttcaatatgatttgattgggcaaaccgtatcaagtgaaaccatcaaatcaattacgggaataacaactgtcctcaccatgaccacactaagcatcagtgcacgacattctttgcccaaagtgtcctatgctaccgccatggactggttcatagctgtctgctttgcttttgtattttcggcccttatcgagtttgctgctgtcaactatttcaccaatattcaaatggaaaaagccaaaaggaagacatcaaagccccctcaggaagttcccgctgctccagtgcagagagagaagcatcctgaagcccctctgcagaatacaaatgccaatttgaacatgagaaaaagaacaaatgctttggttcactctgaatctgatgttggcaacagaactgaggtgggaaaccattcaagcaaatcttccacagttgttcaagaatcttctaaaggcacacctcggtcttacttagcttccagtccaaacccattcagccgtgcaaatgcagctgaaaccatatctgcagcaagagcacttccatctgcttctcctacttctatccgaactggatatatgcctcgaaaggcttcagttggatctgcttctactcgtcacgtgtttggatcaagactgcagaggataaagaccacagttaataccataggggctactgggaagttgtcagctactcctcctccatcggctccaccaccttctggatctggcacaagtaaaatagacaaatatgcccgtattctctttccagtcacatttggggcatttaacatggtttattgggttgtttatttatctaaggacactatggagaaatcagaaagtctaatgtaatttcgttgctatagtagtttgctaaaagatgatgaaaatgcagaatgtctttttaaatgtttttaaatataaacaaatattctttact

SEQ ID NO: 10332 - protein, 484 aa, Homo sapiens
MLQRWFLPRSLNESPGQNQKEEKLCTENFTRILDSLLDGYDNRLRPGFGGPVTEVKTDIYVTSFGPVSDVEMEYTMDVFFRQTWIDKRLKYDGPIEILRLNNMMVTKVWTPDTFFRNGKKSVSHNMTAPNKLFRIMRNGTILYTMRLTISAECPMRLVDFPMDGHACPLKFGSYAYPKSEMIYTWTKGPEKSVEVPKESSSLVQYDLIGQTVSSETIKSITGITTVLTMTTLSISARHSLPKVSYATAMDWFIAVCFAFVFSALIEFAAVNYFTNIQMEKAKRKTSKPPQEVPAAPVQREKHPEAPLQNTNANLNMRKRTNALVHSESDVGNRTEVGNHSSKSSTVVQESSKGTPRSYLASSPNPFSRANAAETISAARALPSASPTSIRTGYMPRKASVGSASTRHVFGSRLQRIKTTVNTIGATGKLSATPPPSAPPPSGSGTSKIDKYARILFPVTFGAFNMVYWVVYLSKDTMEKSESLM

SEQ ID NO: 10333 - DNA, 1766 bp, Homo sapiens
ctgccctctcctcgcaccctgctcagggcatctgaagagcctggaaacgtgaacaggcttgaagtatggcatgttgcaaagatggtttctgccaagaagtttaaacgaatccccaggacagaaccaaaaggaggagaaattgtgcacagaaaatttcacccgcatcctggacagtttgctcgatggttatgacaacaggctgcgtcctggatttgggggtcctgttacagaagtgaaaactgacatatatgtcaccagctttggacctgtttctgatgttgaaatggaatacacaatggatgtgttcttcaggcagacatggattgacaaaagattaaaatatgacggccccattgaaattttgagattgaacaatatgatggtaacgaaagtgtggacccctgatactttcttcaggaatggaaagaaatctgtctcacataatatgacagctccaaataagctttttagaattatgagaaatggtactattttatacacaatgagactcaccataagtgcggagtgtcccatgagattggtggattttcccatggatggtcatgcatgccctttgaaattcgggagttatgcctatccaaagagtgagatgatctatacctggacaaaaggtcctgagaaatcagttgaagttccgaaggagtcttccagcttagttcaatatgatttgattgggcaaaccgtatcaagtgaaaccatcaaatcaattacgggtgaatatattgttatgacggtttacttccacctcagacggaagatgggttattttatgattcagacctatattccgtgcattatgacagtgattctttctcaagtttcattttggataaataaagaatcagttcccgctaggactgtatttggaataacaactgtcctcaccatgaccacactaagcatcagtgcacgacattctttgcccaaagtgtcctatgctaccgccatggactggttcatagctgtctgctttgcttttgtattttcggcccttatcgagtttgctgctgtcaactatttcaccaatattcaaatggaaaaagccaaaaggaagacatcaaagccccctcaggaagttcccgctgctccagtgcagagagagaagcatcctgaagcccctctgcagaatacaaatgccaatttgaacatgagaaaaagaacaaatgctttggttcactctgaatctgatgttggcaacagaactgaggtgggaaaccattcaagcaaatcttccacagttgttcaagaatcttctaaaggcacacctcggtcttacttagcttccagtccaaacccattcagccgtgcaaatgcagctgaaaccatatctgcagcaagagcacttccatctgcttctcctacttctatccgaactggatatatgcctcgaaaggcttcagttggatctgcttctactcgtcacgtgtttggatcaagactgcagaggataaagaccacagttaataccataggggctactgggaagttgtcagctactcctcctccatcggctccaccaccttctggatctggcacaagtaaaatagacaaatatgcccgtattctctttccagtcacatttggggcatttaacatggtttattgggttgtttatttatctaaggacactatggagaaatcagaaagtctaatgtaatttcgttgctatagtagtttgctaaaagatgatgaaaatgcagaatgtctttttaaatgtttttaaatataaacaaatattctttact

SEQ ID NO: 10334 - protein, 535 aa, Homo sapiens
MLQRWFLPRSLNESPGQNQKEEKLCTENFTRILDSLLDGYDNRLRPGFGGPVTEVKTDIYVTSFGPVSDVEMEYTMDVFFRQTWIDKRLKYDGPIEILRLNNMMVTKVWTPDTFFRNGKKSVSHNMTAPNKLFRIMRNGTILYTMRLTISAECPMRLVDFPMDGHACPLKFGSYAYPKSEMIYTWTKGPEKSVEVPKESSSLVQYDLIGQTVSSETIKSITGEYIVMTVYFHLRRKMGYFMIQTYIPCIMTVILSQVSFWINKESVPARTVFGITTVLTMTTLSISARHSLPKVSYATAMDWFIAVCFAFVFSALIEFAAVNYFTNIQMEKAKRKTSKPPQEVPAAPVQREKHPEAPLQNTNANLNMRKRTNALVHSESDVGNRTEVGNHSSKSSTVVQESSKGTPRSYLASSPNPFSRANAAETISAARALPSASPTSIRTGYMPRKASVGSASTRHVFGSRLQRIKTTVNTIGATGKLSATPPPSAPPPSGSGTSKIDKYARILFPVTFGAFNMVYWVVYLSKDTMEKSESLM

SEQ ID NO: 10335 - DNA, 2736 bp, Homo sapiens
agtcaacctctggaagtaagtcaactccattctgaaaaagaagagtgtcgcaagaagtgaaagtgattttgaccagaggtcgcttgtctccacctctcccctcctctccagaaaaggatggagcagcaaagcggagggtgtgcgcgtgtctggtggaggcgggtaaagaaatggggtgtctttaaagcaatagcttagcaaatactgggactagagtgcggctcgagtccacttcccaatagtttggcgagagtccgccgggtgagctgcaacccctgttaccaggaagaatctttctgctttcattgctctccctaccgccccccataacacctgaatgggagggtctcaaaggtggtttgagcccggacttgatcccctctcctcaccaccgctaccacccgacgcccagcagtccccgtcacccgccctttctccacctccaaccttgactctgggtacaaacaggtcctcgcacaacctgatgacagaggagcttcattggttagatccaaatcccagcggaagggagggggccaggaggtaggaggacgaacactgctgtgggcggggagcccacttggggtcgggggctgcgaagccggaggaggggcgagagaccccgttcctcatccccggagttacagtcggaacaaacttgccgagtcttgcagcgcaagcgcgcggatacgaaccccagaaccttcagcgcgcgggcacgaaagggtgtggagcggtatacatagctctacatacacattgagcgctgagcgagaaaggagggggcgaggaaggcaggttccgcctcccctggccccgtgcacacacacgcccaccgcggctcgggctggctgagcgcgggcgagtgtgagcgcgagtgtgcgcacgccgcgggagcctctctgccctctcctcgcaccctgctcagggcatctgaagagcctggaaacgtgaacaggcttgaagtatggcatgttgcaaagatggtttctgccaagaaggtacccgcgatcgctctgtccgccggggtcagtttcgccctcctgcgcttcctgtgcctggcggtttgtttaaacgaatccccaggacagaaccaaaaggaggagaaattgtgcacagaaaatttcacccgcatcctggacagtttgctcgatggttatgacaacaggctgcgtcctggatttgggggtcctgttacagaagtgaaaactgacatatatgtcaccagctttggacctgtttctgatgttgaaatggaatacacaatggatgtgttcttcaggcagacatggattgacaaaagattaaaatatgacggccccattgaaattttgagattgaacaatatgatggtaacgaaagtgtggacccctgatactttcttcaggaatggaaagaaatctgtctcacataatatgacagctccaaataagctttttagaattatgagaaatggtactattttatacacaatgagactcaccataagtgcggagtgtcccatgagattggtggattttcccatggatggtcatgcatgccctttgaaattcgggagttatgcctatccaaagagtgagatgatctatacctggacaaaaggtcctgagaaatcagttgaagttccgaaggagtcttccagcttagttcaatatgatttgattgggcaaaccgtatcaagtgaaaccatcaaatcaattacgggtgaatatattgttatgacggtttacttccacctcagacggaagatgggttattttatgattcagacctatattccgtgcattatgacagtgattctttctcaagtttcattttggataaataaagaatcagttcccgctaggactgtatttggaataacaactgtcctcaccatgaccacactaagcatcagtgcacgacattctttgcccaaagtgtcctatgctaccgccatggactggttcatagctgtctgctttgcttttgtattttcggcccttatcgagtttgctgctgtcaactatttcaccaatattcaaatggaaaaagccaaaaggaagacatcaaagccccctcaggaagttcccgctgctccagtgcagagagagaagcatcctgaagcccctctgcagaatacaaatgccaatttgaacatgagaaaaagaacaaatgctttggttcactctgaatctgatgttggcaacagaactgaggtgggaaaccattcaagcaaatcttccacagttgttcaagaatcttctaaaggcacacctcggtcttacttagcttccagtccaaacccattcagccgtgcaaatgcagctgaaaccatatctgcagcaagagcacttccatctgcttctcctacttctatccgaactggatatatgcctcgaaaggcttcagttggatctgcttctactcgtcacgtgtttggatcaagactgcagaggataaagaccacagttaataccataggggctactgggaagttgtcagctactcctcctccatcggctccaccaccttctggatctggcacaagtaaaatagacaaatatgcccgtattctctttccagtcacatttggggcatttaacatggtttattgggttgtttatttatctaaggacactatggagaaatcagaaagtctaatgtaatttcgttgctatagtagtttgctaaaagatgatgaaaatgcagaatgtctttttaaatgtttttaaatataaacaaatattctttact

SEQ ID NO: 10336 - protein, 554 aa, Homo sapiens [sequence omitted]

SEQ ID NO: 10337 - DNA, 487 bp, Homo sapiens
gggcgagtgtgagcgcgagtgtgcgcacgccgcgggagcctctctgccctctcctcgcaccctgctcagggcatctgaagagcctggaaacgtgaacaggcttgaagtatggcatgttgcaaagatggtttctgccaagaaggtacccgcgatcgctctgtccgccggggtcagtttcgccctcctgcgcttcctgtgcctggcggtttgtttaaacgaatccccaggacagaaccaaaaggaggagaaattgtgcacagaaaatttcacccgcatcctggacagtttgctcgatggttatgacaacaggctgcgtcctggatttgggggtatgaacgatttcaaacgcgcaagtgtgtcctgtctgtccctctcttggtcttcctgtctgtctgtctgtgggaatatcattaggtatgcctcacgtgcaaaaataaatctctctctctttctatctctcctctcttggtgagacctatgacaagaa

SEQ ID NO: 10338 - protein, 115 aa, Homo sapiens
MVSAKKVPAIALSAGVSFALLRFLCLAVCLNESPGQNQKEEKLCTENFTRILDSLLDGYDNRLRPGFGGMNDFKRASVSCLSLSWSSCLSVCGNIIRYASRAKINLSLFLSLLSW

SEQ ID NO: 10339 - DNA, 538 bp, Homo sapiens
ggctttgccgcgctcgctgcacttgggcgagagctggaacgtggaccagagctcggatcccatcgcagctaccgcgatgagaggcgctcgcggcgcctgggattttctctgcgttctgctcctactgcttcgcgtccagacaggctcttctcaaccatctgtgagtccaggggaaccgtctccaccatccatccatccaggaaaatcagacttaatagtccgcgtgggcgacgagattaggctgttatgcactgatccgggctttgtcaaatggacttttgagatcctggatgaaacgaatgagaataagcagaatgaatggatcacggaaaaggcagaagccaccaacaccggcaaatacacgtgcaccaacaaacacggcttaagcaattccatttatgtgtttgttagaggtaaatgcttggctttctgcagtgctgtgctttcaagaatttaatatcctgctcttaattttggatgacatatggatgactgagccatagataaaatatttctggctgggtctagaaggcctaaa

SEQ ID NO: 10340 - protein, 126 aa, Homo sapiens
MRGARGAWDFLCVLLLLLRVQTGSSQPSVSPGEPSPPSIHPGKSDLIVRVGDEIRLLCTDPGFVKWTFEILDETNENKQNEWITEKAEATNTGKYTCTNKHGLSNSIYVFVRGKCLAFCSAVLSRI

SEQ ID NO: 10341 - DNA, 5022 bp, Homo sapiens
ggctttgccgcgctcgctgcacttgggcgagagctggaacgtggaccagagctcggatcccatcgcagctaccgcgatgagaggcgctcgcggcgcctgggattttctctgcgttctgctcctactgcttcgcgtccagacaggctcttctcaaccatctgtgagtccaggggaaccgtctccaccatccatccatccaggaaaatcagacttaatagtccgcgtgggcgacgagattaggctgttatgcactgatccgggctttgtcaaatggacttttgagatcctggatgaaacgaatgagaataagcagaatgaatggatcacggaaaaggcagaagccaccaacaccggcaaatacacgtgcaccaacaaacacggcttaagcaattccatttatgtgtttgttagagatcctgccaagcttttccttgttgaccgctccttgtatgggaaagaagacaacgacacgctggtccgctgtcctctcacagacccagaagtgaccaattattccctcaaggggtgccaggggaagcctcttcccaaggacttgaggtttattcctgaccccaaggcgggcatcatgatcaaaagtgtgaaacgcgcctaccatcggctctgtctgcattgttctgtggaccaggagggcaagtcagtgctgtcggaaaaattcatcctgaaagtgaggccagccttcaaagctgtgcctgttgtgtctgtgtccaaagcaagctatcttcttagggaaggggaagaattcacagtgacgtgcacaataaaagatgtgtctagttctgtgtactcaacgtggaaaagagaaaacagtcagactaaactacaggagaaatataatagctggcatcacggtgacttcaattatgaacgtcaggcaacgttgactatcagttcagcgagagttaatgattctggagtgttcatgtgttatgccaataatacttttggatcagcaaatgtcacaacaaccttggaagtagtagataaaggattcattaatatcttccccatgataaacactacagtatttgtaaacgatggagaaaatgtagatttgattgttgaatatgaagcattccccaaacctgaacaccagcagtggatctatatgaacagaaccttcactgataaatgggaagattatcccaagtctgagaatgaaagtaatatcagatacgtaagtgaacttcatctaacgagattaaaaggcaccgaaggaggcacttacacattcctagtgtccaattctgacgtcaatgctgccatagcatttaatgtttatgtgaatacaaaaccagaaatcctgacttacgacaggctcgtgaatggcatgctccaatgtgtggcagcaggattcccagagcccacaatagattggtatttttgtccaggaactgagcagagatgctctgcttctgtactgccagtggatgtgcagacactaaactcatctgggccaccgtttggaaagctagtggttcagagttctatagattctagtgcattcaagcacaatggcacggttgaatgtaaggcttacaacgatgtgggcaagacttctgcctattttaactttgcatttaaaggtaacaacaaagagcaaatccatccccacaccctgttcactcctttgctgattggtttcgtaatcgtagctggcatgatgtgcattattgtgatgattctgacctacaaatatttacagaaacccatgtatgaagtacagtggaaggttgttgaggagataaatggaaacaattatgtttacatagacccaacacaacttccttatgatcacaaatgggagtttcccagaaacaggctgagttttgggaaaaccctgggtgctggagctttcgggaaggttgttgaggcaactgcttatggcttaattaagtcagatgcggccatgactgtcgctgtaaagatgctcaagccgagtgcccatttgacagaacgggaagccctcatgtctgaactcaaagtcctgagttaccttggtaatcacatgaatattgtgaatctacttggagcctgcaccattggagggcccaccctggtcattacagaatattgttgctatggtgatcttttgaattttttgagaagaaaacgtgattcatttatttgttcaaagcaggaagatcatgcagaagctgcactttataagaatcttctgcattcaaaggagtcttcctgcagcgatagtactaatgagtacatggacatgaaacctggagtttcttatgttgtcccaaccaaggccgacaaaaggagatctgtgagaataggctcatacatagaaagagatgtgactcccgccatcatggaggatgacgagttggccctagacttagaagacttgctgagcttttcttaccaggtggcaaagggcatggctttcctcgcctccaagaattgtattcacagagacttggcagccagaaatatcctccttactcatggtcggatcacaaagatttgtgattttggtctagccagagacatcaagaatgattctaattatgtggttaaaggaaacgctcgactacctgtgaagtggatggcacctgaaagcattttcaactgtgtatacacgtttgaaagtgacgtctggtcctatgggatttttctttgggagctgttctctttaggaagcagcccctatcctggaatgccggtcgattctaagttctacaagatgatcaaggaaggcttccggatgctcagccctgaacacgcacctgctgaaatgtatgacataatgaagacttgctgggatgcagatcccctaaaaagaccaacattcaagcaaattgttcagctaattgagaagcagatttcagagagcaccaatcatatttactccaacttagcaaactgcagccccaaccgacagaagcccgtggtagaccattctgtgcggatcaattctgtcggcagcaccgcttcctcctcccagcctctgcttgtgcacgacgatgtctgagcagaatcagtgtttgggtcacccctccaggaatgatctcttcttttggcttccatgatggttattttcttttctttcaacttgcatccaactccaggatagtgggcaccccactgcaatcctgtctttctgagcacactttagtggccgatgatttttgtcatcagccaccatcctattgcaaaggttccaactgtatatattcccaatagcaacgtagcttctaccatgaacagaaaacattctgatttggaaaaagagagggaggtatggactgggggccagagtcctttccaaggcttctccaattctgcccaaaaatatggttgatagtttacctgaataaatggtagtaatcacagttggccttcagaaccatccatagtagtatgatgatacaagattagaagctgaaaacctaagtcctttatgtggaaaacagaacatcattagaacaaaggacagagtatgaacacctgggcttaagaaatctagtatttcatgctgggaatgagacataggccatgaaaaaaatgatccccaagtgtgaacaaaagatgctcttctgtggaccactgcatgagcttttatactaccgacctggtttttaaatagagtttgctattagagcattgaattggagagaaggcctccctagccagcacttgtatatacgcatctataaattgtccgtgttcatacatttgaggggaaaacaccataaggtttcgtttctgtatacaaccctggcattatgtccactgtgtatagaagtagattaagagccatataagtttgaaggaaacagttaataccattttttaaggaaacaatataaccacaaagcacagtttgaacaaaatctcctcttttagctgatgaacttattctgtagattctgtggaacaagcctatcagcttcagaatggcattgtactcaatggatttgatgctgtttgacaaagttactgattcactgcatggctcccacaggagtgggaaaacactgccatcttagtttggattcttatgtagcaggaaataaagtataggtttagcctccttcgcaggcatgtcctggacaccgggccagtatctatatatgtgtatgtacgtttgtatgtgtgtagacaaatatttggaggggtatttttgccctgagtccaagagggtcctttagtacctgaaaagtaacttggctttcattattagtactgctcttgtttcttttcacatagctgtctagagtagcttaccagaagcttccatagtggtgcagaggaagtggaaggcatcagtccctatgtatttgcagttcacctgcacttaaggcactctgttatttagactcatcttactgtacctgttccttagaccttccataatgctactgtctcactgaaacatttaaattttaccctttagactgtagcctggatattattcttgtagtttacctctttaaaaacaaaacaaaacaaaacaaaaaactccccttcctcactgcccaatataaaaggcaaatgtgtacatggcagagtttgtgtgttgtcttgaaagattcaggtatgttgcctttatggtttcccccttctacatttcttagactacatttagagaactgtggccgttatctggaagtaaccatttgcactggagttctatgctctcgcacctttccaaagttaacagattttggggttgtgttgtcacccaagagattgttgtttgccatactttgtctgaaaaattcctttgtgtttctattgacttcaatgatagtaagaaaagtggttgttagttatagatgtctaggtacttcaggggcacttcattgagagttttgtcttgaatgtcttttgaatattcccaagcccatgagtccttgaaaatattttttatatatacagtaactttatgtgtaaatacataagcggcgtaagtttaaaggatgttggtgttccacgtgttttattcctgtatgttgtccaattgttgacagttctgaagaattc

SEQ ID NO: 10342 - protein, 976 aa, Homo sapiens [sequence omitted]

SEQ ID NO: 10343 - DNA, 816 bp, Homo sapiens
ctcatatgcgccaagaacctcaaatttaaaattgggatttttttttacttaaaaaaaaaatctgactaccctcaaatatacaaatgattctagtcttccctgatttctaaaaggtcctgataccaaacatgaacctgcattttcatccatctttgcaaccagtattgatagagtggctactgtgacttgcactaagctgggtgggcatgctttaggcacccagggaagcaaggcatggtctctcacctcaaggagcccacccacttccaggagaaacaggtctgtccacttgaaactgccctggtgtgatgcatggcttgctggaggcatggagaagtgggaaaattctaaggtgattcgagttgggacctactcagagaatggttcatataaggaagaataagtaccccgatatgggtggataatttctcacaagagacatgacttgagcaaagatacacaaacataaaaagtagctttgccacttcattcttgggcccacgctgaagaaccagtctttttctgaaacattgctaagaatgtggcagaaggaagagatatggcagaacttcatcatggccctgacaaactctgctctgaaaaccttcatgatggtgctgaaaactgactccccctgagagttccttggctaaatgagtcacttggccaagcctgacatcctcagagtgggaaaacaatcttcccaaaataagggcaccataaattacatagccaaacctcatgtcagtagaatggcaggtaaaatcctcccacaagaaggagcagcatatatttggaaataaaaaatgcagtcca

SEQ ID NO: 10344 - protein, 49 aa, Homo sapiens
MSHLAKPDILRVGKQSSQNKGTINYIAKPHVSRMAGKILPQEGAAYIWK

SEQ ID NO: 10345 - DNA, 741 bp, Homo sapiens
cagaagatggatggatgtcaagacagatggtggaaaagttgtgagatgcaaagcctcatggtacagcagtcaccttgcaatcatgaagataaaagccacaaagaatggtagctcagaaggtggaaggactctgcatagttgaagacactatgattagatgtatcagccctggacttaagtacctctgcttttcttaataggagaaaaataaccctcttccttccttatgccaatcttctcgagttccttgctacttgcagctgagtccactcttgactgatatcacctaatctcagtcgctatcagattaaacaacagcattactttcagagggccaccaagaaaaaattgcctgggagaagagtaaggagcctgaagatctgactaactttctctgtagccctttaccgaatagcagattagctgagctcatatgatcgtatcaactagtcatcaccttgattagaacacagaagaagtaagtgttcgtggattcaaactgaagagtcggatggaggagtgtcaaggacctgtcatcataaggaggcagaaagtgagagggtatctttaactataagtgatggttttataaagtagatgcacagttttagaaagtaggaaacccactacaaatgaagtgtctgaacatatagtccagaaggtgtctggtttaaacaaaaaagaaattactacttaggggcatgaacagcaccctatctataaataaagactgccatcata

SEQ ID NO: 10346 - protein, 43 aa, Homo sapiens
MDVKTDGGKVVRCKASWYSSHLAIMKIKATKNGSSEGGRTLHS

SEQ ID NO: 10347 - DNA, 6166 bp, Homo sapiens
actgagtcccgggaccccgggagagcggtcaatgtgtggtcgctgcgtttcctctgcctgcgccgggcatcacttgcgcgccgcagaaagtccgtctggcagcctggatatcctctcctaccggcacccgcagacgcccctgcagccgcggtcggcgcccgggctccctagccctgtgcgctcaactgtcctgcgctgcggggtgccgcgagttccacctccgcgcctccttctctagacaggcgctgggagaaagaaccggctcccgagttctgggcatttcgcccggctcgaggtgcaggatgcagagcaaggtgctgctggccgtcgccctgtggctctgcgtggagacccgggccgcctctgtgggtttgcctagtgtttctcttgatctgcccaggctcagcatacaaaaagacatacttacaattaaggctaatacaactcttcaaattacttgcaggggacagagggacttggactggctttggcccaataatcagagtggcagtgagcaaagggtggaggtgactgagtgcagcgatggcctcttctgtaagacactcacaattccaaaagtgatcggaaatgacactggagcctacaagtgcttctaccgggaaactgacttggcctcggtcatttatgtctatgttcaagattacagatctccatttattgcttctgttagtgaccaacatggagtcgtgtacattactgagaacaaaaacaaaactgtggtgattccatgtctcgggtccatttcaaatctcaacgtgtcactttgtgcaagatacccagaaaagagatttgttcctgatggtaacagaatttcctgggacagcaagaagggctttactattcccagctacatgatcagctatgctggcatggtcttctgtgaagcaaaaattaatgatgaaagttaccagtctattatgtacatagttgtcgttgtagggtataggatttatgatgtggttctgagtccgtctcatggaattgaactatctgttggagaaaagcttgtcttaaattgtacagcaagaactgaactaaatgtggggattgacttcaactgggaatacccttcttcgaagcatcagcataagaaacttgtaaaccgagacctaaaaacccagtctgggagtgagatgaagaaatttttgagcaccttaactatagatggtgtaacccggagtgaccaaggattgtacacctgtgcagcatccagtgggctgatgaccaagaagaacagcacatttgtcagggtccatgaaaaaccttttgttgcttttggaagtggcatggaatctctggtggaagccacggtgggggagcgtgtcagaatccctgcgaagtaccttggttacccacccccagaaataaaatggtataaaaatggaataccccttgagtccaatcacacaattaaagcggggcatgtactgacgattatggaagtgagtgaaagagacacaggaaattacactgtcatccttaccaatcccatttcaaaggagaagcagagccatgtggtctctctggttgtgtatgtcccaccccagattggtgagaaatctctaatctctcctgtggattcctaccagtacggcaccactcaaacgctgacatgtacggtctatgccattcctcccccgcatcacatccactggtattggcagttggaggaagagtgcgccaacgagcccagccaagctgtctcagtgacaaacccatacccttgtgaagaatggagaagtgtggaggacttccagggaggaaataaaattgaagttaataaaaatcaatttgctctaattgaaggaaaaaacaaaactgtaagtacccttgttatccaagcggcaaatgtgtcagctttgtacaaatgtgaagcggtcaacaaagtcgggagaggagagagggtgatctccttccacgtgaccaggggtcctgaaattactttgcaacctgacatgcagcccactgagcaggagagcgtgtctttgtggtgcactgcagacagatctacgtttgagaacctcacatggtacaagcttggcccacagcctctgccaatccatgtgggagagttgcccacacctgtttgcaagaacttggatactctttggaaattgaatgccaccatgttctctaatagcacaaatgacattttgatcatggagcttaagaatgcatccttgcaggaccaaggagactatgtctgccttgctcaagacaggaagaccaagaaaagacattgcgtggtcaggcagctcacagtcctagagcgtgtggcacccacgatcacaggaaacctggagaatcagacgacaagtattggggaaagcatcgaagtctcatgcacggcatctgggaatccccctccacagatcatgtggtttaaagataatgagacccttgtagaagactcaggcattgtattgaaggatgggaaccggaacctcactatccgcagagtgaggaaggaggacgaaggcctctacacctgccaggcatgcagtgttcttggctgtgcaaaagtggaggcatttttcataatagaaggtgcccaggaaaagacgaacttggaaatcattattctagtaggcacggcggtgattgccatgttcttctggctacttcttgtcatcatcctacggaccgttaagcgggccaatggaggggaactgaagacaggctacttgtccatcgtcatggatccagatgaactcccattggatgaacattgtgaacgactgccttatgatgccagcaaatgggaattccccagagaccggctgaagctaggtaagcctcttggccgtggtgcctttggccaagtgattgaagcagatgcctttggaattgacaagacagcaacttgcaggacagtagcagtcaaaatgttgaaagaaggagcaacacacagtgagcatcgagctctcatgtctgaactcaagatcctcattcatattggtcaccatctcaatgtggtcaaccttctaggtgcctgtaccaagccaggagggccactcatggtgattgtggaattctgcaaatttggaaacctgtccacttacctgaggagcaagagaaatgaatttgtcccctacaagaccaaaggggcacgattccgtcaagggaaagactacgttggagcaatccctgtggatctgaaacggcgcttggacagcatcaccagtagccagagctcagccagctctggatttgtggaggagaagtccctcagtgatgtagaagaagaggaagctcctgaagatctgtataaggacttcctgaccttggagcatctcatctgttacagcttccaagtggctaagggcatggagttcttggcatcgcgaaagtgtatccacagggacctggcggcacgaaatatcctcttatcggagaagaacgtggttaaaatctgtgactttggcttggcccgggatatttataaagatccagattatgtcagaaaaggagatgctcgcctccctttgaaatggatggccccagaaacaatttttgacagagtgtacacaatccagagtgacgtctggtcttttggtgttttgctgtgggaaatattttccttaggtgcttctccatatcctggggtaaagattgatgaagaattttgtaggcgattgaaagaaggaactagaatgagggcccctgattatactacaccagaaatgtaccagaccatgctggactgctggcacggggagcccagtcagagacccacgttttcagagttggtggaacatttgggaaatctcttgcaagctaatgctcagcaggatggcaaagactacattgttcttccgatatcagagactttgagcatggaagaggattctggactctctctgcctacctcacctgtttcctgtatggaggaggaggaagtatgtgaccccaaattccattatgacaacacagcaggaatcagtcagtatctgcagaacagtaagcgaaagagccggcctgtgagtgtaaaaacatttgaagatatcccgttagaagaaccagaagtaaaagtaatcccagatgacaaccagacggacagtggtatggttcttgcctcagaagagctgaaaactttggaagacagaaccaaattatctccatcttttggtggaatggtgcccagcaaaagcagggagtctgtggcatctgaaggctcaaaccagacaagcggctaccagtccggatatcactccgatgacacagacaccaccgtgtactccagtgaggaagcagaacttttaaagctgatagagattggagtgcaaaccggtagcacagcccagattctccagcctgactcggggaccacactgagctctcctcctgtttaaaaggaagcatccacacccccaactcctggacatcacatgagaggtgctgctcagattttcaagtgttgttctttccaccagcaggaagtagccgcatttgattttcatttcgacaacagaaaaaggacctcggactgcagggagccagtcttctaggcatatcctggaagaggcttgtgacccaagaatgtgtctgtgtcttctcccagtgttgacctgatcctctttttcattcatttaaaaagcatttatcatgccccctgctgcgggtctcaccatgggtttagaacaaagacgttcaagaaatggccccatcctcaaagaagtagcagtacctggggagctgacacttctgtaaaactagaagataaaccaggcaatgtaagtgttcgaggtgttgaagatgggaaggatttgcagggctgagtctatccaagaggctttgtttaggacgtgggtcccaagccaagccttaagtgtggaattcggattgatagaaaggaagactaacgttaccttgctttggagagtactggagcctgcaaatgcattgtgtttgctctggtggaggtgggcatggggtctgttctgaaatgtaaagggttcagacggggtttctggttttagaaggttgcgtgttcttcgagttgggctaaagtagagttcgttgtgctgtttctgactcctaatgagagttccttccagaccgttacgtgtctcctggccaagccccaggaaggaaatgatgcagctctggctccttgtctcccaggctgatcctttattcagaataccacaaagaaaggacattcagctcaaggctccctgccgtgttgaagagttctgactgcacaaaccagcttctggtttcttctggaatgaataccctcatatctgtcctgatgtgatatgtctgagactgaatgcgggaggttcaatgtgaagctgtgtgtggtgtcaaagtttcaggaaggattttacccttttgttcttccccctgtccccaacccactctcaccccgcaacccatcagtattttagttatttggcctctactccagtaaacctgattgggtttgttcactctctgaatgattattagccagacttcaaaattattttatagcccaaattataacatctattgtattatttagacttttaacatatagagctatttctactgatttttgcccttgttctgtcctttttttcaaaaaagaaaatgtgttttttgtttggtaccatagtgtgaaatgctgggaacaatgactataagacatgctatggcacatatatttatagtctgtttatgtagaaacaaatgtaatatattaaagccttatatataatgaactttgtactattcacattttgtatcagtattatgtagcataacaaaggtcataatgctttcagcaattgatgtcattttattaaagaacattgaaaaacttgaaggaatccctttgcaaggttgcattactgtacccatcatttctaaaatggaagagggggtggctgggcacagtggccgacacctaaaaacccagcactttggggggccaaggtgggaggatcgcttgagcccaggagttcaagaccagtctggccaacatggtcagattccatctcaaagaaaaaaggtaaaaataaaataaaatggagaagaaggaatcagacataatttccatgtggttgttttacatttttactggttttcttactcttcttataagggatattttcataaactgattatatattttacaaaccaataaatgtatttgtag

SEQ ID NO: 10348 - protein, 1356 aa, Homo sapiens; identical to SEQ ID NO: 906

SEQ ID NO: 10349 - DNA, 5835 bp, Homo sapiens
actgagtcccgggaccccgggagagcggtcaatgtgtggtcgctgcgtttcctctgcctgcgccgggcatcacttgcgcgccgcagaaagtccgtctggcagcctggatatcctctcctaccggcacccgcagacgcccctgcagccgcggtcggcgcccgggctccctagccctgtgcgctcaactgtcctgcgctgcggggtgccgcgagttccacctccgcgcctccttctctagacaggcgctgggagaaagaaccggctcccgagttctgggcatttcgcccggctcgaggtgcaggatgcagagcaaggtgctgctggccgtcgccctgtggctctgcgtggagacccgggccgcctctgtgggtttgcctagtgtttctcttgatctgcccaggctcagcatacaaaaagacatacttacaattaaggctaatacaactcttcaaattacttgcaggggacagagggacttggactggctttggcccaataatcagagtggcagtgagcaaagggtggaggtgactgagtgcagcgatggcctcttctgtaagacactcacaattccaaaagtgatcggaaatgacactggagcctacaagtgcttctaccgggaaactgacttggcctcggtcatttatgtctatgttcaagattacagatctccatttattgcttctgttagtgaccaacatggagtcgtgtacattactgagaacaaaaacaaaactgtggtgattccatgtctcgggtccatttcaaatctcaacgtgtcactttgtgcaagatacccagaaaagagatttgttcctgatggtaacagaatttcctgggacagcaagaagggctttactattcccagctacatgatcagctatgctggcatggtcttctgtgaagcaaaaattaatgatgaaagttaccagtctattatgtacatagttgtcgttgtagggtataggatttatgatgtggttctgagtccgtctcatggaattgaactatctgttggagaaaagcttgtcttaaattgtacagcaagaactgaactaaatgtggggattgacttcaactgggaatacccttcttcgaagcatcagcataagaaacttgtaaaccgagacctaaaaacccagtctgggagtgagatgaagaaatttttgagcaccttaactatagatggtgtaacccggagtgaccaaggattgtacacctgtgcagcatccagtgggctgatgaccaagaagaacagcacatttgtcagggtccatgaaaaaccttttgttgcttttggaagtggcatggaatctctggtggaagccacggtgggggagcgtgtcagaatccctgcgaagtaccttggttacccacccccagaaataaaatggtataaaaatggaataccccttgagtccaatcacacaattaaagcggggcatgtactgacgattatggaagtgagtgaaagagacacaggaaattacactgtcatccttaccaatcccatttcaaaggagaagcagagccatgtggtctctctggttgtgtatgtcccaccccagattggtgagaaatctctaatctctcctgtggattcctaccagtacggcaccactcaaacgctgacatgtacggtctatgccattcctcccccgcatcacatccactggtattggcagttggaggaagagtgcgccaacgagcccagccaagctgtctcagtgacaaacccatacccttgtgaagaatggagaagtgtggaggacttccagggaggaaataaaattgaagttaataaaaatcaatttgctctaattgaaggaaaaaacaaaactgtaagtacccttgttatccaagcggcaaatgtgtcagctttgtacaaatgtgaagcggtcaacaaagtcgggagaggagagagggtgatctccttccacgtgaccaggggtcctgaaattactttgcaacctgacatgcagcccactgagcaggagagcgtgtctttgtggtgcactgcagacagatctacgtttgagaacctcacatggtacaagcttggcccacagcctctgccaatccatgtgggagagttgcccacacctgtttgcaagaacttggatactctttggaaattgaatgccaccatgttctctaatagcacaaatgacattttgatcatggagcttaagaatgcatccttgcaggaccaaggagactatgtctgccttgctcaagacaggaagaccaagaaaagacattgcgtggtcaggcagctcacagtcctagagcgtgtggcacccacgatcacaggaaacctggagaatcagacgacaagtattggggaaagcatcgaagtctcatgcacggcatctgggaatccccctccacagatcatgtggtttaaagataatgagacccttgtagaagactcaggcattgtattgaaggatgggaaccggaacctcactatccgcagagtgaggaaggaggacgaaggcctctacacctgccaggcatgcagtgttcttggctgtgcaaaagtggaggcatttttcataatagaaggtgcccaggaaaagacgaacttggaaatcattattctagtaggcacggcggtgattgccatgttcttctggctacttcttgtcatcatcctacggaccgttaagcgggccaatggaggggaactgaagacaggctacttgtccatcgtcatggatccagatgaactcccattggatgaacattgtgaacgactgccttatgatgccagcaaatgggaattccccagagaccggctgaagctaggtaagcctcttggccgtggtgcctttggccaagtgattgaagcagatgcctttggaattgacaagacagcaacttgcaggacagtagcagtcaaaatgttgaaagaaggagcaacacacagtgagcatcgagctctcatgtctgaactcaagatcctcattcatattggtcaccatctcaatgtggtcaaccttctaggtgcctgtaccaagccaggagggccactcatggtgattgtggaattctgcaaatttggaaacctgtccacttacctgaggagcaagagaaatgaatttgtcccctacaagaccaaaggggcacgattccgtcaagggaaagactacgttggagcaatccctgtggatctgaaacggcgcttggacagcatcaccagtagccagagctcagccagctctggatttgtggaggagaagtccctcagtgatgtagaagaagaggaagctcctgaagatctgtataaggacttcctgaccttggagcatctcatctgttacagcttccaagtggctaagggcatggagttcttggcatcgcgaaagtgtatccacagggacctggcggcacgaaatatcctcttatcggagaagaacgtggttaaaatctgtgactttggcttggcccgggatatttataaagatccagattatgtcagaaaaggagatgctcgcctccctttgaaatggatggccccagaaacaatttttgacagagtgtacacaatccagagtgacgtctggtcttttggtgttttgctgtgggaaatattttccttaggtgcttctccatatcctggggtaaagattgatgaagaattttgtaggcgattgaaagaaggaactagaatgagggcccctgattatactacaccagaaatgtaccagaccatgctggactgctggcacggggagcccagtcagagacccacgttttcagagttggtggaacatttgggaaatctcttgcaagctaatgctcagcaggatggcaaagactacattgttcttccgatatcagagactttgagcatggaagaggattctggactctctctgcctacctcacctgtttcctgtatggaggaggaggaagtatgtgaccccaaattccattatgacaacacagcaggaatcagtcagtatctgcagaacagtaagcgaaagagccggcctgtgagtgtaaaaacatttgaagatatcccgttagaagaaccagaagtaaaagtaatcccagatgacaaccagacggacagtggtatggttcttgcctcagaagagctgaaaactttggaagacagaaccaaattatctccatcttttggtggaatggtgcccagcaaaagcagggagtctgtggcatctgaaggctcaaaccagacaagcggctaccagtccggatatcactccgatgacacagacaccaccgtgtactccagtgaggaagcagaacttttaaagctgatagagattggagtgcaaaccggtagcacagcccagattctccagcctgactcggggaccacactgagctctcctcctgtttaaaaggaagcatccacacccccaactcctggacatcacatgagaggtgctgctcagattttcaagtgttgttctttccaccagcaggaagtagccgcatttgattttcatttcgacaacagaaaaaggacctcggactgcagggagccagtcttctaggcatatcctggaagaggcttgtgacccaagaatgtgtctgtgtcttctcccagtgttgacctgatcctctttttcattcatttaaaaagcatttatcatgccccctgctgcgggtctcaccatgggtttagaacaaagacgttcaagaaatggccccatcctcaaagaagtagcagtacctggggagctgacacttctgtaaaactagaagataaaccaggcaatgtaagtgttcgaggtgttgaagatgggaaggatttgcagggctgagtctatccaagaggctttgtttaggacgtgggtcccaagccaagccttaagtgtggaattcggattgatagaaaggaagactaacgttaccttgctttggagagtactggagcctgcaaatgcattgtgtttgctctggtggaggtgggcatggggtctgttctgaaatgtaaagggttcagacggggtttctggttttagaaggttgcgtgttcttcgagttgggctaaagtagagttcgttgtgctgtttctgactcctaatgagagttccttccagaccgttacgtgtctcctggccaagccccaggaaggaaatgatgcagctctggctccttgtctcccaggctgatcctttattcagaataccacaaagaaaggacattcagctcaaggctccctgccgtgttgaagagttctgactgcacaaaccagcttctggtttcttctggaatgaataccctcatatctgtcctgatgtgatatgtctgagactgaatgcgggaggttcaatgtgaagctgtgtgtggtgtcaaagtttcaggaaggattttacccttttgttcttccccctgtccccaacccactctcaccccgcaacccatcagtattttagttatttggcctctactccagtaaacctgattgggtttgttcactctctgaatgattattagccagacttcaaaattattttatagcccaaattataacatctattgtattatttagacttttaacatatagagctatttctactgatttttgcccttgttctgtcctttttttcaaaaaagaaaatgtgttttttgtttggtaccatagtgtgaaatgctgggaacaatgactataagacatgctatggcacatatatttatagtctgtttatgtagaaacaaatgtaatatattaaagccttatatataatgaactttgtactattcacattttgtatcagtattatgtagcataacaaaggtcataatgctttcagcaattgatgtcattttattaaagaacattgaaaaacttgaagg

SEQ ID NO: 10350 - protein, 1356 aa, Homo sapiens; identical to SEQ ID NO: 906

SEQ ID NO: 10351 - DNA, 5727 bp, Homo sapiens
actgagtcccgggaccccgggagagcggtcaatgtgtggtcgctgcgtttcctctgcctgcgccgggcatcacttgcgcgccgcagaaagtccgtctggcagcctggatatcctctcctaccggcacccgcagacgcccctgcagccgcggtcggcgcccgggctccctagccctgtgcgctcaactgtcctgcgctgcggggtgccgcgagttccacctccgcgcctccttctctagacaggcgctgggagaaagaaccggctcccgagttctgggcatttcgcccggctcgaggtgcaggatgcagagcaaggtgctgctggccgtcgccctgtggctctgcgtggagacccgggccgcctctgtgggtttgcctagtgtttctcttgatctgcccaggctcagcatacaaaaagacatacttacaattaaggctaatacaactcttcaaattacttgcaggggacagagggacttggactggctttggcccaataatcagagtggcagtgagcaaagggtggaggtgactgagtgcagcgatggcctcttctgtaagacactcacaattccaaaagtgatcggaaatgacactggagcctacaagtgcttctaccgggaaactgacttggcctcggtcatttatgtctatgttcaagattacagatctccatttattgcttctgttagtgaccaacatggagtcgtgtacattactgagaacaaaaacaaaactgtggtgattccatgtctcgggtccatttcaaatctcaacgtgtcactttgtgcaagatacccagaaaagagatttgttcctgatggtaacagaatttcctgggacagcaagaagggctttactattcccagctacatgatcagctatgctggcatggtcttctgtgaagcaaaaattaatgatgaaagttaccagtctattatgtacatagttgtcgttgtagggtataggatttatgatgtggttctgagtccgtctcatggaattgaactatctgttggagaaaagcttgtcttaaattgtacagcaagaactgaactaaatgtggggattgacttcaactgggaatacccttcttcgaagcatcagcataagaaacttgtaaaccgagacctaaaaacccagtctgggagtgagatgaagaaatttttgagcaccttaactatagatggtgtaacccggagtgaccaaggattgtacacctgtgcagcatccagtgggctgatgaccaagaagaacagcacatttgtcagggtccatgaaaaaccttttgttgcttttggaagtggcatggaatctctggtggaagccacggtgggggagcgtgtcagaatccctgcgaagtaccttggttacccacccccagaaataaaatggtataaaaatggaataccccttgagtccaatcacacaattaaagcggggcatgtactgacgattatggaagtgagtgaaagagacacaggaaattacactgtcatccttaccaatcccatttcaaaggagaagcagagccatgtggtctctctggttgtgtatgtcccaccccagattggtgagaaatctctaatctctcctgtggattcctaccagtacggcaccactcaaacgctgacatgtacggtctatgccattcctcccccgcatcacatccactggtattggcagttggaggaagagtgcgccaacgagcccagccaagctgtctcagtgacaaacccatacccttgtgaagaatggagaagtgtggaggacttccagggaggaaataaaattgaagttaataaaaatcaatttgctctaattgaaggaaaaaacaaaactgtaagtacccttgttatccaagcggcaaatgtgtcagctttgtacaaatgtgaagcggtcaacaaagtcgggagaggagagagggtgatctccttccacgtgaccaggggtcctgaaattactttgcaacctgacatgcagcccactgagcaggagagcgtgtctttgtggtgcactgcagacagatctacgtttgagaacctcacatggtacaagcttggcccacagcctctgccaatccatgtgggagagttgcccacacctgtttgcaagaacttggatactctttggaaattgaatgccaccatgttctctaatagcacaaatgacattttgatcatggagcttaagaatgcatccttgcaggaccaaggagactatgtctgccttgctcaagacaggaagaccaagaaaagacattgcgtggtcaggcagctcacagtcctagagcgtgtggcacccacgatcacaggaaacctggagaatcagacgacaagtattggggaaagcatcgaagtctcatgcacggcatctgggaatccccctccacagatcatgtggtttaaagataatgagacccttgtagaagactcaggcattgtattgaaggatgggaaccggaacctcactatccgcagagtgaggaaggaggacgaaggcctctacacctgccaggcatgcagtgttcttggctgtgcaaaagtggaggcatttttcataatagaaggtgcccaggaaaagacgaacttggaaatcattattctagtaggcacggcggtgattgccatgttcttctggctacttcttgtcatcatcctacggaccgttaagcgggccaatggaggggaactgaagacaggctacttgtccatcgtcatggatccagatgaactcccattggatgaacattgtgaacgactgccttatgatgccagcaaatgggaattccccagagaccggctgaagctaggtaagcctcttggccgtggtgcctttggccaagtgattgaagcagatgcctttggaattgacaagacagcaacttgcaggacagtagcagtcaaaatgttgaaagaaggagcaacacacagtgagcatcgagctctcatgtctgaactcaagatcctcattcatattggtcaccatctcaatgtggtcaaccttctaggtgcctgtaccaagccaggagggccactcatggtgattgtggaattctgcaaatttggaaacctgtccacttacctgaggagcaagagaaatgaatttgtcccctacaagaccaaaggggcacgattccgtcaagggaaagactacgttggagcaatccctgtggatctgaaacggcgcttggacagcatcaccagtagccagagctcagccagctctggatttgtggaggagaagtccctcagtgatgtagaagaagaggaagctcctgaagatctgtataaggacttcctgaccttggagcatctcatctgttacagcttccaagtggctaagggcatggagttcttggcatcgcgaaagtgtatccacagggacctggcggcacgaaatatcctcttatcggagaagaacgtggttaaaatctgtgactttggcttggcccgggatatttataaagatccagattatgtcagaaaaggagatgctcgcctccctttgaaatggatggccccagaaacaatttttgacagagtgtacacaatccagagtgacgtctggtcttttggtgttttgctgtgggaaatattttccttaggtgcttctccatatcctggggtaaagattgatgaagaattttgtaggcgattgaaagaaggaactagaatgagggcccctgattatactacaccagaaatgtaccagaccatgctggactgctggcacggggagcccagtcagagacccacgttttcagagttggtggaacatttgggaaatctcttgcaagctaatgctcagcaggatggcaaagactacattgttcttccgatatcagagactttgagcatggaagaggattctggactctctctgcctacctcacctgtttcctgtatggaggaggaggaagtatgtgaccccaaattccattatgacaacacagcaggaatcagtcagtatctgcagaacagtaagcgaaagagccggcctgtgagtgtaaaaacatttgaagatatcccgttagaagaaccagaagtaaaagtaatcccagatgacaaccagacggacagtggtatggttcttgcctcagaagagctgaaaactttggaagacagaaccaaattatctccatcttttggtggaatggtgcccagcaaaagcagggagtctgtggcatctgaaggctcaaaccagacaagcggctaccagtccggatatcactccgatgacacagacaccaccgtgtactccagtgaggaagcagaacttttaaagctgatagagattggagtgcaaaccggtagcacagcccagattctccagcctgactcggggaccacactgagctctcctcctgtttaaaaggaagcatccacacccccaactcctggacatcacatgagaggtgctgctcagattttcaagtgttgttctttccaccagcaggaagtagccgcatttgattttcatttcgacaacagaaaaaggacctcggactgcagggagccagtcttctaggcatatcctggaagaggcttgtgacccaagaatgtgtctgtgtcttctcccagtgttgacctgatcctctttttcattcatttaaaaagcatttatcatgccccctgctgcgggtctcaccatgggtttagaacaaagacgttcaagaaatggccccatcctcaaagaagtagcagtacctggggagctgacacttctgtaaaactagaagataaaccaggcaatgtaagtgttcgaggtgttgaagatgggaaggatttgcagggctgagtctatccaagaggctttgtttaggacgtgggtcccaagccaagccttaagtgtggaattcggattgatagaaaggaagactaacgttaccttgctttggagagtactggagcctgcaaatgcattgtgtttgctctggtggaggtgggcatggggtctgttctgaaatgtaaagggttcagacggggtttctggttttagaaggttgcgtgttcttcgagttgggctaaagtagagttcgttgtgctgtttctgactcctaatgagagttccttccagaccgttacgtgtctcctggccaagccccaggaaggaaatgatgcagctctggctccttgtctcccaggctgatcctttattcagaataccacaaagaaaggacattcagctcaaggctccctgccgtgttgaagagttctgactgcacaaaccagcttctggtttcttctggaatgaataccctcatatctgtcctgatgtgatatgtctgagactgaatgcgggaggttcaatgtgaagctgtgtgtggtgtcaaagtttcaggaaggattttacccttttgttcttccccctgtccccaacccactctcaccccgcaacccatcagtattttagttatttggcctctactccagtaaacctgattgggtttgttcactctctgaatgattattagccagacttcaaaattattttatagcccaaattataacatctattgtattatttagacttttaacatatagagctatttctactgatttttgcccttgttctgtcctttttttcaaaaaagaaaatgtgttttttgtttggtaccatagtgtgaaatgctgggaacaatgactataagacatgctatggcacatatatttatagtctgtttatgtagaaacaaatgtaatatattaaagccttatatataatg

SEQ ID NO: 10352 - protein, 1356 aa, Homo sapiens; identical to SEQ ID NO: 906

SEQ ID NO: 10353 - DNA, 1270 bp, Homo sapiens
aggctgagaccggtgcgccgcgcgctagtggccgctcttccgcgggctagcgggcggtgggggcgccagcagcgcggaaggcgggcacgcgggccatggctccctgggcggaggccgagcactcggcgctgaacccgctgcgcgcggtgtggctcacgctgaccgccgccttcctgctgaccctactgctgcagctcctgccgcccggcctgctcccgggctgcgcgatcttccaggacctgatccgctatgggaaaaccaagtgtggggagccgtcgcgccccgccgcctgccgagcctttgatgtccccaagagatatttttcccacttttatatcatctcagtgctgtggaatggcttcctgctttggtgccttactcaatctctgttcctgggagcaccttttccaagctggcttcatggtttgctcagaattctcggggcggcacagttccagggaggggagctggcactgtctgcattcttagtgctagtatttctgtggctgcacagcttacgaagactcttcgagtgcctctacgtcagtgtcttctccaatgtcatgattcacgtcgtgcagtactgttttggacttgtctattatgtccttgttggcctaactgtgctgagccaagtgccaatggatggcaggaatgcctacataacagggaaaaatctattgatgcaagcacggtggttccatattcttgggatgatgatgttcatctggtcatctgcccatcagtataagtgccatgttattctcggcaatctcaggaaaaataaagcaggagtggtcattcactgtaaccacaggatcccatttggagactggtttgaatatgtttcttcccctaactacttagcagagctgatgatctacgtttccatggccgtcacctttgggttccacaacttaacttggtggctagtggtgacaaatgtcttctttaatcaggccctgtctgcctttctcagccaccaattctacaaaagcaaatttgtctcttacccgaagcataggaaagctttcctaccatttttgttttaagttaacctcagtcatgaagaatgcaaaccaggtgatggtttcaatgcctaaggacagtgaagtctggagcccaaagtacagtttcagcaaagctgtttgaaactctccattccatttctataccccacaagttttcactgaatgagcatggcagtgccactcaagaaaatgaatctccaaagtatcttcaaagaataaatactaatggcagatctgcg

SEQ ID NO: 10354 - protein, 318 aa, Homo sapiens; identical to SEQ ID NO: 908

SEQ ID NO: 10355 - DNA, 3175 bp, Homo sapiens
aggctgagaccggtgcgccgcgcgctagtggccgctcttccgcgggctagcgggcggtgggggcgccagcagcgcggaaggcgggcacgcgggccatggctccctgggcggaggccgagcactcggcgctgaacccgctgcgcgcggtgtggctcacgctgaccgccgccttcctgctgaccctactgctgcagctcctgccgcccggcctgctcccgggctgcgcgatcttccaggacctgatccgctatgggaaaaccaagtgtggggagccgtcgcgccccgccgcctgccgagcctttgatgtccccaagagatatttttcccacttttatatcatctcagtgctgtggaatggcttcctgctttggtgccttactcaatctctgttcctgggagcaccttttccaagctggcttcatggtttgctcagaattctcggggcggcacagttccagggaggggagctggcactgtctgcattcttagtgctagtatttctgtggctgcacagcttacgaagactcttcgagtgcctctacgtcagtgtcttctccaatgtcatgattcacgtcgtgcagtactgttttggacttgtctattatgtccttgttggcctaactgtgctgagccaagtgccaatggatggcaggaatgcctacataacagggaaaaatctattgatgcaagcacggtggttccatattcttgggatgatgatgttcatctggtcatctgcccatcagtataagtgccatgttattctcggcaatctcaggaaaaataaagcaggagtggtcattcactgtaaccacaggatcccatttggagactggtttgaatatgtttcttcccctaactacttagcagagctgatgatctacgtttccatggccgtcacctttgggttccacaacttaacttggtggctagtggtgacaaatgtcttctttaatcaggccctgtctgcctttctcagccaccaattctacaaaagcaaatttgtctcttacccgaagcataggaaagctttcctaccatttttgttttaagttaacctcagtcatgaagaatgcaaaccaggtgatggtttcaatgcctaaggacagtgaagtctggagcccaaagtacagtttcagcaaagctgtttgaaactctccattccatttctataccccacaagttttcactgaatgagcatggcagtgccactcaagaaaatgaatctccaaagtatcttcaaagaataaatactaatggcagatctgcgatttctgggtccactttctgagatgctttctaaaaccaaccaactgataaaaagtagatgagacttctccaagctgcttcacaagcaaactaaccgaaaaaccgaaaatatacaaacagcttcacacacacacacacacacacacacacacacacacacacacaaaggaagatcatcaatggctgcggtagcctagtaggaatggactatataataatatagcaggtgctcaataactgtttgttgcatttcagtaaaagcagaataacctttcaaaataataacaggctgggtgcaatggctcacacctgttaatcccagcacttcgggaggccaaggtgggcagttcgcttgggcccaagagttcgagaccagcctgggcaacatggtgaaaccctatctccgtgaaaaaatatgaaaattagccaagagtggtggcacatgcctgtagtcccagatacttgggagtgggctgagatgggagaatcgcttgagcccaggaggtcaagggtacagtgagccgaggtcatgccactgcactccagcctggcctgggcaacagagcaagaccctgtctcaaaataataataatatataattttacaccaaaagtttcaggaaaaaacgagtttgttggagttagtttatactttcacatatcaccacaaagatctccagttaaataactatcaatatccatttccattcatctccccctcaaatcatagcctaacagaacactttgaaagctcttttatttaatatttttttacatcctttgaagggagtgcttcaaaaatgaaagcatcagaagataaaatatttttatatttatgcatagcaagccttcgtgaacggaagtgacacactctggattgaataatactgtagcctcattcatatgtagttattcaaattggattaatgtctgtgtgagtttatttgaactagcagaaagtatctgaagatattcaggaataaagtttatacttaaaatagcttatgttaaagaaaatacctgtgattaattcagagggaaataaatgcatggtataaaagaaaaccaaaaacttaaaaaataatactatagcctgagcaacacattaaaactgcacacttgtgcagcgtaagattctctggcttattggctgaggtgttaagtttattccttttatgaagatgtcctattacagtcagctaagcactaaagctttgcatttatatgtactttgctatgggggaaagaaccttatgattaataagacacatatcaaatgcatagtcaatcattcccacccccatccctggagctgtaacccaaaactgttaaactaagattcctttgttttttttgtttttttgagatggagtctcactctgtcgcccagactggagtgcagtggtgggatcctggctcactgcaacctccgccttctgggttccagcgattctcctctgcctcagcctcccaagtagctgggattacaggcacatgccaccatgcccaggtaattgttgtatttttagtagagatagagtttcaccatgttggccaggctggtctcaaactcctgacctcaggtgatccacctgcttcggcctcccaaagtgctgggattacaggtgtaagtcactgctcccggatgcatgtcaagcacattggaaagttcttacaacaattctgatggaggattttctctcccatcaaccaaacaccacttaagattaacctgtggctcagtctacttaaataaatgccatatttattttacttatcatttagaatttgccattctcaggaacaaaactttttgtacattggaaatggaaaacattgcagtttggtcttaatttccacatgaatatcaagtgtaatttttaataaattatttggagaaaaatgta

SEQ ID NO: 10356 - protein, 318 aa, Homo sapiens; identical to SEQ ID NO: 908

SEQ ID NO: 10357 - DNA, 1031 bp, Homo sapiens
tggctccctgggcggaggccgagcactcggcgctgaacccgctgcgcgcggtgtggctcacgctgaccgccgccttcctgctgaccctactgctgcagctcctgccgcccggcctgctcccgggctgcgcgatcttccaggacctgatccgctatgggaaaaccaagtgtggggagccgtcgcgccccgccgcctgccgagcctttgatgtccccaagaggaggggagctggcactgtctgcattcttagtgctagtatttctgtggctgcacagcttacgaagactcttcgagtgcctctacgtcagtgtcttctccaatgtcatgattcacgtcgtgcagtactgttttggacttgtctattatgtccttgttggcctaactgtgctgagccaagtgccaatggatggcaggaatgcctacataacagggaaaaatctattgatgcaagcacggtggttccatattcttgggatgatgatgttcatctggtcatctgcccatcagtataagtgccatgttattctcggcaatctcaggaaaaataaagcaggagtggtcattcactgtaaccacaggatcccatttggagactggtttgaatatgtttcttcccctaactacttagcagagctgatgatctacgtttccatggccgtcacctttgggttccacaacttaacttggtggctagtggtgacaaatgtcttctttaatcaggccctgtctgcctttctcagccaccaattctacaaaagcaaatttgtctcttacccgaagcataggaaagctttcctaccatttttgttttaagttaacctcagtcatgaagaatgcaaaccaggtgatggtttcaatgcctaaggacagtgaagtctggagcccaaagtacagtttcagcaaagctgtttgaaactctccattccatttctataccccacaagttttcactgaatgagcatggcagtgccactcaagaaaatgaatctccaaagtatcttcaaagaataaatactaatggcagatctgcg

SEQ ID NO: 10358 - protein, 219 aa, Homo sapiens
MGKPSVGSRRAPPPAEPLMSPRGGELALSAFLVLVFLWLHSLRRLFECLYVSVFSNVMIHVVQYCFGLVYYVLVGLTVLSQVPMDGRNAYITGKNLLMQARWFHILGMMMFIWSSAHQYKCHVILGNLRKNKAGVVIHCNHRIPFGDWFEYVSSPNYLAELMIYVSMAVTFGFHNLTWWLVVTNVFFNQALSAFLSHQFYKSKFVSYPKHRKAFLPFLF

SEQ ID NO: 10359 - DNA, 1525 bp, Homo sapiens
tggctccctgggcggaggccgagcactcggcgctgaacccgctgcgcgcggtgtggctcacgctgaccgccgccttcctgctgaccctactgctgcagctcctgccgcccggcctgctcccgggctgcgcgatcttccaggacctgatccgctatgggaaaaccaagtgtggggagccgtcgcgccccgccgcctgccgagcctttgatgtccccaagaggaggggagctggcactgtctgcattcttagtgctagtatttctgtggctgcacagcttacgaagactcttcgagtgcctctacgtcagtgtcttctccaatgtcatgattcacgtcgtgcagtactgttttggacttgtctattatgtccttgttggcctaactgtgctgagccaagtgccaatggatggcaggaatgcctacataacagggaaaaatctattgatgcaagcacggtggttccatattcttgggatgatgatgttcatctggtcatctgcccatcagtataagtgccatgttattctcggcaatctcaggaaaaataaagcaggagtggtcattcactgtaaccacaggatcccatttggagactggtttgaatatgtttcttcccctaactacttagcagagctgatgatctacgtttccatggccgtcacctttgggttccacaacttaacttggtggctagtggtgacaaatgtcttctttaatcaggccctgtctgcctttctcagccaccaattctacaaaagcaaatttgtctcttacccgaagcataggaaagctttcctaccatttttgttttaagttaacctcagtcatgaagaatgcaaaccaggtgatggtttcaatgcctaaggacagtgaagtctggagcccaaagtacagtttcagcaaagctgtttgaaactctccattccatttctataccccacaagttttcactgaatgagcatggcagtgccactcaagaaaatgaatctccaaagtatcttcaaagaataaatactaatggcagatctgcgatttctgggtccactttctgagatgctttctaaaaccaaccaactgataaaaagtagatgagacttctccaagctgcttcacaagcaaactaaccgaaaaaccgaaaatatacaaacagcttcacacacacacacacacacacacacacacacacacacacacaaaggaagatcatcaatggctgcggtagcctagtaggaatggactatataataatatagcaggtgctcaataactgtttgttgcatttcagtaaaagcagaataacctttcaaaataataacaggctgggtgcaatggctcacacctgttaatcccagcacttcgggaggccaaggtgggcagttcgcttgggcccaagagttcgagaccagcctgggcaacatggtgaaaccctatctccgtgaaaaaatatgaaaattagccaagagtggtggcacatgcctgtagtcccagatacttgggagtgggctgagatgggagaatcgcttga

SEQ ID NO: 10360 - protein, 219 aa, Homo sapiens; identical to SEQ ID NO: 10358

SEQ ID NO: 10361 - DNA, 831 bp, Homo sapiens
ggcggaggccgagcactcggcgctgaacccgctgcgcgcggtgtggctcacgctgaccgccgccttcctgctgaccctactgctgcagctcctgccgcccggcctgctcccgggctgcgcgatcttccaggacctgatccgctatgggaaaaccaagtgtggggagccgtcgcgccccgccgcctgccgagcctttgatgtccccaagagatatttttcccacttttatatcatctcagtgctgtggaatggcttcctgctttggtgccttactcaatctctgttcctgggagcaccttttccaagctggcttcatggtttgctcagaattctcggggcggcacagttccagggagtggtcattcactgtaaccacaggatcccatttggagactggtttgaatatgtttcttcccctaactacttagcagagctgatgatctacgtttccatggccgtcacctttgggttccacaacttaacttggtggctagtggtgacaaatgtcttctttaatcaggccctgtctgcctttctcagccaccaattctacaaaagcaaatttgtctcttacccgaagcataggaaagctttcctaccatttttgttttaagttaacctcagtcatgaagaatgcaaaccaggtgatggtttcaatgcctaaggacagtgaagtctggagcccaaagtacagtttcagcaaagctgtttgaaactctccattccatttctataccccacaagttttcactgaatgagcatggcagtgccactcaagaaaatgaatctccaaagtatcttcaaagaataaatactaatggcagatctgcg

SEQ ID NO: 10362 - protein, 94 aa, Homo sapiens
MGKPSVGSRRAPPPAEPLMSPRDIFPTFISSQCCGMASCFGALLNLCSWEHLFQAGFMVCSEFSGRHSSREWSFTVTTGSHLETGLNMFLPLTT

SEQ ID NO: 10363 - DNA, 1325 bp, Homo sapiens
ggcggaggccgagcactcggcgctgaacccgctgcgcgcggtgtggctcacgctgaccgccgccttcctgctgaccctactgctgcagctcctgccgcccggcctgctcccgggctgcgcgatcttccaggacctgatccgctatgggaaaaccaagtgtggggagccgtcgcgccccgccgcctgccgagcctttgatgtccccaagagatatttttcccacttttatatcatctcagtgctgtggaatggcttcctgctttggtgccttactcaatctctgttcctgggagcaccttttccaagctggcttcatggtttgctcagaattctcggggcggcacagttccagggagtggtcattcactgtaaccacaggatcccatttggagactggtttgaatatgtttcttcccctaactacttagcagagctgatgatctacgtttccatggccgtcacctttgggttccacaacttaacttggtggctagtggtgacaaatgtcttctttaatcaggccctgtctgcctttctcagccaccaattctacaaaagcaaatttgtctcttacccgaagcataggaaagctttcctaccatttttgttttaagttaacctcagtcatgaagaatgcaaaccaggtgatggtttcaatgcctaaggacagtgaagtctggagcccaaagtacagtttcagcaaagctgtttgaaactctccattccatttctataccccacaagttttcactgaatgagcatggcagtgccactcaagaaaatgaatctccaaagtatcttcaaagaataaatactaatggcagatctgcgatttctgggtccactttctgagatgctttctaaaaccaaccaactgataaaaagtagatgagacttctccaagctgcttcacaagcaaactaaccgaaaaaccgaaaatatacaaacagcttcacacacacacacacacacacacacacacacacacacacacaaaggaagatcatcaatggctgcggtagcctagtaggaatggactatataataatatagcaggtgctcaataactgtttgttgcatttcagtaaaagcagaataacctttcaaaataataacaggctgggtgcaatggctcacacctgttaatcccagcacttcgggaggccaaggtgggcagttcgcttgggcccaagagttcgagaccagcctgggcaacatggtgaaaccctatctccgtgaaaaaatatgaaaattagccaagagtggtggcacatgcctgtagtcccagatacttgggagtgggctgagatgggagaatcgcttga

SEQ ID NO: 10364 - protein, 94 aa, Homo sapiens; identical to SEQ ID NO: 10362

SEQ ID NO: 10365 - DNA, 1049 bp, Homo sapiens
ctctttgcaagggcctgcagcctccgttttgggaacttgagtccaattctgttacccagcaatcagagagattgctaactaaactttattctaagtttaacacagttggttgtgttcttgttaacctcagagaggcctctttttcctgaaagttaactggtcccgttatttgaaaggaaattttaagaacctgaacacctataggattcagattctattaaaaagcaaagatatttttcccacttttatatcatctcagtgctgtggaatggcttcctgctttggtgccttactcaatctctgttcctgggagcaccttttccaagctggcttcatggtttgctcagaattctcggggcggcacagttccagggaggggagctggcactgtctgcattcttagtgctagtatttctgtggctgcacagcttacgaagactcttcgagtgcctctacgtcagtgtcttctccaatgtcatgattcacgtcgtgcagtactgttttggacttgtctattatgtccttgttggcctaactgtgctgagccaagtgccaatggatggcaggaatggagtggtcattcactgtaaccacaggatcccatttggagactggtttgaatatgtttcttcccctaactacttagcagagctgatgatctacgtttccatggccgtcacctttgggttccacaacttaacttggtggctagtggtgacaaatgtcttctttaatcaggccctgtctgcctttctcagccaccaattctacaaaagcaaatttgtctcttacccgaagcataggaaagctttcctaccatttttgttttaagttaacctcagtcatgaagaatgcaaaccaggtgatggtttcaatgcctaaggacagtgaagtctggagcccaaagtacagtttcagcaaagctgtttgaaactctccattccatttctataccccacaagttttcactgaatgagcatggcagtgccactcaagaaaatgaatctccaaagtatcttcaaagaataaatactaatggcagatctgcg

SEQ ID NO: 10366 - protein, 117 aa, Homo sapiens
MIHVVQYCFGLVYYVLVGLTVLSQVPMDGRNGVVIHCNHRIPFGDWFEYVSSPNYLAELMIYVSMAVTFGFHNLTWWLVVTNVFFNQALSAFLSHQFYKSKFVSYPKHRKAFLPFLF

SEQ ID NO: 10367 - DNA, 1543 bp, Homo sapiens
ctctttgcaagggcctgcagcctccgttttgggaacttgagtccaattctgttacccagcaatcagagagattgctaactaaactttattctaagtttaacacagttggttgtgttcttgttaacctcagagaggcctctttttcctgaaagttaactggtcccgttatttgaaaggaaattttaagaacctgaacacctataggattcagattctattaaaaagcaaagatatttttcccacttttatatcatctcagtgctgtggaatggcttcctgctttggtgccttactcaatctctgttcctgggagcaccttttccaagctggcttcatggtttgctcagaattctcggggcggcacagttccagggaggggagctggcactgtctgcattcttagtgctagtatttctgtggctgcacagcttacgaagactcttcgagtgcctctacgtcagtgtcttctccaatgtcatgattcacgtcgtgcagtactgttttggacttgtctattatgtccttgttggcctaactgtgctgagccaagtgccaatggatggcaggaatggagtggtcattcactgtaaccacaggatcccatttggagactggtttgaatatgtttcttcccctaactacttagcagagctgatgatctacgtttccatggccgtcacctttgggttccacaacttaacttggtggctagtggtgacaaatgtcttctttaatcaggccctgtctgcctttctcagccaccaattctacaaaagcaaatttgtctcttacccgaagcataggaaagctttcctaccatttttgttttaagttaacctcagtcatgaagaatgcaaaccaggtgatggtttcaatgcctaaggacagtgaagtctggagcccaaagtacagtttcagcaaagctgtttgaaactctccattccatttctataccccacaagttttcactgaatgagcatggcagtgccactcaagaaaatgaatctccaaagtatcttcaaagaataaatactaatggcagatctgcgatttctgggtccactttctgagatgctttctaaaaccaaccaactgataaaaagtagatgagacttctccaagctgcttcacaagcaaactaaccgaaaaaccgaaaatatacaaacagcttcacacacacacacacacacacacacacacacacacacacacaaaggaagatcatcaatggctgcggtagcctagtaggaatggactatataataatatagcaggtgctcaataactgtttgttgcatttcagtaaaagcagaataacctttcaaaataataacaggctgggtgcaatggctcacacctgttaatcccagcacttcgggaggccaaggtgggcagttcgcttgggcccaagagttcgagaccagcctgggcaacatggtgaaaccctatctccgtgaaaaaatatgaaaattagccaagagtggtggcacatgcctgtagtcccagatacttgggagtgggctgagatgggagaatcgcttga

SEQ ID NO: 10368 - protein, 117 aa, Homo sapiens; identical to SEQ ID NO: 10366

SEQ ID NO: 10369 - DNA, 1617 bp, Homo sapiens
ggtgcaatcctggctcactgcaacctctgcctcccaggttcaagtgattctcctgcctcagcttcccaagtagctgggactacaggcgtgtgccaccacgaccagaggccaggtgcagtgcatgtaatcccagcactttgggagactgagatgggaagatcgcttgaggccaggagtgcaagaccagcctgggcaacacagcaagaccttgattctactaaaaaaaaaaaaggatccttcaacttcaacaataataacacaagggaagtgaagaaaaacactttctaaggaaatctctctctgagctaccatcctgctagggagagcctgaaagcagaatgctgacttgactagctctggtcaatgaaagaaatcaccagtggaaaggctaccagggggctttctcaaaagagagggacagtaaactgcaagatgaacaactcaatgccatccaggtctggatgagaaagaacagtcgagagactgagtttcaggagtggaaacactcaaagcatcatcttccactttcttctccggctgctaggaagaagggaaaaacacagaccttctgaggacctgcggagcaaaccactggcttcagaaaagcaaacagggacttccctctgcgcagcaggaagcagttagcctagtcggaggcttgactgaagaaacaaatgagggaaggcagaagttgagacgcagccagtagaggaaactccgggagaggcaggcagcgtcacttgaagaaaagctctattgtgatgggaacaatcacaggaactaagcggcaacaaaatggctccccaccccctctgcaaatcccaactccatgcaagcactctcccttccctcattttcttttctttttttttgagatggagtctcgctctgttgcccaggctggagtgcagtagcgcgatctcggctcactgcaacctccaccttctggtttcaagcaattctcctgcctcagcctccccagtagctgggactacaggcgtgtgccaccacgcctggctaatttttttttttaatttttagtagagacagagtttcaccatgttggccaggctggtctcgaactcctggcctcaagtgatccacctgcctcagcctcccaaagtggtgggattacaggtgtaagcgaccacgcccggccttttaaaatcgacttgagtctcatctcctgaaatgcaaaatgcattgggcctgtctcttacttctgcatgtctcataatgcttagcacagcacaagccccgagagcgcatcatacaccctggggtggggagctcctggcagggctggatccactcaccattcctgccatccattggcacttggctcagcacagttaggccaacaaggacataatagacaagtccaaaacagtactgcacgacgtgaatcatgacattggagaagacactgacgtagaggcactcgaagagtcttcgtaagctgtgcagccacagaaatactagcactaagaatgcagacagtgccagctcccctcctacaattcagaaggcaacagggtcagcatttctcttctgggattaatccaaagttttgtttttctgtactgttaagcaaagtattaaatcccatctaacatc

SEQ ID NO: 10370 - protein, 45 aa, Homo sapiens
MGRSLEARSARPAWATQQDLDSTKKKKGSFNFNNNNTREVKKNTF

SEQ ID NO: 10371 - DNA, 1702 bp, Homo sapiens
acggaggaggcgccgcggttgccccggtaacgggagcggcggacgattagcggctcgcggcggggacgcgcttggcgacgatggcggagccccagtgcccggaaatgcaacggcccggacagcgcgaggccacggcgccccctggaggtcggcgcccgcggccagcaaatgccaaacctcagctggtgcctgagctggcatcctcttcctcctgtcggcgggaggtgtggatcacctactgcgtgcggggaacaaacgccgccccagtaccggtccctgcagcggagtagccttcacctgcaaggtgaacgcctgctcaccacgtaatccccaaacgcagatatcacgttgtctctgcaactttccctgacaaccacccaatgcaattaattatcccacaatagtatctcccgcaggctctctgtagaaccatagaattcatccatcaaaatacaatcatttgttgatccgtctctctctgccgcccccaaatgtgaattccttgagtcagagactattctactcagcaaaacatttgtgagtggaattaaattgaaataaaccgttatagtccactcacagatggaaaacacatagtaaaatcctagaattccatttctcccctgaaaatttcccagacagtcagagggagtttcattctttcctgtttacttttctcccaaataggccttctgaggcagcagaatagggaaggaagtcagaagactgaccagctcatacctatggaatgcctatcatacatacacttaaaattatggcaagctcacgcaggcgcactaagagagaaaaaacaagaaaacagatatgacaattataggaaatcccctccctagagttaaagaagtgtaggaagtgggtataaaagaacaaaggctatattaatccagggctgacaccacttgaagataagcccgttcctctctctggtatattctttgcttaataaatcttgtggggtggttatttgtgtgtctcatccaattctttgttcataacaccaagaacctggaactcccaacttccaatctggtaacatattttggtgagccagccaggagggtcaagcctgcaatacctaaagctccagacctggaacccaaagctcccatcagtcgctaccctgtgaacctgtggaggatctgaagtacctgtttaaaaggcatccaaaagatagaatctatcaagctacaaatggctatgttgcctgaagccccagacatcatcctacaagaaataagtccagacttcttaatttccccctggatagagcaggattcgattcagttggaaagacatggttaatgcttaagagagccagaagaacccaaatctttgaacacacttagagcaaccacaaactgctgttagaaaactaatgttaatgtttaagaagtacttgttattttagtttaccttatcaaatttggtcctgtcagcaacatcgagatcagaggcagacatgtttcccatatccaacagggaagatgactgagatctgcgattccctgaactctgaacactgagcttatttagactagaagtagatccagttaatttccccgaacttccatgaagacctaagaaataataaaactttgaaagttgtgatcttcacaaataaatgatccaaagtataaagcagggatagatcttctatcttctactggcttgatcttccagg

SEQ ID NO: 10372 - protein, 36 aa, Homo sapiens
MAMLPEAPDIILQEISPDFLISPWIEQDSIQLERHG

SEQ ID NO: 10373 - DNA, 1836 bp, Homo sapiens
acggaggaggcgccgcggttgccccggtaacgggagcggcggacgattagcggctcgcggcggggacgcgcttggcgacgatggcggagccccagtgcccggaaatgcaacggcccggacagcgcgaggccacggcgccccctggaggtcggcgcccgcggccagcaaatgccaaacctcagctggtgcctgagctggcatcctcttcctcctgtcggcgggaggtgtggatcacctactgcgtgcggggaacaaacgccgccccagtaccggtccctgcagcggagtagccttcacctgcaaggtgaacgcctgctcaccacgtaatccccaaacgcagatatcacgttgtctctgcaactttccctgacaaccacccaatgcaattaattatcccacaatagtatctcccgcaggctctctgtagaaccatagaattcatccatcaaaatacaatcatttgttgatccgtctctctctgccgcccccaaatgtgaattccttgagtcagagactattctactcagcaaaacatttgtgagtggaattaaattgaaataaaccgttatagtccactcacagatggaaaacacatagtaaaatcctagaattccatttctcccctgaaaatttcccagacagtcagagggagtttcattctttcctgtttacttttctcccaaataggccttctgaggcagcagaatagggaaggaagtcagaagactgaccagctcatacctatggaatgcctatcatacatacacttaaaattatggcaagctcacgcaggcgcactaagagagaaaaaacaagaaaacagatatgacaattataggaaatcccctccctagagttaaagaagtgtaggaagtgggtataaaagaacaaaggctatattaatccagggctgacaccacttgaagataagcccgttcctctctctggtatattctttgcttaataaatcttgtggggtggttatttgtgtgtctcatccaattctttgttcataacaccaagaacctggaactcccaacttccaatctggtaacatattttggtgagccagccaggagggtcaagcctgcaatacctaaagctccagacctggaacccaaagctcccatcagtcgctaccctgtgaacctgtggaggatctgaagtacctgtttaaaaggcatccaaaagatagaatctatcaagctacaaatggctatgttgcctgaagccccagacatcatcctacaagaaataagtccagacttcttaatttccccctggatagagcaggggtactccttaatgactttacgaagttcttgtttgttaaatgcaagttggtaacttacttcctcctcccttatgccctgtgccacgcgagcttcaacaccttcaaagaaatgcttcaaggaaatgaaaagaaacaatggctaagacctgcatttattattatttacattaaaaaaatctgattacaaagtagtgtataatcaccatgcaaaaatcagtgtgtgaaagtataaacaataaaataacaatcacttattaacatacttctgagatgaacattgttaatattgtagagttccttgtaatcttttgatgtgtgaatacatacaggagattaaaatttcatgtcccactttacatttaatattgttttttcctaaatataaattttaatggctgcataatatttcacacaatgactgaaccacaattattattcattcctctagtactagatatttaacatcccactcccccttctttttttggacttggcaaatctagtgagactttagaaaatctactataaatatatttgtcata

SEQ ID NO: 10374 - protein, 44 aa, Homo sapiens
MAMLPEAPDIILQEISPDFLISPWIEQGYSLMTLRSSCLLNASW

SEQ ID NO: 10375 - DNA, 269 bp, Homo sapiens
ctacagtggtagcagtggtggaagccatggattgtagcagtagtgatggcatcttgaagccaaaagttcagtgatggccctttgacttctggccctccagcacttccactgatatttcgtgatactgtggcctgggtgaagacatcgtatcctctgtgtgtaacagtgataagaaggcttacctcgcagggttattacaagacaaatgaaataactttggcacactattaaaggcttcgtggataattaaagcttcacaaaaaccttga

SEQ ID NO: 10376 - protein, 57 aa, Homo sapiens [sequence omitted]

SEQ ID NO: 10377 - DNA, 580 bp, Homo sapiens
ctctgcagtatgagagaatgctctgagttaagtctccaggctcagtgtgatggttaattttatgtgttgacttgactgggttgaggatgcctggatagctggtgaaacattatttccgggtgtgtgtctgtgagggtgtttctggaagagagtaacatttgaataagtagacaagatccaccctcactaatgtgggtggcatcacccaatccgttgagggcctgaatagagtgaaaaggtggaggaagggcaaatcctctctctccttgagctgggacattcatcttcttctgcccttcacactgaagtgcccagttctggggccttcagactcagactgaatcacaccaccagctttcctggttctctagcttgcatatggcagatggtgggacttctgggcctccataattacatgagccaattctcatatatatctatagtatgtagaatatatgtgagaaatatattaatgtaagtatacatatgtgaggtgtgtgtgtgtgtgagccaccatgctcggcccctcacttaactttgaacattttccctgttctggcccccattttactcttttcct

SEQ ID NO: 10378 - protein, 30 aa, Homo sapiens
MVGLLGLHNYMSQFSYISIVCRIYVRNILM

SEQ ID NO: 10379 - DNA, 759 bp, Homo sapiens
gttcataacaccaagaacctggaactcccaacttccaatctggtaacatattttggtgagccagccaggagggtcaagcctgcaatacctaaagctccagacctggaacccaaagctcccatcagtcgctaccctgtgaacctgtggaggatctgaagtacctgtttaaaaggcatccaaaagatagaatctatcaagctacaaatggctatgttgcctgaagccccagacatcatcctacaagaaataagtccagacttcttaatttccccctggatagagcagggtaagagttctgtggtcccctgttaggtggggccagcagtcccactcagctggaagcaagtatagaagaaagaacttcaaccctcagcaacctattatgatttatggggatcacatctctcagagggaattgaggcaggagaatagggaaggaagtcagaaaatcaacctgcagccttttctcaccaaaacaagcataaggcaccatctgataaggaagctgaagcaatgaaccaatgctttctgcagtaaacaaatctggtataaccttttattataataagttacttaaagcccatacatatggaatgcatatcatacatacacttaaaattatggaatggcaagcacatgcaggcgcactgagagagaaaaccaacaagaaaactgatatgtcaattataggcaacctcctccctaaaagttaagtaagagtagtaaggtggtataaaagaacaaaggctatgttaaccc

SEQ ID NO: 10380 - protein, 63 aa, Homo sapiens [sequence omitted]

SEQ ID NO: 10381 - DNA, 2123 bp, Homo sapiens
gtcgccaagcgcgtccccgccgcgagccgctaatcgtccgccgctcccgttaccggggcaaccgcggcgcctcctccgtgtcggccccgatcgtccctccgcgccattttcaaactgctctagcgccggagcccgtgcctggacggaaggagctagtgggggactcgaggcctgagggcaatgcggctggaggcggaggcaacggcggctggagctgccggactttaatttttggaagtgaataaaacttgttttagaagacgagatgactacagctgtagagagaaagtatattaatattaggaaaaggctggatcagctgggataccgccagactctgacagtggagtgtttacctttggtagaaaaacttttcagcgacttagttcatacaactgagagccttcggcaatcaaaattatctgctgtgaaagctgaaaaagaaagtgccaattttgattttgttttggaaccctataaacttgaaaatgcaagattgagtagagaaaataatgaattatacctagagttaatgaaactgagagaacattcagaccaacacgttaaagagttgaaaacttcattgaagaaatgtgcacgtgaaacagctgatctgaaatttctgaataaccaatatgctcataaactcaaactgttggagaaagagagcaaagctaagaatgaaagaattcaacaacttcaagaaaagaatttgcatgctgtagtacaaactccaggtggcaagaaaagaagtattgctttcaggcgccagcgtatgcaaattgatgaaccggttcctccctctgaagtcagttcatatccagttcctcaaccagatgacccttacattgcagacctccttcaagtggctgataacaggattcaagaacttcaacaggaagtccaccagctacaagaaaagttagcaatgatggaaagtggggtgagagactatagcaagcaggtaggatttttatttacttgcatagtagggattgagataggtatgctgtgattgtaaatagaattgggttatatttgaaattgctgatactgagtttttatacagctttcctctttttcatcaggtttgttaatagagttaatagctggaatggcttaggtggctttacttacttagcctgtctcttcaaaaaatttaaaaattagccaagtgtggtggcatgtgcctatggtcccaggtacttgggaggctgaggtgggaggattaatggattgaagagcacttatttactcgattctcttcactattcattgaggtgaatagtagttttttgtttggtttttcttttagctgaatcatctatctccccaaatataattttataaccatattaccgttttcatctcaggagacattttattaagtgtgctatgttttataattgtatttttgtgatttttctactcttattatatattttgtcatattgaacaccagtctcttagaaagttactcttttgtgttgctaatttttttgtttgttttctctataagcacaagtcctcatacaacagttttctgaagaatcaggagaattagtagatgcagagttatattataaccatagcaagctttgtcttttcataatttctattgatgtcttggctaaattttgatttgggtaattataggcttgttttcttaatatgcttcttgaaggttaaattgggtaacatgtttttcattttctgcattgactgcattttttttgagtgatctgcacacacaaatatagatgtaacttaggtgttggtataactaaatctttaaagtgttttgaagattagttggataaaaatggagttaaagaaaattgaccaggcgtggtggctcatgcctgtaatcgcagcactttgggaggccgaggcgggtggatcacttgagatcagaagtttgagaccatcctggccaacatggtgaaacctcatctctactaaaaatacaaaaaattagccgggcgtagtggcgggcgcctgtagtcccagctacttgggaggctgaggcaggagaatggcgtgaacccgggaggcggagcttgcagtgagccgagatcccgccactgcactccagcctgggcgacagagcgagactccgtctc

SEQ ID NO: 10382 - protein, 249 aa, Homo sapiens
MTTAVERKYINIRKRLDQLGYRQTLTVECLPLVEKLFSDLVHTTESLRQSKLSAVKAEKESANFDFVLEPYKLENARLSRENNELYLELMKLREHSDQHVKELKTSLKKCARETADLKFLNNQYAHKLKLLEKESKAKNERIQQLQEKNLHAVVQTPGGKKRSIAFRRQRMQIDEPVPPSEVSSYPVPQPDDPYIADLLQVADNRIQELQQEVHQLQEKLAMMESGVRDYSKQVGFLFTCIVGIEIGML

SEQ ID NO: 10383 - DNA, 1526 bp, Homo sapiens
tttcttatttcacttactaagtctgtgaattgtggagtaaacctcagttttctaaacctaagaattggcagcagtacctcaaagaattttcctggggatcaaaatgcaatagtgaggtgtttcttgcacagtgtatctgagtttcaaattatttactactcagttttaaatcttgttacaaaccaactctccatgatgttgtactatattttatattgatttggggaccctttggcacagtacgtcctacctgtttgagaagctgaaagtatagaatttatgaaataacacatctagcttcgtttcttattttgtatttcttaacaaaagtgtattggcattaatttaaagtgcttttcaggattcaagaacttcaacaggaagtccaccagctacaagaaaagttagcaatgatggaaagtggggtgagagactatagcaagcagattgagctaagagaacgagagatagaacgactgtcagttgctttggatggtggtcggtcccctgatgtcctttctctggagtctagaaataaaaccaatgaaaagcttattgctcatttaaatattcaggttgactttcttcagcaagctaataaagacctggagaagcgtatacgagagcttatggaaaccaaggaaacagtgacatctgaagtcgttaatttaagtaacaaaaatgaaaaactctgccaagaattaactgaaatagatcagttagcacagcagttggaaagacataaagaagaagtgcttgagactgctgataaagagcttggggaagcaaagaaagagattaaaagaaagctctctgaaatgcaggatcttgaagaaacaatggcaaaacttcagctggaattgaacttatgccagaaagaaaaggagagactgagtgatgaactccttgtaaaatcagacctagaaactgttgttcatcagcttgaacaagaaaagcaaagacttagcaaaaaagttgaaagttttgcagttacagaacgacaacttactctggaggttgagaggatgagactagaacatggaataaaacgtcgagacaggtcaccttctcgtttagatacatttctgaaaggtatagaagaagaacgagattattataagaaagagctagagagactccaacatataatacagcgaagatcttgctctacaagttatagcgcacgtgaaaaaagttcaatatttagaacaccagaaaagggtgattacaattcagaaattcatcagatcacaagagaaagagatgaacttcagcgtatgctagaaagatttgaaaaatatatggaagatatacagtccaatgttaaattattgacagcagaaagagataaactaagtgtcttatataatgaagctcaggaagaattatctgccctaagaaaggaatccacccaaaccacagcaccccataatattgttagtcttatggaaaaggaaaaagaacttgcgttatctgacttaagaagaattatggcagaaaaggaagctttaagagaaaaattagag

SEQ ID NO: 10384 - protein, 371 aa, Homo sapiens
MMESGVRDYSKQIELREREIERLSVALDGGRSPDVLSLESRNKTNEKLIAHLNIQVDFLQQANKDLEKRIRELMETKETVTSEVVNLSNKNEKLCQELTEIDQLAQQLERHKEEVLETADKELGEAKKEIKRKLSEMQDLEETMAKLQLELNLCQKEKERLSDELLVKSDLETVVHQLEQEKQRLSKKVESFAVTERQLTLEVERMRLEHGIKRRDRSPSRLDTFLKGIEEERDYYKKELERLQHIIQRRSCSTSYSAREKSSIFRTPEKGDYNSEIHQITRERDELQRMLERFEKYMEDIQSNVKLLTAERDKLSVLYNEAQEELSALRKESTQTTAPHNIVSLMEKEKELALSDLRRIMAEKEALREKL

SEQ ID NO: 10385 - DNA, 438 bp, Homo sapiens
cgaggatgaatctatggttatgaagtactttccatggtatccaacatgtccaccacgcccaggcaactctgtcataccaaaatttctaaagttcctgtgtcatactgcatggaactctcctgctctttcagccttaggtcaaatgcatggcaaaggaatccactacactccagagaaaggacatcaggggaccgaccaccatccaaagcaactgacagtcgttctatctctcgttctcttagctcaatctgaagatatagtcatgctgtcattttaaaaaatctggttttcaaccaaatgattaacactgtacaaacatttatttggatatattttcttatgtaccaatgtatgcaagagattaacattcatatttgtgtccatatattatatgcataaatgcagaacaaaaataaattacatagaaaatgtcaacag

SEQ ID NO: 10386 - protein, 87 aa, Homo sapiens
MVMKYFPWYPTCPPRPGNSVIPKFLKFLCHTAWNSPALSALGQMHGKGIHYTPEKGHQGTDHHPKQLTVVLSLVLLAQSEDIVMLSF

SEQ ID NO: 10387 - DNA, 5388 bp, Homo sapiens
aattaaatacctagcttttatctacttacgtagtggattcctttgccatgcatttgacctaaggctgaaagagcaggagagttccatgcagtatgacacaggaactttagaaattttggtatgacagagttgcctgggctacaaacagaatatagtaagtaaaaaatatcaacagtagctctagaggagtgctgtcccatagaaatatgatatgagccatatatgtaatttaaatttttctagtagcagcttgatttaaaaaaataaaaagaggtgaaattaattgtaacaatatatttaccccagtatgtccaaaatattataatttcaaccagtaatgtttttacatacctatttttttgtttgtattatctttgaaatcctgtgtatattttacagttatagcacatctcagtttacactagccacatttcagatgctcagtagccacatgtggttgctagaggctactatattgaacaacacagtctattatcatcttgatattcttgttgtatagaactctgtattgggaaaaagttcacacaaatttcttgtcctttctatgcttgaaaatcaaagtcaatggatatgtactttcattacactgcacatggtcagttttgtaaataacaatataaatttgcaaatataaaatagctgtagttttaatcttcaataatttttaaaatatagttttttgaagtattatttggaaagtcagtgtttaggataattttccaattcatatacctcataaattacaactccaatttaggttgactttcttcagcaagctaataaagacctggagaagcgtatacgagagcttatggaaaccaaggaaacagtgacatctgaagtcgttaatttaagtaacaaaaatgaaaaactctgccaagaattaactgaaatagatcagttagcacagcagttggaaagacataaagaagaagtgcttgagactgctgataaagagcttggggaagcaaagaaagagattaaaagaaagctctctgaaatgcaggatcttgaagaaacaatggcaaaacttcagctggaattgaacttatgccagaaagaaaaggagagactgagtgatgaactccttgtaaaatcagacctagaaactgttgttcatcagcttgaacaagaaaagcaaagacttagcaaaaaagttgaaagttttgcagttacagaacgacaacttactctggaggttgagaggatgagactagaacatggaataaaacgtcgagacaggtcaccttctcgtttagatacatttctgaaaggtatagaagaagaacgagattattataagaaagagctagagagactccaacatataatacagcgaagatcttgctctacaagttatagcgcacgtgaaaaaagttcaatatttagaacaccagaaaagggtgattacaattcagaaattcatcagatcacaagagaaagagatgaacttcagcgtatgctagaaagatttgaaaaatatatggaagatatacagtccaatgttaaattattgacagcagaaagagataaactaagtgtcttatataatgaagctcaggaagaattatctgccctaagaaaggaatccacccaaaccacagcaccccataatattgttagtcttatggaaaaggaaaaagaacttgcgttatctgacttaagaagaattatggcagaaaaggaagctttaagagaaaaattagagcatattgaagaagtgagtctttttggaaaatcagaattagagaaaactattgaacatttgacatgtgttaatcatcagcttgaaagcgaaaaatatgaattaaagtctaaagtgttaataatgaaagaaacaatagagtcgttagagaacaaattaaaagtccaagctcaaaaatttagccatgtggctggtgactcatctcatcagaaaacagaggtgaactcacttaggatagtgaatgagcagctacagcggtcagttgatgactatcagcaccgactttccataaaaagaggtgaacttgaatcagcccaagcacaaattaaaatactggaggaaaagatagatgaactaaaccttaagatgacttcacaggatgaggaggctcatgtaatgaaaaagaccattggtgttattgataaagaaaaagactttctccaggagactgtagatgagaagacagaaaagattgcaaatttgcaagaaaacctagctaataaagaaaaagctgttgctcaaatgaagataatgatctcagagtgtgaatcatctgtgaaccagctgaaagaaacattggttaatcgagatcgtgagataaacagcctccggcgccagcttgatgcagctcacaaagaactcgatgaagtaggaagatctagagaaatcgcttttaaggaaaacagaagactgcaagatgacctggctacaatggcaagagaaaatcaagaaatctcattggaattggaagcagcagtgcaagaaaaagaagaaatgaagagcagagttcataaatacataacagaggtgtcacgatgggagagcttaatggctgccaaggaaaaagaaaatcaagatttgttagatagatttcagatgcttcataaccgtgctgaagactgggaggtcaaagcccatcaagctgagggagaaagcagctcagttcgactggaacttctttctattgacactgagaggagacatcttcgagaaagagtggagctattagaaaaagaaattcaagagcacataaatgcccatcatgcttatgaatctcagatctcatcaatggcaaaagccatgtctcgattagaagaagagctgagacatcaagaagatgagaaagcaacagtattaaatgacttgtcatctcttagagaactttgcattaaacttgattcaggcaaagatattatgacccagcaattgaattcgaaaaaccttgagtttgagagggttgtggtggaattagaaaatgtaaagtcagagtcagacctactgaaaaaacaactttcaaatgagagacatacagttaaaaacctcgaatcattgttggctacaaacagagataaagaatttcattctcacttaacctcccacgagaaggatacagaaatccagctacttaaggagaagttaaccctttctgaaagcaaattaactagtcaaagccgggaaaacaccatgcttcgagctaaagtggcacagttacaaacagattatgatgctctgaaaaggcagatctcaactgaaagatacgaacgagaacgagcaatccaagagatgcgtcgacatggtcttgctacaccaccccttagttccactctgaggtctccttcacattctcctgaacatagaaatgtgtaattatcagaaagaataatggctttcaatgagttcctatgtggatttttaaaagaacagaacagtaatgaaatatttgaagtacttgttgctgaaaatcatgaacatggacacaaattctacctctgtcaacttttatttaaatcagtgaatatgttaaaaagtttggtttaaaagaactatatctatatgtatattttcatatatatgacagaacaagaatatgtattaatagtgcctaatgtatctatatttttattattcatgaattaaattactaaaagtatgtttatactgtgaattaatataatgtattcacattattctttaataatctgtttattaataagccatgatatgtgtatgtaaatattcttacagtacttgtttttagttgtcatgcctatgtttagaccatatcttaatgtattcacaaagaattatcaactttgatgctatgctgtcatgcttaactttttcttcttaaaattattcatagatctactgtctgttgtcaaggggaatatattcaggtctagtcttcttataatagcagaggtcttggtaaaataactaccatatataacgtgttattgccatctagaagaactatgatgagaaagatacatttatatattatgtaaaatgttaactatcatcatatggactctatgtaacacaaattcaaaagcaaactaaaagctatatgcagagttttgtataaaacaatagaacagaaatttgggacatttttctaggaaataaaattcctcggtgtattaatctaaggtttcaaagtataaaagtatatggggtaggccgggtgcagtggctcacgcctgtaatcccagcactttgggaggccgaggcgagtggatttcctaaggtcaggagtttgagaccagcctgagcaatgtggtgaaaccccatctctactaaaaatacaaaaattatctgggcttggtggcgggcacctgtaatcccagccacttgggaggctgaggcaggagaattgcttgaacccgggaggtggaggctgcggtgagccaagatcatgccattgcactccagcctgggtgacagagtaacactctgtctcagaaaaaaaaaaaaagaaaaatatatggggtaaatacagtaaaacgttttgttaaattccaatatacattcagtgataccactctttttcttctaagcctgtgtgttataatttaccagttccccaaaatgccatttttaacgccgaactgtgtaatatacatggaaaacagctttttacaattaattttcaaagttgtaattttaaagaatttgggtgtatacctatgttaatgaaacaacagaagtacaaaaaagaatatcagatacaaaaatcaatcgtgaagaaaatctgttcttaatatatttcattatgattgaaaaacataaaaactaacataggaaagtgaatgatcagttacttatgatatattttgtttcctcttgtggtttaataaagtgaagtgtgtgtgtgtgtgtgtgtgtgtatacctgggggtgggcagtgctctttttctaaaactaatatggcttatatatctgaattatgccctttttagtgtgtattaggatgtgggctggtttgcttttctaccacctttgtaattttatgtatcccatctcctttgtgtgaattcatatattatagcaaaatacaagagacatgggactgtttgcaataccatatggaaatcttttaataaatatatgtaaataaaataaaaaatatttgtctccaccttttccccaaaagcaacagcaagacatattttgttagatattttatttttaatgttttctataatttaaaaatgtatagcctgccaaatgttgttttcataaccatgatattgttttgaaaaaattttatcttaaaatactgaatgttctgaccttttatagatgtttttgattttgttttaaataattttaaattatggagcttgacctagatttgccaataaactttctagcctatt

SEQ ID NO: 10388 - protein, 846 aa, Homo sapiens
METKETVTSEVVNLSNKNEKLCQELTEIDQLAQQLERHKEEVLETADKELGEAKKEIKRKLSEMQDLEETMAKLQLELNLCQKEKERLSDELLVKSDLETVVHQLEQEKQRLSKKVESFAVTERQLTLEVERMRLEHGIKRRDRSPSRLDTFLKGIEEERDYYKKELERLQHIIQRRSCSTSYSAREKSSIFRTPEKGDYNSEIHQITRERDELQRMLERFEKYMEDIQSNVKLLTAERDKLSVLYNEAQEELSALRKESTQTTAPHNIVSLMEKEKELALSDLRRIMAEKEALREKLEHIEEVSLFGKSELEKTIEHLTCVNHQLESEKYELKSKVLIMKETIESLENKLKVQAQKFSHVAGDSSHQKTEVNSLRIVNEQLQRSVDDYQHRLSIKRGELESAQAQIKILEEKIDELNLKMTSQDEEAHVMKKTIGVIDKEKDFLQETVDEKTEKIANLQENLANKEKAVAQMKIMISECESSVNQLKETLVNRDREINSLRRQLDAAHKELDEVGRSREIAFKENRRLQDDLATMARENQEISLELEAAVQEKEEMKSRVHKYITEVSRWESLMAAKEKENQDLLDRFQMLHNRAEDWEVKAHQAEGESSSVRLELLSIDTERRHLRERVELLEKEIQEHINAHHAYESQISSMAKAMSRLEEELRHQEDEKATVLNDLSSLRELCIKLDSGKDIMTQQLNSKNLEFERVVVELENVKSESDLLKKQLSNERHTVKNLESLLATNRDKEFHSHLTSHEKDTEIQLLKEKLTLSESKLTSQSRENTMLRAKVAQLQTDYDALKRQISTERYERERAIQEMRRHGLATPPLSSTLRSPSHSPEHRNV

SEQ ID NO: 10389 - DNA, 5628 bp, Homo sapiens
aattaaatacctagcttttatctacttacgtagtggattcctttgccatgcatttgacctaaggctgaaagagcaggagagttccatgcagtatgacacaggaactttagaaattttggtatgacagagttgcctgggctacaaacagaatatagtaagtaaaaaatatcaacagtagctctagaggagtgctgtcccatagaaatatgatatgagccatatatgtaatttaaatttttctagtagcagcttgatttaaaaaaataaaaagaggtgaaattaattgtaacaatatatttaccccagtatgtccaaaatattataatttcaaccagtaatgtttttacatacctatttttttgtttgtattatctttgaaatcctgtgtatattttacagttatagcacatctcagtttacactagccacatttcagatgctcagtagccacatgtggttgctagaggctactatattgaacaacacagtctattatcatcttgatattcttgttgtatagaactctgtattgggaaaaagttcacacaaatttcttgtcctttctatgcttgaaaatcaaagtcaatggatatgtactttcattacactgcacatggtcagttttgtaaataacaatataaatttgcaaatataaaatagctgtagttttaatcttcaataatttttaaaatatagttttttgaagtattatttggaaagtcagtgtttaggataattttccaattcatatacctcataaattacaactccaatttaggttgactttcttcagcaagctaataaagacctggagaagcgtatacgagagcttatggaaaccaaggaaacagtgacatctgaagtcgttaatttaagtaacaaaaatgaaaaactctgccaagaattaactgaaatagatcagttagcacagcagttggaaagacataaagaagaagtgcttgagactgctgataaagagcttggggaagcaaagaaagagattaaaagaaagctctctgaaatgcaggatcttgaagaaacaatggcaaaacttcagctggaattgaacttatgccagaaagaaaaggagagactgagtgatgaactccttgtaaaatcagacctagaaactgttgttcatcagcttgaacaagaaaagcaaagacttagcaaaaaagttgaaagttttgcagttacagaacgacaacttactctggaggttgagaggatgagactagaacatggaataaaacgtcgagacaggtcaccttctcgtttagatacatttctgaaaggtatagaagaagaacgagattattataagaaagagctagagagactccaacatataatacagcgaagatcttgctctacaagttatagcgcacgtgaaaaaagttcaatatttagaacaccagaaaagggtgattacaattcagaaattcatcagatcacaagagaaagagatgaacttcagcgtatgctagaaagatttgaaaaatatatggaagatatacagtccaatgttaaattattgacagcagaaagagataaactaagtgtcttatataatgaagctcaggaagaattatctgccctaagaaaggaatccacccaaaccacagcaccccataatattgttagtcttatggaaaaggaaaaagaacttgcgttatctgacttaagaagaattatggcagaaaaggaagctttaagagaaaaattagagcatattgaagaagtgagtctttttggaaaatcagaattagagaaaactattgaacatttgacatgtgttaatcatcagcttgaaagcgaaaaatatgaattaaagtctaaagtgttaataatgaaagaaacaatagagtcgttagagaacaaattaaaagtccaagctcaaaaatttagccatgtggctggtgactcatctcatcagaaaacagaggtgaactcacttaggatagtgaatgagcagctacagcggtcagttgatgactatcagcaccgactttccataaaaagaggtgaacttgaatcagcccaagcacaaattaaaatactggaggaaaagatagatgaactaaaccttaagatgacttcacaggatgaggaggctcatgtaatgaaaaagaccattggtgttattgataaagaaaaagactttctccaggagactgtagatgagaagacagaaaagattgcaaatttgcaagaaaacctagctaataaagaaaaagctgttgctcaaatgaagataatgatctcagagtgtgaatcatctgtgaaccagctgaaagaaacattggttaatcgagatcgtgagataaacagcctccggcgccagcttgatgcagctcacaaagaactcgatgaagtaggaagatctagagaaatcgcttttaaggaaaacagaagactgcaagatgacctggctacaatggcaagagaaaatcaagaaatctcattggaattggaagcagcagtgcaagaaaaagaagaaatgaagagcagagttcataaatacataacagaggtgtcacgatgggagagcttaatggctgccaaggaaaaagaaaatcaagatttgttagatagatttcagatgcttcataaccgtgctgaagactgggaggtcaaagcccatcaagctgagggagaaagcagctcagttcgactggaacttctttctattgacactgagaggagacatcttcgagaaagagtggagctattagaaaaagaaattcaagagcacataaatgcccatcatgcttatgaatctcagatctcatcaatggcaaaagccatgtctcgattagaagaagagctgagacatcaagaagatgagaaagcaacagtattaaatgacttgtcatctcttagagaactttgcattaaacttgattcaggcaaagatattatgacccagcaattgaattcgaaaaaccttgagtttgagagggttgtggtggaattagaaaatgtaaagtcagagtcagacctactgaaaaaacaactttcaaatgagagacatacagttaaaaacctcgaatcattgttggctacaaacagagataaagaatttcattctcacttaacctcccacgagaaggatacagaaatccagctacttaaggagaagttaaccctttctgaaagcaaattaactagtcaaagccgggaaaacaccatgcttcgagctaaagtggcacagttacaaacagattatgatgctctgaaaaggcagatctcaactgaaagatacgaacgagaacgagcaatccaagagatgcgtcgacatggtcttgctacaccaccccttagttccactctgaggtctccttcacattctcctgaacatagaaatgtgtaattatcagaaagaataatggctttcaatgagttcctatgtggatttttaaaagaacagaacagtaatgaaatatttgaagtacttgttgctgaaaatcatgaacatggacacaaattctacctctgtcaacttttatttaaatcagtgaatatgttaaaaagtttggtttaaaagaactatatctatatgtatattttcatatatatgacagaacaagaatatgtattaatagtgcctaatgtatctatatttttattattcatgaattaaattactaaaagtatgtttatactgtgaattaatataatgtattcacattattctttaataatctgtttattaataagccatgatatgtgtatgtaaatattcttacagtacttgtttttagttgtcatgcctatgtttagaccatatcttaatgtattcacaaagaattatcaactttgatgctatgctgtcatgcttaactttttcttcttaaaattattcatagatctactgtctgttgtcaaggggaatatattcaggtctagtcttcttataatagcagaggtcttggtaaaataactaccatatataacgtgttattgccatctagaagaactatgatgagaaagatacatttatatattatgtaaaatgttaactatcatcatatggactctatgtaacacaaattcaaaagcaaactaaaagctatatgcagagttttgtataaaacaatagaacagaaatttgggacatttttctaggaaataaaattcctcggtgtattaatctaaggtttcaaagtataaaagtatatggggtaggccgggtgcagtggctcacgcctgtaatcccagcactttgggaggccgaggcgagtggatttcctaaggtcaggagtttgagaccagcctgagcaatgtggtgaaaccccatctctactaaaaatacaaaaattatctgggcttggtggcgggcacctgtaatcccagccacttgggaggctgaggcaggagaattgcttgaacccgggaggtggaggctgcggtgagccaagatcatgccattgcactccagcctgggtgacagagtaacactctgtctcagaaaaaaaaaaaaagaaaaatatatggggtaaatacagtaaaacgttttgttaaattccaatatacattcagtgataccactctttttcttctaagcctgtgtgttataatttaccagttccccaaaatgccatttttaacgccgaactgtgtaatatacatggaaaacagctttttacaattaattttcaaagttgtaattttaaagaatttgggtgtatacctatgttaatgaaacaacagaagtacaaaaaagaatatcagatacaaaaatcaatcgtgaagaaaatctgttcttaatatatttcattatgattgaaaaacataaaaactaacataggaaagtgaatgatcagttacttatgatatattttgtttcctcttgtggtttaataaagtgaagtgtgtgtgtgtgtgtgtgtgtgtatacctgggggtgggcagtgctctttttctaaaactaatatggcttatatatctgaattatgccctttttagtgtgtattaggatgtgggctggtttgcttttctaccacctttgtaattttatgtatcccatctcctttgtgtgaattcatatattatagcaaaatacaagagacatgggactgtttgcaataccatatggaaatcttttaataaatatatgtaaataaaataaaaaatatttgtctccaccttttccccaaaagcaacagcaagacatattttgttagatattttatttttaatgttttctataatttaaaaatgtatagcctgccaaatgttgttttcataaccatgatattgttttgaaaaaattttatcttaaaatactgaatgttctgaccttttatagatgtttttgattttgttttaaataattttaaattatggagcttgacctagatttgccaataaactttctagcctatttattttctctttcttacaaataaggtttttataattttatattagggatactcttaattctaaaattaagtaaagtttattcaaatcaaactttatcatggtgggatatggacaaatccctgaacataggtgccaggcacctttcttaactgacttttatttccatttagttcaaaataataagaaatgaagccaaagtttatttttgttatctgtccacaaaatggttaaacgtgtgtg

SEQ ID NO: 10390 - protein, 846 aa, Homo sapiens; identical to SEQ ID NO: 10388

SEQ ID NO: 10391 - DNA, 318 bp, Homo sapiens
gaaatctgggagtgtagagtactcattaaaactcaaaacatttgatttcagacttggccgaatttactaattttgtcatgtttttcctgaagatcttgtgtccattgtcaaacagttttgtcttctgattagacttcattttttaacctcataggctaatggctgaattttgatttactgttgtcagtgtaagcactatactatgttatctattataagaataaggccaggtggtgtggctcctgtaattcccaaagtgctgggattacagacgtgagccatggtggccgccctagaattagctgttttaaacatgtt

SEQ ID NO: 10392 - protein, 41 aa, Homo sapiens
ALYYVIYYKNKARWCGSCNSQSAGITDVSHGGRPRISCFKH

SEQ ID NO: 10393 - DNA, 416 bp, Homo sapiens
tgtgatctaagagtgatttgcctgtcaccattgctttcaagatatactccagaacttgaaataaaggttccttaaagattatctttcttggctgggtgtggtggctcacacttgtaagcccagtgctttgggaagctgaatgatcctccctccttagcctcccaaatagctgggactgcaggcacgcgccaccatgttggctagtttaaaaaaaaattatagagatgggagtctcactgtgttgcccaggctggtctccatctcttgacctcaagtgatcctcctgccttggcttcccaaagtgctaggattatagccatgagccactgcacccaaccgaatttgcttttattaccttctccaaattgtgaaagtaataggtgttcattgaagaaaaatagaatgtaagaagtttt

SEQ ID NO: 10394 - DNA, 1042 bp, Homo sapiens
aatagaatgtcctaagatatgcagttggcaagctggagacccaagaagagccaatatttcagtttgagtctgaaggcaggaaaagactgatgtcccatctcaaagcagtcaggcagagggagttccctcttgttctcactcaaggaaggatggcgcagtgctcccgctgttccgaggctcagctaccctgagggaggcagggaattttgatcagcttctgaagaatcacctcatctctccccgcagagagcacagagcacaggacttcacgttatgtcaacatctcttgcaaaagcccagctcctagagagcaggagccttcccagactgtgtcaaattacctcggggatggagagacttacatggcattaatagaaatcaaatggcagagctcgggtttctgatgagtctcctgaggttcagaagggtgagatgacacattcaaggtcacatggctcatttgtgttggagtcagaagtttccagatttcttgacttttagtccaaggagcagtccctgtgcatgtgtcagagttgaacaagccagctggactgagtgcccatgacctcagggacatcttggaagctatatgtagaagatggaaaagcctctgtcatctccatcaatttaatctccaaataactacttagaaaagggacagcttactaactccttcattgcccagtactattagctaaaaacattataacaggagattcaaattctacatggtgggagcaaaagtggatcttgtttttctatagcaacatggttgaccttcatagtgaagtttgaatctgacagcattcatgctcaaatgtccaagccctgcatttctgataccatggaatcacaagcacgctgtgtgatactgtgcagcatttgatcctgcctgacttctgtgtctcagcctatcaacgaagatatttatagctgccttatgccaacgtactttttaaagctgggtaataccagtgtaagatggtcacatttatcttgaaagccgaggtagggtaccatgtgtgctccctgaactactgtc

SEQ ID NO: 10395 - protein, 37 aa, Homo sapiens
MAHLCWSQKFPDFLTFSPRSSPCACVRVEQASWTECP

SEQ ID NO: 10396 - DNA, 450 bp, Homo sapiens
gcctttccagcctctgctttgggaaatgcagactgggaaggaaggatcaagcctactcagaaacacaagccgaggtataagacgagctccttgcaataaaaagcaacaacatgatggaagaaagttgagctcagaactcagtgacatccgagctcaaataccaccttctccacttaattacttttgtctccgtagacagattatacaaatttcctgaccttccttatctgagaaattgtgagagtcctgccttgcagggcgggtgtgagaattaaaagcatgggacatacctagcatagcccttgacacatagtgaacattcatttgtcacctccctcttaaaggaaataactatcttttattctctgtatcccttctattatctcccacacaatagtacctcaataaacatttgttaaataaataaataaatagctccacttctcagcc

SEQ ID NO: 10397 - protein, 63 aa, Homo sapiens
MQTGKEGSSLLRNTSRGIRRAPCNKKQQHDGRKLSSELSDIRAQIPPSPLNYFCLRRQIIQIS

SEQ ID NO: 10398 - DNA, 1385 bp, Homo sapiens
ggactactgattgtttggggacatccgaaatcactcaggattgtggtgaccagttgaacagagatatgccaaaagcaggcagtgatttatatccctgcagaaggagtctcgccctgtcaccaggctggagtgcgatggtgcaatctctgctcactgcaacttccacctcccgggttcaaatttctcctgcctcagcctcctaagtggctgggactacaggtgcctgccgccatgcctggctaattttttgtattttagtagagatggggtttaggctggtctcgaactcctgagctcaggcaatctgccctcctgagctcaggcaatctgcctgcctgggcctcccaaagtgctaggattacaggcatgagccaccgccctcagccactatcttattttttagcctatctgaattaaaaacataaagtcttctctatgtatgttgatgataaactttgggtttcaaggaaaagagtcactcaggcaacttccaagaatgggaggggagaaggggttgttataggatacagtggaaataaatctgggaggaatctcaatcatgttccaagagcttgcaggggcccagagaaattctcacaatgaggcctcacaggaaaagcaagaacaccgacagcaggaaagcttggaggctaagagttcccttggaagttgaactactgcctgagaatattaaaacaaaaacagaaacacgtaaatagccagccctgaaacgagcctctcaacttctgataggttatatttacatttatgtactttcctatcacagtttataatcaagctaaggctagtagccttgaatatttttagggctgcaatttgtacatcatctaagctaacagatgaaaagtgcaagtgtagttgcctaagcacaggtacattcgttcaacaacaaatctttacctgaatgtccattgtatgtccgacgctgtcctgtatcctggggtggcagcctggggacctgagaggactttgagtggagctaaagaaacagaaaataacttcaactaataaatgtcttttaatatctcttgcaatggaaattttcagtggcttaatttttttacttgtctacttcgaaggtgaagttactcacaggcaggtttcttagtttacagacttagcttttcttccactcccagcgtattatcatttatcaactattgtcattgaatgtccttacaccaggcatggtagatggcttttcagcttccaggcatcatgttgtgtctttttattcttcaatggtattgctttaaattgtaggcatccttgtaatgggttttcttctttttctgacccataaaaaatttctgataatatttgttgaactctgatcccattaaattaaaattttagttattaaa

SEQ ID NO: 10399 - protein, 45 aa, Homo sapiens
MPKAGSDLYPCRRSLALSPGWSAMVQSLLTATSTSRVQISPASAS

SEQ ID NO: 10400 - DNA, 7538 bp, Homo sapiens
agcgcgctggacgctgctgctgcagactaaatcgcagtctcatctcaaattgtgaatttattggattcacgcactgtcatgggggacctgggatggattgcttttccaaaaaatgggtgggaagagattggtgaagtggatgaaaattatgcccctatccacacataccaagtatgcaaagtgatggaacagaatcagaataactggcttttgaccagttggatctccaatgaaggtgcttccagaatcttcatagaactcaaatttaccctgcgggactgcaacagccttcctggaggactggggacctgtaaggaaacctttaatatgtattactttgagtcagatgatcagaatgggagaaacatcaaggaaaaccaatacatcaaaattgataccattgctgccgatgaaagctttacagaacttgatcttggtgaccgtgttatgaaactgaatacagaggtcagagatgtaggacctctaagcaaaaagggattttatcttgcttttcaagatgttggtgcttgcattgctctggtttctgtgcgtgtatactataaaaaatgcccttctgtggtacgacacttggctgtcttccctgacaccatcactggagctgattcttcccaattgctcgaagtgtcaggctcctgtgtcaaccattctgtgaccgatgaacctcccaaaatgcactgcagcgccgaaggggagtggctggtgcccatcgggaaatgcatgtgcaaggcaggatatgaagagaaaaatggcacctgtcaagtgtgcagacctgggttcttcaaagcctcacctcacatccagagctgcggcaaatgtccacctcacagttatacccatgaggaagcttcaacctcttgtgtctgtgaaaaggattatttcaggagagagtctgatccacccacaatggcatgcacaagacccccctctgctcctcggaatgccatctcaaatgttaatgaaactagtgtctttctggaatggattccgcctgctgacactggtggaaggaaagacgtgtcatattatattgcatgcaagaagtgcaactcccatgcaggtgtgtgtgaggagtgtggcggtcatgtcaggtaccttccccggcaaagcggcctgaaaaacacctctgtcatgatggtggatctactcgctcacacaaactatacctttgagattgaggcagtgaatggagtgtccgacttgagcccaggagcccggcagtatgtgtctgtaaatgtaaccacaaatcaagcagctccatctccagtcaccaatgtgaaaaaagggaaaattgcaaaaaacagcatctctttgtcttggcaagaaccagatcgtcccaatggaatcatcctagagtatgaaatcaagtattttgaaaaggaccaagagaccagctacacgattatcaaatctaaagagacaactattactgcagagggcttgaaaccagcttcagtttatgtcttccaaattcgagcacgtacagcagcaggctatggtgtcttcagtcgaagatttgagtttgaaaccaccccagtgtttgcagcatccagcgatcaaagccagattcctgtaattgctgtgtctgtgacagtgggagtcattttgttggcagtggttatcggcgtcctcctcagtggaagttgctgcgaatgtggctgtgggagggcttcttccctgtgcgctgttgcccatccaagcctaatatggcggtgtggctacagcaaagcaaaacaagatccagaagaggaaaagatgcattttcataatgggcacattaaactgccaggagtaagaacttacattgatccacatacctatgaggatcccaatcaagctgtccacgaatttgctaaggagatagaagcatcatgtatcaccattgagagagttattggagcaggtgaatttggtgaagtttgtagtggacgtttgaaactaccaggaaaaagagaattacctgtggctatcaaaacccttaaagtaggctatactgaaaagcaacgcagagatttcctaggtgaagcaagtatcatgggacagtttgatcatcctaacatcatccatttagaaggtgtggtgaccaaaagtaaaccagtgatgatcgtgacagagtatatggagaatggctctttagatacatttttgaagaaaaacgatgggcagttcactgtgattcagcttgttggcatgctgagaggtatctctgcaggaatgaagtacctttctgacatgggctatgtgcatagagatcttgctgccagaaacatcttaatcaacagtaaccttgtgtgcaaagtgtctgactttggactttcccgggtactggaagatgatcccgaggcagcctacaccacaaggggaggaaaaattccaatcagatggactgccccagaagcaatagctttccgaaagtttacttctgccagtgatgtctggagttatggaatagtaatgtgggaagttgtgtcttatggagagagaccctactgggagatgaccaatcaagatgtgattaaagcggtagaggaaggctatcgtctgccaagccccatggattgtcctgctgctctctatcagttaatgctggattgctggcagaaagagcgaaatagcaggcccaagtttgatgaaatagtcaacatgttggacaagctgatacgtaacccaagtagtctgaagacgctggttaatgcatcctgcagagtatctaatttattggcagaacatagcccactaggatctggggcctacagatcagtaggtgaatggctagaggcaatcaagatgggccggtatacagagattttcatggaaaatggatacagttcaatggacgctgtggctcaggtgaccttggaggatttgagacggcttggagtgactcttgtcggtcaccagaagaagatcatgaacagccttcaagaaatgaaggtgcagctggtaaacggaatggtgccattgtaacttcatgtaaatgtcgcttcttcaagtgaatgattctgcactttgtaaacagcactgagatttattttaacaaaaaaagggggaaaagggaaaacagtgatttctaaaccttagaaaacatttgcctcagccacagaatttgtaatcatggttttactgaagtatccagttcttagtccttagtcttcatttttcatgaagcaaacatatcttgcattaaaagggacatgaagttagacatcatcttaagttacaacaacagaatccttcccactacttctacaaaattttgtacatgaaatatataattatatagcacttttatagactgaattaaggcaacccctttcaaaacttccagggatctacttgaaaggaaatgttttatagccatttgtgagctaacaaaagctacagtttactgaagtttacttcaagtcttaattgtctacaaaagtgtattgaagagcaatatgattagattatttcttaatagatatcttcttttgtaattttaaaatgctgttacacagcgttaagttatagaaactagtgtgtaaacatgttgcttgatcaagaaaaagtacaatacagggtgtatatttattttttgtgttataaagtttacttttagttgctcttctagagattattaggtaataaatgtgtatatactgtataatttgcaatatacccaggaactgatttaagatggaattgtgtgtgtgtttgcttgcacatgtgtgtgttaccattctgcttgcatttctaatagtgtttcaattttagcaacatataggagcaagtgttccagaatgtaatatgaataggagaaatagggaagcagtaaaacaaaatttaacacaagcttgtgtctcttttcctctcatgtgtccaaaagctaatctctttattcactaaaaggaaatgtgtataagactaaatcccctttggctttttaaaaacattttgtgatatcagtgacaatgcagttcttctagccattaatcttgtacccctgtaagaaatttcacctttctgagtcctgaaaagtatcttgtcaagcaaagttgacaccgaagggcacattttcagcaggatgtagaaggatttaactgtgcaggcttctgttaatgttgttaaatccaggcacatagcacgaagcatcacccttaagtgttaatccgttgtaaccattcccattttgactcagttctagaaattttgactctaaggcagcaatggaattatgacaaatatatatatatacacatacacacacacaaatatatatatatgcttatttcccttcagaattttatttcaataattgataagttttatttttaatggatgtttattcatttgttaatttcagtttgtattcagttacatggctttgagtttattttattgaaccaatccaaggtattatgtaattaggcttattaaggaatataacatatcttctatgtatgctctatataccacacatgatgaagacttatatttgtgatacaaattatgcagtgtattagaaattgtccaaaactgagctcctgagataaccaacatttttgtattattacactttataaaaattatggaatgtcatgtgattagtcaaaatcagagcatttaaataaaatacagcctactcatgattatcaatgttaatagtacagtagatcagagaagcctggattaatgaaatttatcagaaatatagccacgttatattaatggtattcttttttccaagcacttgttttatttgaatattagcacatataagaataaacttttgggaaataactacttcctattctgcccaccctttacttaagcagtaaagtacctcttttctaaagaaccaggaaacatcaaaataaccacaacaaaaatctaaacagttttcaaataatacattcagttctcataataataagggctatataccatgggtccacacaaactgtgctgcaaacatataatctattagtttagtaaaatttccagagatgtgaatttaatattttcttgataaaatcataaaaaagcatcaccattattaaagatgcatttgttcatttcaataaacagaaattaatgaaacaaattacttttgtacaaaataaatgatgattatgtggcactttattgaattttatagaaatattccaatctaagtgataaagtaacaactgagaaacttcagaatgaaagccttattgattcaaaaggaaaattaccatatgctttagggctgatgaacttgccacaattgcttagacataacaaagatattttctacattgttttccaactttatatgctgaaagataattaggaggtccgggtggagtgtatctaaatgactagaactttaagttgcaatatagattttctctttttaacaaaggaagaatataaattaatttggatcaaatttatttgccttctttgcaatcttggtgatcattttggaaagtaaattgaaaggaaagttaaatagccacatagttttcttttgcatctcaatttggttgagaatttctaaggaaggttaatatgactttagaatgaataaagagactgtcaaacaacaagtactctccctaaaaaagaggaaagaatgccttcctaaaatatttgtttcctattgtatatgtcaccaattggaaaatgccaatctcatctgcaagtgtgagaaatggaacaaggagaggagccaactctagtaaaatgtagtgaggccataatccaaggcaaagtttaacaaatcttgattgtgtaatttcttattctgttgattcattttgtcacccaccagactaccaaaaataaagcacagacatgacaattttagtatatacaacagatttggcaaataatacataatcttattgtaattgccagtagcaatatcttaaggggcatgagtctttcacagtattggactttgaaaaattggtacagggagtaattttcaacagactgatacttgaagtcactcaattactactttgacctatcataatttgtttctaatcttgtcatttgctcatatatactattaatataaccagttgctcttttcataatgtactatttctatgtaaagatgtaaagattttgattttcctatgttttaaaattgtaatgtgcatgatcttttatttcttgtgtttcaattaccaagtcagtattctaaggttgtaagattactgtaaaaattatattccaatattttatctaaacttaagtgtggccagcattattggtttcagagttgcctaaacaacacagaatatccttaattcagtttgtaaaagagttttgaccagtgtaaaaaagtgaagacacagtttcatgtttcaagtttaaaatggaaagttaatatcatttgagcacttatgtgttttcatgtcttctacttaatctgtatgtgaaagtaaaatatttttaacaccattatttatgccatgtaaagtgggttctcagaagcacaagcacagatatttaccttctgaagacatttttggctataaaagtgcattggatggcaaacactatttgagtcaggtgttagaaatttattagatgtattatattacatagtagaataaggtccctttctcattttgtttttcctaaaaataagaaaaaaaagaagtgtgatagtaaactgtctttgctaatgtcctgccagatgtttaacttcaaattaagcaaaaagtaggtacaatatgatgatgatcctgatgatgatgatgatgatgatgatgaagaataaatggaatcaaaatgctagctttatttgacattaataagtaaaataagtcatcattttttcaactctgtagcacagctgtttacattgaataattttctctattgtgctgttaattatatagtaatgtatcaaaatagaaataggaactttcttttcatttcttattcatttatgaagaaatcttttcacacataaatgattgaatgttcttgttcagaatgaccacataatcattgcttagaagaagataccaattcttttaaaagaaaaaaagtctgtttataataatcagaatcaaatgttgtttgtttcttctaaacgttaatggagaaaattgaaggtggtaaaatgtcatgtttattcaggctgggaactgtattcacagtagaagtttcagtggtcaacatatctatgactctttaggctgctgtagttttacagtcaattatttaaaagtgagtagttacatttataagagcctgagaatacttagactcagtcatttgttagtatttttaccaaaatctcttagtttcagacatgtcagaagcagctatatagcatatcttattctatgatatacatcaggctatctcaagttcctgtctcacagttaattcaaagaaggattaggatttctgtattttttctcatttgaatctttatgtgcatttggtttgtgtacatgctttttgtagtgtaagatatgaaattttatattttttcagaaaataaaaaccctttgaatacagttaca

SEQ ID NO: 10401 - protein, 968 aa, Homo sapiens
MGDLGWIAFPKNGWEEIGEVDENYAPIHTYQVCKVMEQNQNNWLLTSWISNEGASRIFIELKFTLRDCNSLPGGLGTCKETFNMYYFESDDQNGRNIKENQYIKIDTIAADESFTELDLGDRVMKLNTEVRDVGPLSKKGFYLAFQDVGACIALVSVRVYYKKCPSVVRHLAVFPDTITGADSSQLLEVSGSCVNHSVTDEPPKMHCSAEGEWLVPIGKCMCKAGYEEKNGTCQVCRPGFFKASPHIQSCGKCPPHSYTHEEASTSCVCEKDYFRRESDPPTMACTRPPSAPRNAISNVNETSVFLEWIPPADTGGRKDVSYYIACKKCNSHAGVCEECGGHVRYLPRQSGLKNTSVMMVDLLAHTNYTFEIEAVNGVSDLSPGARQYVSVNVTTNQAAPSPVTNVKKGKIAKNSISLSWQEPDRPNGIILEYEIKYFEKDQETSYTIIKSKETTITAEGLKPASVYVFQIRARTAAGYGVFSRRFEFETTPVFAASSDQSQIPVIAVSVTVGVILLAVVIGVLLSGSCCECGCGRASSLCAVAHPSLIWRCGYSKAKQDPEEEKMHFHNGHIKLPGVRTYIDPHTYEDPNQAVHEFAKEIEASCITIERVIGAGEFGEVCSGRLKLPGKRELPVAIKTLKVGYTEKQRRDFLGEASIMGQFDHPNIIHLEGVVTKSKPVMIVTEYMENGSLDTFLKKNDGQFTVIQLVGMLRGISAGMKYLSDMGYVHRDLAARNILINSNLVCKVSDFGLSRVLEDDPEAAYTTRGGKIPIRWTAPEAIAFRKFTSASDVWSYGIVMWEVVSYGERPYWEMTNQDVIKAVEEGYRLPSPMDCPAALYQLMLDCWQKERNSRPKFDEIVNMLDKLIRNPSSLKTLVNASCRVSNLLAEHSPLGSGAYRSVGEWLEAIKMGRYTEIFMENGYSSMDAVAQVTLEDLRRLGVTLVGHQKKIMNSLQEMKVQLVNGMVPL

SEQ ID NO: 10402 - DNA, 3283 bp, Homo sapiens
ggtggactgagccgctcgggacagcggcaccggaggaggctcggagaagatgcggggctcggggccccggggtgcgggacgccggcggcccccaagcggcggcggcgacacccccatcaccccagcgtccctggccggctgctactctgcacctcgacgggctcccctctggacgtgccttctcctgtgcgccgcactccggaccctcctggccagccccagcaacgaagtgaatttattggattcacgcactgtcatgggggacctgggatggattgcttttccaaaaaatgggtgggaagagattggtgaagtggatgaaaattatgcccctatccacacataccaagtatgcaaagtgatggaacagaatcagaataactggcttttgaccagttggatctccaatgaaggtgcttccagaatcttcatagaactcaaatttaccctgcgggactgcaacagccttcctggaggactggggacctgtaaggaaacctttaatatgtattactttgagtcagatgatcagaatgggagaaacatcaaggaaaaccaatacatcaaaattgataccattgctgccgatgaaagctttacagaacttgatcttggtgaccgtgttatgaaactgaatacagaggtcagagatgtaggacctctaagcaaaaagggattttatcttgcttttcaagatgttggtgcttgcattgctctggtttctgtgcgtgtatactataaaaaatgcccttctgtggtacgacacttggctgtcttccctgacaccatcactggagctgattcttcccaattgctcgaagtgtcaggctcctgtgtcaaccattctgtgaccgatgaacctcccaaaatgcactgcagcgccgaaggggagtggctggtgcccatcgggaaatgcatgtgcaaggcaggatatgaagagaaaaatggcacctgtcaagtgtgcagacctgggttcttcaaagcctcacctcacatccagagctgcggcaaatgtccacctcacagttatacccatgaggaagcttcaacctcttgtgtctgtgaaaaggattatttcaggagagagtctgatccacccacaatggcatgcacaagacccccctctgctcctcggaatgccatctcaaatgttaatgaaactagtgtctttctggaatggattccgcctgctgacactggtggaaggaaagacgtgtcatattatattgcatgcaagaagtgcaactcccatgcaggtgtgtgtgaggagtgtggcggtcatgtcaggtaccttccccggcaaagcggcctgaaaaacacctctgtcatgatggtggatctactcgctcacacaaactatacctttgagattgaggcagtgaatggagtgtccgacttgagcccaggagcccggcagtatgtgtctgtaaatgtaaccacaaatcaagcagctccatctccagtcaccaatgtgaaaaaagggaaaattgcaaaaaacagcatctctttgtcttggcaagaaccagatcgtcccaatggaatcatcctagagtatgaaatcaagtattttgaaaaggaccaagagaccagctacacgattatcaaatctaaagagacaactattactgcagagggcttgaaaccagcttcagtttatgtcttccaaattcgagcacgtacagcagcaggctatggtgtcttcagtcgaagatttgagtttgaaaccaccccagtgtttgcagcatccagcgatcaaagccagattcctgtaattgctgtgtctgtgacagtgggagtcattttgttggcagtggttatcggcgtcctcctcagtggaaggcggtgtggctacagcaaagcaaaacaagatccagaagaggaaaagatgcattttcataatgggcacattaaactgccaggagtaagaacttacattgatccacatacctatgaggatcccaatcaagctgtccacgaatttgctaaggagatagaagcatcatgtatcaccattgagagagttattggagcaggtgaatttggtgaagtttgtagtggacgtttgaaactaccaggaaaaagagaattacctgtggctatcaaaacccttaaagtaggctatactgaaaagcaacgcagagatttcctaggtgaagcaagtatcatgggacagtttgatcatcctaacatcatccatttagaaggtgtggtgaccaaaagtaaaccagtgatgatcgtgacagagtatatggagaatggctctttagatacatttttgaagaaaaacgatgggcagttcactgtgattcagcttgttggcatgctgagaggtatctctgcaggaatgaagtacctttctgacatgggctatgtgcatagagatcttgctgccagaaacatcttaatcaacagtaaccttgtgtgcaaagtgtctgactttggactttcccgggtactggaagatgatcccgaggcagcctacaccacaaggggaggaaaaattccaatcagatggactgccccagaagcaatagctttccgaaagtttacttctgccagtgatgtctggagttatggaatagtaatgtgggaagttgtgtcttatggagagagaccctactgggagatgaccaatcaagatgtgattaaagcggtagaggaaggctatcgtctgccaagccccatggattgtcctgctgctctctatcagttaatgctggattgctggcagaaagagcgaaatagcaggcccaagtttgatgaaatagtcaacatgttggacaagctgatacgtaacccaagtagtctgaagacgctggttaatgcatcctgcagagtatctaatttattggcagaacatagcccactaggatctggggcctacagatcagtaggtgaatggctagaggcaatcaagatgggccggtatacagagattttcatggaaaatggatacagttcaatggacgctgtggctcaggtgaccttggaggatttgagacggcttggagtgactcttgtcggtcaccagaagaagatcatgaacagccttcaagaaatgaaggtgcagctggtaaacggaatggtgccattgtaacttcatgtaaatgtcgcttcttcaagtgaatgattctgcactttgtaaacagcactgagatttattttaacaaaaaaagggggaaaagggaaaacagtgatttctaaaccttagaaaacatttgcctcagccacagaatttgtaatcatggttttactgaagtatccagttcttagtccttagtct

SEQ ID NO: 10403 - protein, 1015 aa, Homo sapiens
MRGSGPRGAGRRRPPSGGGDTPITPASLAGCYSAPRRAPLWTCLLLCAALRTLLASPSNEVNLLDSRTVMGDLGWIAFPKNGWEEIGEVDENYAPIHTYQVCKVMEQNQNNWLLTSWISNEGASRIFIELKFTLRDCNSLPGGLGTCKETFNMYYFESDDQNGRNIKENQYIKIDTIAADESFTELDLGDRVMKLNTEVRDVGPLSKKGFYLAFQDVGACIALVSVRVYYKKCPSVVRHLAVFPDTITGADSSQLLEVSGSCVNHSVTDEPPKMHCSAEGEWLVPIGKCMCKAGYEEKNGTCQVCRPGFFKASPHIQSCGKCPPHSYTHEEASTSCVCEKDYFRRESDPPTMACTRPPSAPRNAISNVNETSVFLEWIPPADTGGRKDVSYYIACKKCNSHAGVCEECGGHVRYLPRQSGLKNTSVMMVDLLAHTNYTFEIEAVNGVSDLSPGARQYVSVNVTTNQAAPSPVTNVKKGKIAKNSISLSWQEPDRPNGIILEYEIKYFEKDQETSYTIIKSKETTITAEGLKPASVYVFQIRARTAAGYGVFSRRFEFETTPVFAASSDQSQIPVIAVSVTVGVILLAVVIGVLLSGRRCGYSKAKQDPEEEKMHFHNGHIKLPGVRTYIDPHTYEDPNQAVHEFAKEIEASCITIERVIGAGEFGEVCSGRLKLPGKRELPVAIKTLKVGYTEKQRRDFLGEASIMGQFDHPNIIHLEGVVTKSKPVMIVTEYMENGSLDTFLKKNDGQFTVIQLVGMLRGISAGMKYLSDMGYVHRDLAARNILINSNLVCKVSDFGLSRVLEDDPEAAYTTRGGKIPIRWTAPEAIAFRKFTSASDVWSYGIVMWEVVSYGERPYWEMTNQDVIKAVEEGYRLPSPMDCPAALYQLMLDCWQKERNSRPKFDEIVNMLDKLIRNPSSLKTLVNASCRVSNLLAEHSPLGSGAYRSVGEWLEAIKMGRYTEIFMENGYSSMDAVAQVTLEDLRRLGVTLVGHQKKIMNSLQEMKVQLVNGMVPL

SEQ ID NO: 10404 - DNA, 3902 bp, Homo sapiens
gtccctcccctcttcagcactcagcccgcagctatttccttctgccagtctctttgaactctggatctttgcttttgctcgctgctctcctgtttttcattctccacattttctcaagtcctctttctttatccttagccaccctgcttttttcctccttttttaaaaaatcggagatttcgtcttaaaatgatttgccttccttaccttcgtccatttcaacactgaaggctgcaaagaaccttcacctttcccctagtggtatttaaaaattctcaatccgtaaaaagtctttttgaaaggcaaaggaacaggacccaggaccctctcgacacccttgatccgagtccagatctgcactagcaaccagaactaatatttcatttaaccccaccaaagggggaggcgagaggagccagaagcaaacttcagctgtctcagccggatccgtggttcctacatttggaggagccgcgtgccagaaggcgtaggaccccaaggggggacaaggaggactcccgagtctcccttcgccgctctgcgaggccgaagcggtggactgagccgctcgggacagcggcaccggaggaggctcggagaagatgcggggctcggggccccggggtgcgggacgccggcggcccccaagcggcggcggcgacacccccatcaccccagcgtccctggccggctgctactctgcacctcgacgggctcccctctggacgtgccttctcctgtgcgccgcactccggaccctcctggccagccccagcaacgaagtgaatttattggattcacgcactgtcatgggggacctgggatggattgcttttccaaaaaatgggtgggaagagattggtgaagtggatgaaaattatgcccctatccacacataccaagtatgcaaagtgatggaacagaatcagaataactggcttttgaccagttggatctccaatgaaggtgcttccagaatcttcatagaactcaaatttaccctgcgggactgcaacagccttcctggaggactggggacctgtaaggaaacctttaatatgtattactttgagtcagatgatcagaatgggagaaacatcaaggaaaaccaatacatcaaaattgataccattgctgccgatgaaagctttacagaacttgatcttggtgaccgtgttatgaaactgaatacagaggtcagagatgtaggacctctaagcaaaaagggattttatcttgcttttcaagatgttggtgcttgcattgctctggtttctgtgcgtgtatactataaaaaatgcccttctgtggtacgacacttggctgtcttccctgacaccatcactggagctgattcttcccaattgctcgaagtgtcaggctcctgtgtcaaccattctgtgaccgatgaacctcccaaaatgcactgcagcgccgaaggggagtggctggtgcccatcgggaaatgcatgtgcaaggcaggatatgaagagaaaaatggcacctgtcaagtgtgcagacctgggttcttcaaagcctcacctcacatccagagctgcggcaaatgtccacctcacagttatacccatgaggaagcttcaacctcttgtgtctgtgaaaaggattatttcaggagagagtctgatccacccacaatggcatgcacaagacccccctctgctcctcggaatgccatctcaaatgttaatgaaactagtgtctttctggaatggattccgcctgctgacactggtggaaggaaagacgtgtcatattatattgcatgcaagaagtgcaactcccatgcaggtgtgtgtgaggagtgtggcggtcatgtcaggtaccttccccggcaaagcggcctgaaaaacacctctgtcatgatggtggatctactcgctcacacaaactatacctttgagattgaggcagtgaatggagtgtccgacttgagcccaggagcccggcagtatgtgtctgtaaatgtaaccacaaatcaagcagctccatctccagtcaccaatgtgaaaaaagggaaaattgcaaaaaacagcatctctttgtcttggcaagaaccagatcgtcccaatggaatcatcctagagtatgaaatcaagtattttgaaaaggaccaagagaccagctacacgattatcaaatctaaagagacaactattactgcagagggcttgaaaccagcttcagtttatgtcttccaaattcgagcacgtacagcagcaggctatggtgtcttcagtcgaagatttgagtttgaaaccaccccagtgtttgcagcatccagcgatcaaagccagattcctgtaattgctgtgtctgtgacagtgggagtcattttgttggcagtggttatcggcgtcctcctcagtggaagttgctgcgaatgtggctgtgggagggcttcttccctgtgcgctgttgcccatccaagcctaatatggcggtgtggctacagcaaagcaaaacaagatccagaagaggaaaagatgcattttcataatgggcacattaaactgccaggagtaagaacttacattgatccacatacctatgaggatcccaatcaagctgtccacgaatttgctaaggagatagaagcatcatgtatcaccattgagagagttattggagcaggtgaatttggtgaagtttgtagtggacgtttgaaactaccaggaaaaagagaattacctgtggctatcaaaacccttaaagtaggctatactgaaaagcaacgcagagatttcctaggtgaagcaagtatcatgggacagtttgatcatcctaacatcatccatttagaaggtgtggtgaccaaaagtaaaccagtgatgatcgtgacagagtatatggagaatggctctttagatacatttttgaagaaaaacgatgggcagttcactgtgattcagcttgttggcatgctgagaggtatctctgcaggaatgaagtacctttctgacatgggctatgtgcatagagatcttgctgccagaaacatcttaatcaacagtaaccttgtgtgcaaagtgtctgactttggactttcccgggtactggaagatgatcccgaggcagcctacaccacaaggggaggaaaaattccaatcagatggactgccccagaagcaatagctttccgaaagtttacttctgccagtgatgtctggagttatggaatagtaatgtgggaagttgtgtcttatggagagagaccctactgggagatgaccaatcaagatgtgattaaagcggtagaggaaggctatcgtctgccaagccccatggattgtcctgctgctctctatcagttaatgctggattgctggcagaaagagcgaaatagcaggcccaagtttgatgaaatagtcaacatgttggacaagctgatacgtaacccaagtagtctgaagacgctggttaatgcatcctgcagagtatctaatttattggcagaacatagcccactaggatctggggcctacagatcagtaggtgaatggctagaggcaatcaagatgggccggtatacagagattttcatggaaaatggatacagttcaatggacgctgtggctcaggtgaccttggaggatttgagacggcttggagtgactcttgtcggtcaccagaagaagatcatgaacagccttcaagaaatgaaggtgcagctggtaaacggaatggtgccattgtaacttcatgtaaatgtcgcttcttcaagtgaatgattctgcactttgtaaacagcactgagatttattttaacaaaaaaagggggaaaagggaaaacagtgatttctaaaccttagaaaacatttgcctcagccacagaatttgtaatcatggttttactgaagtatccagttcttagtccttagtct

SEQ ID NO: 10405 - protein, 1037 aa, Homo sapiens
MRGSGPRGAGRRRPPSGGGDTPITPASLAGCYSAPRRAPLWTCLLLCAALRTLLASPSNEVNLLDSRTVMGDLGWIAFPKNGWEEIGEVDENYAPIHTYQVCKVMEQNQNNWLLTSWISNEGASRIFIELKFTLRDCNSLPGGLGTCKETFNMYYFESDDQNGRNIKENQYIKIDTIAADESFTELDLGDRVMKLNTEVRDVGPLSKKGFYLAFQDVGACIALVSVRVYYKKCPSVVRHLAVFPDTITGADSSQLLEVSGSCVNHSVTDEPPKMHCSAEGEWLVPIGKCMCKAGYEEKNGTCQVCRPGFFKASPHIQSCGKCPPHSYTHEEASTSCVCEKDYFRRESDPPTMACTRPPSAPRNAISNVNETSVFLEWIPPADTGGRKDVSYYIACKKCNSHAGVCEECGGHVRYLPRQSGLKNTSVMMVDLLAHTNYTFEIEAVNGVSDLSPGARQYVSVNVTTNQAAPSPVTNVKKGKIAKNSISLSWQEPDRPNGIILEYEIKYFEKDQETSYTIIKSKETTITAEGLKPASVYVFQIRARTAAGYGVFSRRFEFETTPVFAASSDQSQIPVIAVSVTVGVILLAVVIGVLLSGSCCECGCGRASSLCAVAHPSLIWRCGYSKAKQDPEEEKMHFHNGHIKLPGVRTYIDPHTYEDPNQAVHEFAKEIEASCITIERVIGAGEFGEVCSGRLKLPGKRELPVAIKTLKVGYTEKQRRDFLGEASIMGQFDHPNIIHLEGVVTKSKPVMIVTEYMENGSLDTFLKKNDGQFTVIQLVGMLRGISAGMKYLSDMGYVHRDLAARNILINSNLVCKVSDFGLSRVLEDDPEAAYTTRGGKIPIRWTAPEAIAFRKFTSASDVWSYGIVMWEVVSYGERPYWEMTNQDVIKAVEEGYRLPSPMDCPAALYQLMLDCWQKERNSRPKFDEIVNMLDKLIRNPSSLKTLVNASCRVSNLLAEHSPLGSGAYRSVGEWLEAIKMGRYTEIFMENGYSSMDAVAQVTLEDLRRLGVTLVGHQKKIMNSLQEMKVQLVNGMVPL

SEQ ID NO: 10406 - DNA, 752 bp, Homo sapiens
ggccattatgtgaaacaacctgcagataaacatttttatttttgtaaaagaaagtttgtccgtagttctggtttatctttcagtggaaatggacagccagtgcaaataaatagcttgtgcttgctgttgaacagagtccacatgctacaaatagtctcctggtaaatcacactagatggagacatgagagaaaatgctgaatcacaagacacagaagaatgaagcagcaaagtgaaagaaaaataaaataacattccctaaaggaaggaagatgtatttgtcagaaggacctgacttgaattcgtcattgctcagctggtcatttagtttccttgtctttaaacaaacaaaaaatctgcagtgcactatgtgaaacaaagaagtaaaatacaagggaggtctagggtacggagatatatctaattgccaaataacttaaataagtatttctacaagcatcaaaacttttgtcacttgttaatatttaaatattagaaaatttaaatataaatcagcaaaaatagttctgggagcaccaattcagcaaaaatgtttagggtaatcaaaaattgattatgttaaatgttatggatgcacatttaatatacaatgcccccacacttcattcccttcctattccaagcaatatccctgaatgtagaactaatacttttaatttattccaaaagtcatcgtgccttgccccttggcctattaatgcatcatctagaagtcaccccgtatgggaaagc

SEQ ID NO: 10407 - protein, 58 aa, Homo sapiens
MLNVMDAHLIYNAPTLHSLPIPSNIPECRTNTFNLFQKSSCLAPWPINASSRSHPVWE

SEQ ID NO: 10408 - DNA, 1176 bp, Homo sapiens
atgaaatattagttctggttgctagtgcagatctggactcggatcaagggtgtcgagagggtcctgggtcctgttcctttgcctttcaaaaagactttttacggattgagaatttttaaataccactaggggaaaggtgaaggttctttgcagccttcagtgttgaaatggacgaaggtaaggaaggcaaatcattttaagacgaaatctccgattttttaaaaaaggaggaaaaaagcagggtggctaaggataaagaaagaggacttgagaaaatgtggagaatgaaaaacaggagagcagcgagcaaaagcaaagatccagagttcaaagagactggcagaaggaaatagctgcgggctgagtgctgaagaggggagggactgacggctgccggccggtaggagcgcggagctgcgctgcggcggcccaggagctgctgcggttcccgctgctcggggagcaggcggtgtgtgcgcggctgcgaagtcgaggttgaaactgcaccgccaaggcgcgctcctgctgtgtctggagctccggcgtctcctctgcctcccagctcagcgcctcccaccctccttccctcctcctcttcccagctcccccgccctctgctgctcgcagcctcgccagtgagaatctactgtaagtgtgagttgcttcgacgaagtcacacacccacggagggaagtaatctggaggctgccttgaagtctgaaagcaggttctttttattataatgtgctccgaatggatgaagcaaatttagaggaagagcagtgaatcagtttctcagtttggcaaaaagcctcacgggcatgtacaggaagccttcctgcagacatccacagtgaacaagtctaaggacaatagctttcgttggcccccaatagaaggcatttttagtgatgtgtggcctcaccacttaaatccagtttattgaatctgaagtgatttgctcctctttctggactacacaataaacaccctccaacgtccccagccatgctcttcccatcatttggctgaaaggggaggaattcaaggccttagagtggggaagctacaatttggaagaatcctggaagcacagattaccctgtgaagcagcatccccatgagggtctctttcttctgtgatataagcaagaaataaatgaattgtgcaaatcc

SEQ ID NO: 10409 - protein, 112 aa, Homo sapiens
ERGAALRRPRSCCGSRCSGSRRCVRGCEVEVETAPPRRAPAVSGAPASPLPPSSAPPTLLPSSSSQLPRPLLLAASPVRIYCKCELLRRSHTPTEGSNLEAALKSESRFFLL

SEQ ID NO: 10410 - DNA, 990 bp, Homo sapiens
atgaaatattagttctggttgctagtgcagatctggactcggatcaagggtgtcgagagggtcctgggtcctgttcctttgcctttcaaaaagactttttacggattgagaatttttaaataccactaggggaaaggtgaaggttctttgcagccttcagtgttgaaatggacgaaggtaaggaaggcaaatcattttaagacgaaatctccgattttttaaaaaaggaggaaaaaagcagggtggctaaggataaagaaagaggacttgagaaaatgtggagaatgaaaaacaggagagcagcgagcaaaagcaaagatccagagttcaaagagactggcagaaggaaatagctgcgggctgagtgctgaagaggggagggactgacggctgccggccggtaggagcgcggagctgcgctgcggcggcccaggagctgctgcggttcccgctgctcggggagcaggcggtgtgtgcgcggctgcgaagtcgaggttgaaactgcaccgccaaggcgcgctcctgctgtgtctggagctccggcgtctcctctgcctcccagctcagcgcctcccaccctccttccctcctcctcttcccagctcccccgccctctgctgctcgcagcctcgccagtgagaatctactgtaagtgtgagttgcttcgacgaagtcacacacccacggagggaagtaatctggaggctgccttggcatttttagtgatgtgtggcctcaccacttaaatccagtttattgaatctgaagtgatttgctcctctttctggactacacaataaacaccctccaacgtccccagccatgctcttcccatcatttggctgaaaggggaggaattcaaggccttagagtggggaagctacaatttggaagaatcctggaagcacagattaccctgtgaagcagcatccccatgagggtctctttcttctgtgatataagcaagaaataaatgaattgtgcaaatcc

SEQ ID NO: 10411 - protein, 83 aa, Homo sapiens
RLPAGRSAELRCGGPGAAAVPAARGAGGVCAAAKSRLKLHRQGALLLCLELRRLLCLPAQRLPPSFPPPLPSSPALCCSQPRQ

SEQ ID NO: 10412 - DNA, 818 bp, Homo sapiens
gccaacatcacaatgaggaaacaatcacacatattcaaaatgttggacattctccaagataaccagggtggaataatcaatgtcatttgaaaaaatgagcagactatttcatatcagaaaaagactatgaaagaataaaggaatatcatagctgtggtgctgagaacataacctactcccattggtttccaacaactgagaccttgaacagtgacttcttagctgtaaatcccagaatcttctgtttcaaatcaattcttcaggaaaaagaggacaaaatataaacccaagtggagagagtactaaaagacacaagatttttttttagagaatttatcaatctaatatgagcaattaattatttatgatggttcctatgtttcacagagaagttgaagaaataagattagaaccatcttatgggctctgggtaaggctctgcaatctttcaccatttttgctttatttattataccaagtagcatgacagatgtttgcaatttgacttgaacattttcattgtctttgctttttttgtttctttctttttaaaaatccatggttttttaatttccttttcaatatttgcatccttttatggaatataagagaccacttatatgcacaagagttatctcttgtgggtctcactattattatcatcaaaatgcctgaaattacctgtgagggaacattataaagtaaatgataaagaaataatttaatgttacacattaggtaacctctaggaatatatgctggaaccataggaagacattgggcaggaagaacaataaaaatatttggattggaagtaa

SEQ ID NO: 10413 - protein, 40 aa, Homo sapiens
MMVPMFHREVEEIRLEPSYGLWVRLCNLSPFLLYLLYQVA

SEQ ID NO: 10414 - DNA, 756 bp, Homo sapiens
gggacatggatgaagctgaaaaccatcattctcagcaaactaacacaggaacagaaaccaaacaccacatgttctcactcataagtagaagctgaacaatgagaacacatggacacaagctctccaaaaccatgagggagaagaagtcagagaataatgaagttcttccttacgtgatgtgcttcttattcccaagctatctttgtactctggacctggctgatgttgaaagcagagcattcacatgagcattttctgggttctttagaggctcccctgctggaatccctcaattgtaagtttccagaagttgctgctggttttcagcagttcactacatgcagaatctctccattgaactttaaaaaaatgacccccagactgaaaattgctttgaatagttgcattctgacaccttgtattggaacttcatatcagctgtgttatgtgtccatggtggaaaattccaattaaacattaaattatatataagaaagaaaatgaagttgatttctagttccaaatgacctacacagaaataacagttgtatataggtttgcacatactttacaaacatttttaggtatgtagaaacaatgtatacacacacatgcacacacacattagtgcaaatgctagtgtatgcatatccatatgtattgtatgtgtgtatatagatatacatatgtgcaaatatataatgtatatgcatatatgcagtggatgtatgtgcacatacatcttctatgtgtgtg

SEQ ID NO: 10415 - protein, 49 aa, Homo sapiens
MRTHGHKLSKTMREKKSENNEVLPYVMCFLFPSYLCTLDLADVESRAFT

SEQ ID NO: 10416 - DNA, 914 bp, Homo sapiens
ctgccctcctgcttccgttgctagggacgcttcggccgaggataccgcaatggatcaggaagaggggctgaaggccttggacaatattgtcactcaattcaacgcctatgaagatttcctggactcgcagatcactactgtggacttgtactacctggaggatgaaaccctggcccgccagttggtggagctaggctaccgagggactggagagagagtgaaaagggaagattttgaagcaaggaaagcggctatagagattgcaagactggctgaaagagctcagcaaaagacgctaacaagtgctggtaaagacctacaagataattttctgacggccctggcaatgagagaagaagacaatcgcagtggaaaactgagttccgtgatctttattcgtgacagaaattctcatgggcaagagatatcaggatacatcgactatgcccacaggctaaagacggaagattttgaagtctactttactggaaaaaaaagacttcttccaaggcctacagatataagcttttacaactgggacgctgatattgctgttagtaattcaagtcccaactatcaagtgattgccgataatccagaaggcttacttttcagatacaaaagagacagaaaaattcttaatgtggacccaaaggcgcagccaggtgacaactctactagaatcactatcctgacagaactctacgtacaagctgtcatttttgaccacatttccagaaggaagacttaagtaccaacatgttaatttcctaataatttgctaaatttaaataaattccgtagacagagcaaattagaataataaatgagccctgtagctggaaggcaaattagaacaataaagttaataaagaagttagaaagaaaactgtaatattgactgtctttttatt

SEQ ID NO: 10417 - protein, 233 aa, Homo sapiens
MDQEEGLKALDNIVTQFNAYEDFLDSQITTVDLYYLEDETLARQLVELGYRGTGERVKREDFEARKAAIEIARLAERAQQKTLTSAGKDLQDNFLTALAMREEDNRSGKLSSVIFIRDRNSHGQEISGYIDYAHRLKTEDFEVYFTGKKRLLPRPTDISFYNWDADIAVSNSSPNYQVIADNPEGLLFRYKRDRKILNVDPKAQPGDNSTRITILTELYVQAVIFDHISRRKT

SEQ ID NO: 10418 - DNA, 916 bp, Homo sapiens
atggatcaggaagaggggctgaaggccttggacaatattgtcactcaattcaacgcctatgaagatttcctggactcgcagatcactactgtggacttgtactacctggaggatgaaaccctggcccgccagttggtggagctaggctaccgagggactggagagagagtgaaaagggaagattttgaagcaaggaaagcggctatagagattgcaagactggctgaaagagctcagcaaaagacgctaacaagtgctggtaaagacctacaagataattttctgacggccctggcaatgagagaagaagacaatcgcagtggaaaactgagtctaaatcaacaggagactgatgctgctcatatcttgaagaagcaactggcatccgtgatctttattcgtgacagaaattctcatgggcaagagatatcaggatacatcgactatgcccacaggctaaagacggaagattttgaagtctactttactggaaaaaaaagacttcttccaaggcctacagatataagcttttacaactgggacgctgatattgctgttagtaattcaagtcccaactatcaagtgattgccgataatccagaaggcttacttttcagatacaaaagagacagaaaaattcttaatgtggacccaaaggcgcagccaggtgacaactctactagaatcactatcctgacagaactctacgtacaagctgtcatttttgaccacatttccagaaggaagacttaagtaccaacatgttaatttcctaataatttgctaaatttaaataaattccgtagacagagcaaattagaataataaatgagccctgtagctggaaggcaaattagaacaataaagttaataaagaagttagaaagaaaactgtaatattgactgtctttttatt

SEQ ID NO: 10419 - protein, 250 aa, Homo sapiens
MDQEEGLKALDNIVTQFNAYEDFLDSQITTVDLYYLEDETLARQLVELGYRGTGERVKREDFEARKAAIEIARLAERAQQKTLTSAGKDLQDNFLTALAMREEDNRSGKLSLNQQETDAAHILKKQLASVIFIRDRNSHGQEISGYIDYAHRLKTEDFEVYFTGKKRLLPRPTDISFYNWDADIAVSNSSPNYQVIADNPEGLLFRYKRDRKILNVDPKAQPGDNSTRITILTELYVQAVIFDHISRRKT

SEQ ID NO: 10420 - DNA, 532 bp, Homo sapiens
tccgtgatctttattcgtgacagaaattctcatgggcaagagatatcaggatacatcgactatgcccacaggctaaagacggaagattttgaagtctactttactggaaaaaaaagacttcttccaaggcctacagatataagcttttacaactgggacgctgatattgctgttagtaattcaagtcccaactatcaagtgattgccgataatccagaaggcttacttttcagatacaaaagagacagaaaaattcttaatgtggacccaaaggcgcagccaggtgacaactctactagaatcactatcctgacagaactctacgtacaagctgtcatttttgaccacatttccagaaggaagacttaagtaccaacatgttaatttcctaataatttgctaaatttaaataaattccgtagacagagcaaattagaataataaatgagccctgtagctggaaggcaaattagaacaataaagttaataaagaagttagaaagaaaactgtaatattgactgtctttttatt

SEQ ID NO: 10421 - protein, 122 aa, Homo sapiens
SVIFIRDRNSHGQEISGYIDYAHRLKTEDFEVYFTGKKRLLPRPTDISFYNWDADIAVSNSSPNYQVIADNPEGLLFRYKRDRKILNVDPKAQPGDNSTRITILTELYVQAVIFDHISRRKT

SEQ ID NO: 10422 - DNA, 3746 bp, Homo sapiens
agatcttgaaaacacccgggccacacacgccgcgacctacagctctttctcagcgttggagtggagacggcgcccgcagcgccctgcgcgggtgaggtccgcgcagctgctggggaagagcccacctgtcaggctgcgctgggtcagcgcagcaagtggggctggccgctatctcgctgcacccggccgcgtcccgggctccgtgcgccctcgccccagctggtttggagttcaaccctcggctccgccgccggctccttgcgccttcggagtgtcccgcagcgacgccgggagccgacgcgccgcgcgggtacctagccatggctggggcgagcaggctgctctttctgtggctgggctgcttctgcgtgagcctggcgcagggagagagaccgaagccacctttcccggagctccgcaaagctgtgccaggtgaccgcacggcaggtggtggcccggactccgagctgcagccgcaagacaaggtctctgaacacatgctgcggctctatgacaggtacagcacggtccaggcggcccggacaccgggctccctggagggaggctcgcagccctggcgccctcggctcctgcgcgaaggcaacacggttcgcagctttcgggcggcagcagcagaaactcttgaaagaaaaggactgtatatcttcaatctgacatcgctaaccaagtctgaaaacattttgtctgccacactgtatttctgtattggagagctaggaaacatcagcctgagttgtccagtgtctggaggatgctcccatcatgctcagaggaaacacattcagattgatctttctgcatggaccctcaaattcagcagaaaccaaagtcaactccttggccatctgtcagtggatatggccaaatctcatcgagatattatgtcctggctgtctaaagatatcactcaactcttgaggaaggccaaagaaaatgaagagttcctcataggatttaacattacgtccaagggacgccagctgccaaagaggaggttaccttttccagagccttatatcttggtatatgccaatgatgccgccatttctgagccagaaagtgtggtatcaagcttacagggacaccggaattttcccactggaactgttcccaaatgggatagccacatcagagctgccctttccattgagcggaggaagaagcgctctactggggtcttgctgcctctgcagaacaacgagcttcctggggcagaataccagtataaaaaggatgaggtgtgggaggagagaaagccttacaagacccttcaggctcaggcccctgaaaagagtaagaataaaaagaaacagagaaaggggcctcatcggaagagccagacgctccaatttgatgagcagaccctgaaaaaggcaaggagaaagcagtggattgaacctcggaattgcgccaggagatacctcaaggtagactttgcagatattggctggagtgaatggattatctcccccaagtcctttgatgcctattattgctctggagcatgccagttccccatgccaaagtctttgaagccatcaaatcatgctaccatccagagtatagtgagagctgtgggggtcgttcctgggattcctgagccttgctgtgtaccagaaaagatgtcctcactcagtattttattctttgatgaaaataagaatgtagtgcttaaagtataccctaacatgacagtagagtcttgcgcttgcagataacctggcaaagaactcatttgaatgcttaattcaatcattagtttatttttatggacttcttcctgttttttttttttttttttttgcactgccaatgcattttgtttcaaaagattatttctatagtcagaggggaatgagcaaatagactgaagattgccaccaaggaaaagaactgtatttgtttctgaatgtaacttaaagcaagatttttagtaaatatggacatctatttctctttttgtaatcaaacacaacaacttatcaaactgtttttagaactgttagagaacacactggtttatttttgtaatgttctttgaaaacagaatggagaagcagcaatagcttgtcatttatctcatttaatgactaatgggaaatagagaacaatttcgcgttttgaattaggcttattgccttagaatcctgagaaagtgctaaataatcaactctgatgtttttcttaagttcttgagactcttgtttatccttgtttttcctccacaagtcattgtctaagtgtaatggaaagtttatgctgagcgttagtgtgtatgtatgtgcgtacatgcgccaggtgcctgtgccctctgtaggatggtttgcttaatatggttttataattcagtttacacaggattctttattttttttaattttgtattttggcaaacaccattcagttataagaactttgccaaatatgatagaataattcaagagcatatacagagagttaccacttgacccagctatttaattgcaaatacagttgttttcatttcatttcctaccagaaaaaggaatcagaaacctagtttttgaaaacacaagtgtaattcctcttttgtacttctttttcacaaatgcttttatttattctaaattgaatttaaaaatccttcctaaagccattaactctttaattctcctgatatgcctttacttcctatgaagttattggtagatgttgaggcccaaaaactggtagaatattgaagatcttcttaaatgaccaatttaaccataaccaaatattgaatatcattcttcagtcacatctaagtcaggcactttttcacatagatcagggcttttggctcagtcacgaaatctacaagttagcaaagcttacaaaacattattcgtcaggtatgggaatcaaatatagacacttgtttgtctttgctttccatttctatgtgtcacatacatatatgtgtcctcttataactttagtcttcaaaattatttcaatatccttcttctcactatatttatttgtgtgatggaaatgctttcaggccgtagatcattgttggtgttaatctgtggttaatcctcattttagttccgtcttatctgatacttagaaatatctcagccattttggaggctgtgcagtatcagaagacgtggagtttgttctgtctctgcctgtagctaattatggtggttcagtcatttaataaatatgttttgagcatctattttgtgaaaggcactgtgttacctgtgtgtctttagtgtcctcactggtaaaatgaagaggctggccatgagctggaagggttaagtttataattccagctatttcacacccgtcttccttgaaggaatgatagtgatagatataaaaacactgtaagtccctcttttaataaactaaatgaaagaacatcctatacttcgctgtttgtaaattagtatggcattcgctttggtttaagtggtattttattgcaaacccattaaaagaataactcatgaaaagaagctctttgacaccttggggtacacaaatgttggtgtgggtgtgtgttaattctgtgagtgagacacaccagttctaaaaaaaatgagtgaagttctggtgcctgagttaccatgctttcttctagttcttacagtagcataaaattaaagattcaaagtgagatggaggataaaattactttttaatacatgttctcaaacatttgaaaataaaagtatatgatagaa

SEQ ID NO: 10423 - protein, 472 aa, Homo sapiens
MAGASRLLFLWLGCFCVSLAQGERPKPPFPELRKAVPGDRTAGGGPDSELQPQDKVSEHMLRLYDRYSTVQAARTPGSLEGGSQPWRPRLLREGNTVRSFRAAAAETLERKGLYIFNLTSLTKSENILSATLYFCIGELGNISLSCPVSGGCSHHAQRKHIQIDLSAWTLKFSRNQSQLLGHLSVDMAKSHRDIMSWLSKDITQLLRKAKENEEFLIGFNITSKGRQLPKRRLPFPEPYILVYANDAAISEPESVVSSLQGHRNFPTGTVPKWDSHIRAALSIERRKKRSTGVLLPLQNNELPGAEYQYKKDEVWEERKPYKTLQAQAPEKSKNKKKQRKGPHRKSQTLQFDEQTLKKARRKQWIEPRNCARRYLKVDFADIGWSEWIISPKSFDAYYCSGACQFPMPKSLKPSNHATIQSIVRAVGVVPGIPEPCCVPEKMSSLSILFFDENKNVVLKVYPNMTVESCACR

SEQ ID NO: 10424 - DNA, 3455 bp, Homo sapiens
aggcggctggggagggcggcgtgggagaggacgctgagacgcaggggcggccgcgccgaggtgacaagctgcgcacctggaaagttacccggctgtctggtgaggtccctgagcaaaatgggaaatggttcagtgaaacctaaacattctaagcacccagatggacactctgggaacctcaccactgatgctctgcggaacaaggtgacagagctggagagagagttgaggaggaaggatgctgagatccaggagcgggagtaccatttgaaggagctgcgggagcagctgtcgaagcagactgtggccattgctgaactcacagaggagctccagaacaagtgcatccagctgaacaagctgcaggatgtggtgcatatgcagggaggaagcccgcttcaggcctctccagataaagtgcctcttgaggtccaccggaagacctctggattggtctctctccatagcaggaggggagcaaaggctggcgtgtctgctgagccaacaacccggacctatgacctgaacaaaccccctgaattttcctttgagaaagcaagagtcagaaaagactccagtgagaagaagctcattacagatgcccttaataaaaatcagtttctgaaaagactggatcctcagcagatcaaagacatggtggaatgcatgtatgggagaaactatcagcaagggagttacattattaagcaaggagaaccaggaaaccatatctttgtgctggcagagggtcgactagaggtgttccaaggggagaaattgctgtcctccatccctatgtggaccacatttggggagcttgccattttatacaattgtacaaggactgcctctgtgaaagctattaccaatgttaaaacatgggcactagatcgagaggtattccagaatataatgaggaggacagcccaagctagagatgaacaatacagaaacttcctcagaagtgtatccttgctgaagaatttacctgaagataaattaaccaagatcattgactgcttggaagtggaatactatgacaaaggagattacatcattagagagggcgaggaaggaagtacctttttcattttggcaaaaggaaaggtaaaagtaacacagagcacagaaggccatgatcaaccacagctgataaaaacactgcagaaaggagaatactttggagaaaaagctcttatcagtgatgatgtcaggtcagctaacattattgctgaagaaaatgatgttgcatgcctggttatagatcgagaaacattcaaccaaactgtcggtacatttgaagagctgcaaaaataccttgaaggatatgtggcaaacctgaaccgtgatgatgaaaaaagacatgcgaagcggtccatgtctaactggaagctgtccaaagcactctctctggaaatgattcagctgaaggagaaggtggccagattttcctcatcatccccattccagaaccttgagattattgcaacactgggcgttggtgggttcggaagagttgagcttgttaaagtaaaaaatgagaatgttgcttttgctatgaagtgtataaggaagaagcacatagttgacaccaagcagcaggagcatgtctactcagagaagaggatcctagaggagctgtgctctccattcattgtgaaattatatcgtactttcaaggacaataagtatgtatacatgcttctggaggcctgcttaggtggggagctctggagtatattaagggacagaggcagctttgatgaacccacctccaaattctgcgttgcttgtgtgacagaagcatttgattacctgcatcgactaggtattatctacagagacttgaaaccagaaaacttaattctagatgctgagggttaccttaaattggttgactttggatttgcgaagaaaatagggtctggacagaaaacatggacattctgtgggactccagaatatgtagctcctgaagtcattctcaacaagggacatgacttcagtgtggatttctggtcactgggaattctagtgtatgagctcctaacgggcaacccacccttttctggggttgaccaaatgatgacctacaatttgattctcaaaggaattgaaaaaatggattttcccaggaagataacacgacgacctgaggatttgattcggaggctttgcaggcaaaatccaacagaaaggctgggaaatctgaagaatggaataaatgacattaagaaacacaggtggttaaatggttttaattgggagggactgaaagcacggagccttccatcacctttgcaaagagagctcaagggacccatagatcacagctactttgacaaatatcctcctgaaaagggaatgcctccagatgagctatcaggctgggataaagacttctgacagaagaaaagttgattactgcctgtactctacagaagaggacctcaaggatcaataatccaacacattattttcttttcagagtattataatatctttggaagaccattagggaaaagaaattcctgcacaatgggaagaggagaatggtgtggatatggttctgagttatagtgtcttatttagatgctgtgaattattgatgtattacattatttgcttttctcaactgctagaggctaccccattttcctttccacaatcagagccatttttgttaaagtggcagttttttctgcaatctattgttccattccaatcatatccttctcgtttgagtactactaacgtttaaaaagggtcttgcccttgaataactaagtcatacaaatagaaggaaaaacaatggtgaattttggagagctccccagctctcagcaacttcatataagcatggtggtatcttaaaatggtggtttgcagaaaccatggtagccaacagaacctcctgactttcacctgcttttaacctgaaaatatattaatacgcctctgacatgagtccagggagaggcaagattgagcaatagtcagtggcaccatttcctaaagtaactgaatcaatcaatccagtcaggtaattattttctattggggaacttagaaaaaaaagtaaagcaagaaatattttctctcctttatgatcagtgataccttagagacttttcgaaagtccttgttaaagatagttacaatgtgtggttaaatgatgctaaaatattttcacaaccagagtagaaaacgtgctggaacaaaattgcgaaggcttttgcctcccagtaaatagaaaggaaaatatattctagtaggtaagactgctgactctttgaaaatctgaggtattttgaaaaattctgtgatagttgctattaataaaccaaaattgtatagaatcatcgttaatttttaatataaatcccattgacaaatgttgatgcactgtagtcactgctgagttaatagcgctttttaaagacatctgagtcatg

SEQ ID NO: 10425 - protein, 762 aa, Homo sapiens; identical to SEQ ID NO: 920

SEQ ID NO: 10426 - DNA, 614 bp, Homo sapiens
accatgtgtgggggcagaaactacttccactcttaccttccatactgcataactgccagatagacaacttctgcctcacacttaaggccccaaaggaacaagaataaaagcaatacttagattatcaggaactacaatgccaatgaaggaatgacaaccatcattgttgtcaacaacatgtcaacaacatcaacaaatagaaagcattcctccattcatcactccttctgggaagaagtagactaagaggtaagaagcaactaatttttcatgggatttgaaactaagtaggtgaatctgaagtctgcgctgcttccattccatcccattgtctcttctgagggagaaagcttctaagggagaaagcctttggggcttggaacaaaagaagccagagtctttagagtacacactccgtacttccattaaataaatttcaacaacaggtcaaagcatgtatcttgcaaccttctttgaataaggctcagtgcaaagctggggccagtgaccttgaccttccttcatccctatctatcaaggattttttgtgagcataagaggcagcaactttacttgtatttcatttcatagcttaattatatctacatgcaatt

SEQ ID NO: 10427 - protein, 31 aa, Homo sapiens [sequence omitted]

SEQ ID NO: 10428 - DNA, 782 bp, Homo sapiens
accatgtgtgggggcagaaactacttccactcttaccttccatactgcataactgccagatagacaacttctgcctcacacttaaggccccaaaggaacaagaataaaagcaatacttagattatcaggaactacaatgccaatgaaggaatgacaaccatcattgttgtcaacaacatgtcaacaacatcaacaaatagaaagcattcctccattcatcactccttctgggaagaagtagactaagaggtaagaagcaactaatttttcatgggatttgaaactaagtaggtgaatctgaagtctgcgctgcttccattccatcccattgtctcttctgagggagaaagcttctaagggagaaagcctttggggcttggaacaaaagaagccagagtctttagagtacacactccgtacttccattaaataaatttcaacaacaggtcaaagcatgtatcttgcaaccttctttgaataaggctcagtgcaaagctggggccagtgaccttgaccttccttcatccctatctatcaaggattttttgtgagcataagaggcagcaactttacttgtatttcatttcatagcttaattatatctacatgcaattagaaaacatatggtaaggcatatttgtgaaggtcacaaaatctagtagagctggaatgccaggatttgattccaacttctgccacttactaactgcggaaccttaggcaagtcactgaacccctaagtttcctcagctgtaaaacaataataaacagagtctacaggt

SEQ ID NO: 10429 - protein, 31 aa, Homo sapiens [sequence omitted]

SEQ ID NO: 10430 - DNA, 647 bp, Homo sapiens
acatgtcaacaacatcaacaaatagaaagcattcctccattcatcactccttctgggaagaagtagactaagaggtaagaagcaactaatttttcatgggatttgaaactaagtaggtgaatctgaagtctgcgctgcttccattccatcccattgtctcttctgagggagaaagcttctaagggagaaagcctttggggcttgctggtgatctttttctacacaaaaagttttcaaacaaaaggaacaaaagaagccagagtctttagagtacacactccgtacttccattaaataaatttcaacaacaggtcaaagcatgtatcttgcaaccttctttgaataaggctcagtgcaaagctggggccagtgaccttgaccttccttcatccctatctatcaaggattttttgtgagcataagaggcagcaactttacttgtatttcatttcatagcttaattatatctacatgcaattagaaaacatatggtaaggcatatttgtgaaggtcacaaaatctagtagagctggaatgccaggatttgattccaacttctgccacttactaactgcggaaccttaggcaagtcactgaacccctaagtttcctcagctgtaaaacaataataaacagagtctacaggt

SEQ ID NO: 10431 - protein, 55 aa, Homo sapiens
SLRCFHSIPLSLLREKASKGESLWGLLVIFFYTKSFQTKGTKEARVFRVHTPYFH

SEQ ID NO: 10432 - DNA, 6332 bp, Homo sapiens
gtctcaacatgactgactgggaagcggtggctcgggcagagcagctccgctggcgcaggcaggaggagcaggaggattattaaataacgcagctggactctgtgcaactgggagtggagaggagcccaacagccgagaaggggagggagggcagaggagggggaccaggaaggacacccccgtgccccgaagacataaatccctgagtgcccgggaggagccttaacaagcgcacggagccctcaaggctgcaaagttggctttcacagtgcaagcctttgattcccaatgggggactcaggatcaagacgatctaccctggtctcccggttgccaatattcagaagaagtattaacagaagacatgattctcttccttcttcaccttcttccagtaatacagttggtgtccacagttcctctccttccagcactaactcaagctcaggtagcacaggtaaacggaggagcatattccgtactccttccattagcttccaccataagaaggggagtgagcctaagcaagagcctaccaaccagaaccttagtatttcaaatggtgctcaacctggtcacagcaatatgcagaaactgagtttggaagaacatattaagaccaggggaagacattctgttggttttagtagttcacgaaataagaagataacaagatctttgacagaggattttgaaagggaaaaagagcactcaactaacaagaatgtctttataaattgtctaagttctggcaaaagtgaaggggatgattctggtttcacagaagaccaaactcgtcgttctgttaagcagtcaacaaggaagctactccctaaatctttttcatctcactataaattttctaagccagttctacagagccaatccatttcattggtacaacagtctgaattctcattggaagttacacagtaccaagagagagaacctgtattagtaagagcttcgccatcctgttctgtggatgtaacagaacgggcaggaagctctttacaatctcctttgctttctgctgatcttaccacagctcagacaccttcagaatttttagccttgactgaagattctgtgtctgaaatggatgcattttctaaaagtggaagcatggcatcccactgtgacaactttggccacaatgattctacctctcagatgtccctcaattctgctgctgttacaaagacaacaacagaacttacgggaactgttccctgtgcaattatgtctcctgggaaatataggttagagggtcaatgtagcactgaatctaattcattaccggaaacctctgctgctaatcagaaggaagtgttattacaaattgctgaactacctgctacaagtgtgagccactcagagagtaacctaccagcagatagtgaaagagaagaaaatatagggttacaaaatggtgaaacaatgctggggacaaactccccaaggaaacttggattttatgagcaacataaagcaatagcggaacatgtaaaagggatccatcctatttcagattcaaagataatacctacttctggtgatcatcatatttttaacaaaacatcacatggatatgaagcaaatcctgccaaagttcttgccagtagtctcagtccatttcgtgaaggaagatttatagagaggagactgcgatcctcgtcagaaggcactgcagggagtagcagaatgattttgaaaccgaaagatggaaatatagaagaagttaatagtttaagaaagcaaagagcaggttcttcatcttcaaaaatgaacagtttggatgttttgaataatttgggatcttgtgaactggatgaagatgatctaatgcttgatcttgaatttttagaggaacagagtcttcacccttctgtttgccgggaggactcatatcactctgtcgtctcatgtgccgcagtagttcttactcctatggaaccaatgatagaaatgaagaaaagagaagaaccagaatttcctgagccttccaaacagaatctttccctgaaattaacaaaggacgttgatcaagaagccaggtgttcccacatcagccgaatgcccaacagtccatctgcggattggcctctacaaggtgtggaagaaaacggaggcatagattctctgccattcagactgatgttacaggactgcacggcagtcaagacgttattattaaagatgaagagagttcttcaagagagtgcagacatgagtccagcaagcagtaccacgtcacttcctgttagtcctcttactgaagagccagtgcctttcaaggatataatgaaagatgaatgctcgatgctcaagctgcagctgaaagagaaggatgaactcatttcccaacttcaggaagagctgggaaaagtccggcatttacagaaggcttttgcttcaagagtagataaatccacacagactgaactactatgctatgatggtttaaacttgaaaagactagagacagtacaaggagggagagaggctacatatcgaaatcgaattgtgagccaaaatctcagcacaagggacagaaaagcaatacatactcccaccgaggaccgttttaggtattcggcagcggaccagacaagcccctacaaaaacaagacctgtcaactcccaagtctctgtttaagtaatttcctgaaggacaaggaactagcagaagttatcaaacattcaagaggaacttatgaaaccctcacttcagacgttacacagaacttacgggccaccgttgggcagagctctctgaagccaacagctaagacagaagggctctccacgttcttagagaaaccaaaggaccaagttgctacggcccgacagcattcgacctttacaggcaggtttggacagccacccagagggccaatctctttacacatgtacagcaggaagaatgtgtttctccaccacaatttacacagcactgagctgcaaactctaggccagcaggatgggtaattaaatcaccgtattcctgtctttgggtaggataaagatggttagtgtttctcgtgcatagttcatattaaaattgtcatgtactttttcttacattttagttataaacagagttgtgttgttgggttttttttcttagtcataaacaaagacttgtgggttttttttttccaagagtgaaagtttgagcatgttaattgaactaggttgcattgccttgaagactttactatataggtgtataataaatgggaccatcatgatcgtttatatagtccataatttatttattttttatctctatcacttactgatatgcattaaggtttcagaagataatatcaaatagcaatctgttcactgttaatggtgttactataaaagtagacctgatgaaaaatagataaaggaattataaagaattttaaattatataattaatagaaggaggaaaaaagagaaatgttaacgtcttatatttggtggtatatttatttgaagaatgtggcttgcttgcatgtaacctagagatgtgtttgtctctattacatacattcaagctcatcttgtgatactagtaagggggaaatggctgtattttttttcctttaaacgtttagttcatactagttcacaaaggatttcagacagagtaattgctagccaaatagagaatgacagctctgatctttgaaaaattttgcttttagtttttgttattgatgttgaagtaccgtgacataacacaaggtgataaagttggttgaattttgtcagatgatgcataaatactgacatgctatattctttgagccactgtcatggcaatataaacattttttcaaaatttcaaggatgaaacatcctaagaaaattattctttttctttactttccttattttttaaaatgttcttttttatgtaaatccaattttggtttatatacatcaacccatatctataattttatgaactgaagaacagaaagtcagtattttagtagccagcatacaatattctgactatgcagaaatctagatttggaacaaaagtaaagtaaatgtgaacattggcaatttaatcttagaaataagcttctaacaggaatatttaaaacccatttgatggcaaatatttctctttgacaaataaggcccaaatatgttataatatgttatatacttatgtgcactttagatcaatatatgaattgatctatggataattccatcatgttcaattagtagcagagcagaatcaaagagtacaattgaatacataaataaataatttttaaaagactaataggaatcaaggctgcagttttcttatacacatcagagctgttaagtacatccacattagccatagtccatgcaaattgaaactgtcatacctactgcatgatctgtttcccttgcattttctaacagaatctgtcagcgtgcacaagcaagatgaacaaagggaaattgagatagcagttttagcatggcatctgacaacttgcttaaattaaagctgtgtgcaaaatgcatctcctattataaaaatgtatttgtgccctgtgctttggggaaaagccattagacactccacccctgagctttaactactgaactttgatacatttgcaaacttagattggaactgataaagtaaggagtcgagtggatatgttgtacttgtaattttggttttccaaaggaacacacatgtgcatcaaggcagacatttgccaaatgttttctttctttgcgtgtttgtaattctgccaaaagagaacaatatacactgcaaattgcttgacttaatgagattgccatctaaagttcccaccatactttggaagctataatgatcatgcagatatacactttgggctgggcaatatttaagaaatgataggaaaatagaaaaatcatgattattaattgtggaattcagcttgatttgtcctaaatgttggtgtctgttgctagagtattttaaatctgtacataaataagcatgataaaataatcaaggattttttcccaggatatggaagaactatgtatcacaaataatgtttttgatttggacttttggagttgatagttttgttttcctggaagatagacttttgaattatactttataaaaataatctatttatagaagatctgtcatttaatagacattttaagagatgttttaaacgctagtattttcttgaaaaatcttttttaaagctgaatcattcaaaagaaaacctggattaaacagttcgattttaaaaggaagggtattttttggaaatatcatcttaaagctgttttgtatcagtattttcaacattgttataatattatttgtaatactaagtgtaactcaggcctggagaaggtgtaagcccactatgctaatgtacatcagtaactgtaaaacaggggttctttgtaagttcctcttgtgtatatatagtaacttataacaatggcatgtgggcattctttcagtgaattgctttctttgtactaaaatctctagttttctaagacagttccatgtataaaaatgatttatgcatttctccaaggcggtacatatccaaagacatgacaccagggggaaaaagtgcttgtttttctgatggaagcagtggtcttttcttttctttcctctttcttttgtgcatgtgtatgtgtagctaagcctaaataaccctgtaaaatttctgctgcaaattgtctcttctgaatttagaatgtgttttaaaggaacacttaggaagagaaataccttgaagaaaagctgtttccacctgaaataaactgttcccatttttataattattggaacatgaaactgtatttctatgaactcaatgatttttttccataaaattatatgctaagagagtcaccacaaaactatgaattctctcccgaattatttttgcttctttggagcaccatagtctttgttcaaatcacaacatgaaactgttgctgcaatgctaaagatgtgaatccaccactatcaatacggtcagggtaaaacctggagccacatgttattcaagttatttttgttatctaatgattgacatgaaaataaaatagtaagccaatattaatttgtaggcatagttgccccacttaaagtgtttacaaagattttcatgattaatctgggtttatgatttaatcctaactcattgtcattatttcctgaatgttgaactcccattataggaaattccacattttgttttgttttctttgtcttgtttaatagagataataaccatacacccctctccagaaaaaagtttttaaaaattattatgatatat

SEQ ID NO: 10433 - protein, 900 aa, Homo sapiens
MGDSGSRRSTLVSRLPIFRRSINRRHDSLPSSPSSSNTVGVHSSSPSSTNSSSGSTGKRRSIFRTPSISFHHKKGSEPKQEPTNQNLSISNGAQPGHSNMQKLSLEEHIKTRGRHSVGFSSSRNKKITRSLTEDFEREKEHSTNKNVFINCLSSGKSEGDDSGFTEDQTRRSVKQSTRKLLPKSFSSHYKFSKPVLQSQSISLVQQSEFSLEVTQYQEREPVLVRASPSCSVDVTERAGSSLQSPLLSADLTTAQTPSEFLALTEDSVSEMDAFSKSGSMASHCDNFGHNDSTSQMSLNSAAVTKTTTELTGTVPCAIMSPGKYRLEGQCSTESNSLPETSAANQKEVLLQIAELPATSVSHSESNLPADSEREENIGLQNGETMLGTNSPRKLGFYEQHKAIAEHVKGIHPISDSKIIPTSGDHHIFNKTSHGYEANPAKVLASSLSPFREGRFIERRLRSSSEGTAGSSRMILKPKDGNIEEVNSLRKQRAGSSSSKMNSLDVLNNLGSCELDEDDLMLDLEFLEEQSLHPSVCREDSYHSVVSCAAVVLTPMEPMIEMKKREEPEFPEPSKQNLSLKLTKDVDQEARCSHISRMPNSPSADWPLQGVEENGGIDSLPFRLMLQDCTAVKTLLLKMKRVLQESADMSPASSTTSLPVSPLTEEPVPFKDIMKDECSMLKLQLKEKDELISQLQEELGKVRHLQKAFASRVDKSTQTELLCYDGLNLKRLETVQGGREATYRNRIVSQNLSTRDRKAIHTPTEDRFRYSAADQTSPYKNKTCQLPSLCLSNFLKDKELAEVIKHSRGTYETLTSDVTQNLRATVGQSSLKPTAKTEGLSTFLEKPKDQVATARQHSTFTGRFGQPPRGPISLHMYSRKNVFLHHNLHSTELQTLGQQDG

SEQ ID NO: 10434 - DNA, 570 bp, Homo sapiens
ggaatctttccctgaaattaacaaaggacgttgatcaagaagccaggtgttcccacatcagccgaatgcccaacagtccatctgcggattggcctctacaaggtgtggaagaaaacggaggcatagattctctgccattcagactgatgttacaggactgcacggcagtcaagacgttattattaaagatgaagagagttcttcaagagagtgcagacatgagtccagcaagcagtaccacgtcacttcctgttagtcctcttactgaagagccagtgcctttcaaggatataatgaaagatgaatgctcgatgctcaagctgcagctgaaagagaaggatgaactcatttcccaacttcaggaagagctgggaaaagtccggcatttacagaaggcttttgcttcaagagtagataaatccacacagactgaactactatgctatgatgccctgtggaatcctacatgcactgaaggtttatttaaaccagtacttatttcaacttaggttaaatcattatctgacaataagaaatgcatcactaatctgtgacatgtaaaatattgag

SEQ ID NO: 10435 - protein, 147 aa, Homo sapiens
MPNSPSADWPLQGVEENGGIDSLPFRLMLQDCTAVKTLLLKMKRVLQESADMSPASSTTSLPVSPLTEEPVPFKDIMKDECSMLKLQLKEKDELISQLQEELGKVRHLQKAFASRVDKSTQTELLCYDALWNPTCTEGLFKPVLIST

SEQ ID NO: 10436 - DNA, 828 bp, Homo sapiens
tgaggacacagtgagaaggcagctatttgcaagccaggaagagagccatcaccaagaactgaatctgccagccccttcatcttggatttcccagcctccaaaactagtgcagacatgagtccagcaagcagtaccacgtcacttcctgttagtcctcttactgaagagccagtgcctttcaaggatataatgaaagatgaatgctcgatgctcaagctgcagctgaaagagaaggatgaactcatttcccaacttcaggaagagctgctcccgaaaattttgtgttccatgagaggaggttttatttgcttggctgtgtttcttgaagattctactgatgtcttcagtgatatgcatgcccccattaaagattctaaagcaaactactacacgtaggccatcatgttccaagtttttgaaagttcatctttttcatcttgttgataaatttcatcaacttttatgtagggaaaagtccggcatttacagaaggcttttgcttcaagagtagataaatccacacagactgaactactatgctatgatgctaccgtgataagctgctattctgctcatcacaaggagttagagtcctaattatttaaataaacagaaggaagaaaggaaggaaattaattttgacaaaggacctgaataatccataaaccagatgcctttagtgaaaacgaagtaagatcagctctggatacctcctaactcttcccctccttctcctgatgagggagaagtggaggcccaaggaaaatgagcaagttttgtaacaacacgaatggggaaggatgggaaagagaacagaatcggtggagg

SEQ ID NO: 10437 - protein, 93 aa, Homo sapiens
MSPASSTTSLPVSPLTEEPVPFKDIMKDECSMLKLQLKEKDELISQLQEELLPKILCSMRGGFICLAVFLEDSTDVFSDMHAPIKDSKANYYT

SEQ ID NO: 10438 - DNA, 412 bp, Homo sapiens
gatgaactcatttcccaacttcaggaagagctgctcccgaaaattttgtgttccatgagaggaggttttatttgcttggctgtgtttcttgaagattctactgatgtcttcagtgatatgcatgcccccattaaagggaaaagtccggcatttacagaaggcttttgcttcaagagtagataaatccacacagactgaactactatgctatgatgagcgttaacgtcatgaatcctgtggctcaccacttcatgtctgaaggttagtgagccaatgactcatccctcaaggctctggatttgtttacttatttagcaaggtatagcagaaaatgacagcatgcccttaacacaaagcttttcctctagtactcttgtccaggaagaggtaataaaatttactttaaaaaact

SEQ ID NO: 10439 - protein, 42 aa, Homo sapiens
MRGGFICLAVFLEDSTDVFSDMHAPIKGKSPAFTEGFCFKSR

SEQ ID NO: 10440 - DNA, 270 bp, Homo sapiens
aagagaggctgaagatggaagaggacagaggatggagaaacaattaagaagttatgatcataatttccttcagagatgatgaagacacaaactcattcaacacgaattgagataaacaggaagaaataaaactgagattgaagtagagactgcataatgaccttgagaacagggagtataagagagaaagaaggttagttgcttttaatcaatgaaagataagactttcacctcacttcactgaaatagacttggatgtctacttggata

SEQ ID NO: 10441 - DNA, 398 bp, Homo sapiens
atgattcttgccttaaaagtacaaatcttctttgggaaaaaagcctttgtaactcttctttcttcttcctgcctaggacccatgtgcacaggcttagatgtgcaacagccatatctaattacaataatggcaagagccacctactatgctggtgaaacaagaagacagaaaaagaggaccactgctaacccatttgacacctgtggaattagaaataagtgctatagaaacctgagggacacacagggaaatcagaagactaagtggagaagggagaatcacagactgggttttgtattagaaaaaattatccagaagctgataccgtctgtcttaattaccatctgttaatttccttaccaagttctggagattaaaaatggacactggaggaacct

SEQ ID NO: 10442 - protein, 116 aa, Homo sapiens [sequence omitted]

SEQ ID NO: 10443 - DNA, 1459 bp, Homo sapiens
atttctggctacagtttcaatatttaagaaaataaaaaatagacaaacagatggaaattttagcagccattttctaaacaacattttagtgactttataataatcatatagctacattatattattaaacttgatgatactaggttattttattcatgttatttttatattttccccttactgacacttaatatttattacatattgacaatcttctaagtactaaaacattatttcatttaataatcataaaaccaaacatgctattgtgttattacaaactgcagaataggaaaccgggaccctgaggagtttaagtaaattctccagagtcagaaaggtaataattatgaccatatttttatatgcctgttgtacttatcttgggagaaaatatgacattggaaaagaattgaaattatataattattgttttttcttttaattgacgatacgacattatttacatattgacttttgtctaaagaaagaggacattattgtagttttgaaaatatgggttgccttttatagttgtaccatagttttgatagctcaatttcacttacagatacatttaacgccactagatacaaagtaaaaactttgtctattatctgctgaatgtgtcatttcccacaggtgctaagaacgctcaagccatggagagagatgcatttggagttgtttacattcagacaaagctcatctggttgtttgcagctagtcacaaggtggcccattgtcctgccttgcttttctccattatctctgggtcaagttgtttctttgataaatccaaatcatgaaaatagcctgctgaaagaattcactttgaaaatgccacaaaacagacaatggaaaaatgagatgaacaagtgcgaatccatcattcttctcaggttctggaaaaatgctggttttcagctcctggaaaattctcacaagacatctgttttgttttatatcttcatttgtttccattcatctttcctactgtagacactgtctatgatttttttgtgtgggggttttggcaaagtgcatacgattactttgaatttagagaattaaattgtatttatccactgaaagctgtttttaagatctagctgtgttgtcacttggatatctagtttattacttctacttgcaaagtagtacaatgagataccaaaccaccatattttttccatctattttctcaattatggacacttttcaacttattactacagtagggaagttaaaggctatttgaattattggagaatagagatacctaggatcagaattaccaagtcatagaccgaaactttggctaagacctaaacttaatatgggtaaatattgttacattgctccctagaatattgatatggtttggatttgtgtccccacgcaaatctcatgttgaattgtaatcctcaatgttggaggtggggaatggtaaggggtg

SEQ ID NO: 10444 - protein, 125 aa, Homo sapiens
MCHFPQVLRTLKPWREMHLELFTFRQSSSGCLQLVTRWPIVLPCFSPLSLGQVVSLINPNHENSLLKEFTLKMPQNRQWKNEMNKCESIILLRFWKNAGFQLLENSHKTSVLFYIFICFHSSFLL

SEQ ID NO: 10445 - DNA, 355 bp, Homo sapiens
cagttgtggcggttgctggtcagtaacagccaagatgctgtggaatctgctggctcttcatcagattgggcagaggaccataagcactgcttcccacaggcattttaaaaataaagttccagagaaacaaaaactgttccaggaggatgatggaattccactgtatctaaagggtgggatagctgatgccctccttcatagagccaccatgattcttacagttggtggaacagcatatgccatatatcagctggctgtggcttcatttcccaataaaggagtgacttcaatcatcccagcaatcacttggttcacattcattcagctctctatggaccagaaatctgataaatga

SEQ ID NO: 10446 - protein, 106 aa, Homo sapiens
MLWNLLALHQIGQRTISTASHRHFKNKVPEKQKLFQEDDGIPLYLKGGIADALLHRATMILTVGGTAYAIYQLAVASFPNKGVTSIIPAITWFTFIQLSMDQKSDK

SEQ ID NO: 10447 - DNA, 523 bp, Homo sapiens
gacacatttcttcttactggtggaaactttctgcacagtcctgaggcagcacagggcaacacacggacttctggttgctgctgctatttcaaacactgtcaaggacctccattataatcagccacctcctgctgaggacttctcccctcaaaccagcactcaattcatccagacaagacttttagctgagacatctgtggtctacaatggaatgaaaccagaatcaacaatctggttaaactgcacagcctgtctcatttatatatggttattttggtgcacatttgagctttctttgatttgcaaagtgaaaatgccaactttttgattattaatatatttcaattattttataataagaagaaattatgtatgtgctatttatgggctaataaaaatctcagctgaggtgaaaagatgagcaactggacagattaaactgaaactttctttttaaaaagtttaattgtatgtatttaagatgtacaacatgatatacatcgagataataaaatggttactg

SEQ ID NO: 10448 - protein, 38 aa, Homo sapiens
MKPESTIWLNCTACLIYIWLFWCTFELSLICKVKMPTF

SEQ ID NO: 10449 - DNA, 4176 bp, Homo sapiens
ggttcttctgttcctcggactttcttctcggttcagaaagaagcttgtgctacccctggacctgctgattatcaggaattttggcattcacagggtgtgggaatttctgatgaattacctaacttgactaacaaatatgctgctttcttgtcaagagccaaaagaactatgaaagtaccagatatggttattccagcgccaggcagctatgatgttcacaaatcatatgagatgtcccaagttaagcataaatatatgccacctcgtagtttagtggctaaaagaaaacatgcctcttttcttagtgcaactcctcggtgcctagaaaaagtgactgatgggccaggtcctgcagcatacaatcctgttttaaggaaatcttgccccatacccttatttgtgaaagcatcaaagcgctttgaagagtccaaagagattactccaggcccagcaacatatgagatgaataatacagaggaaagcccacgtggactgaggacatactacatggagcatggaggtgataagaccatttcttcaggaatgaccagaatagcataaaagatcaatggaagcattgccaaaaaaggaagactgaaatctcaacctttcagggagtaatttatcatttggatgagcctaatgagaaaagcagtgcagtgaatgatgtgacaatatgaaacaacaaaatagtgaatgattaacgagtgacaaattgagagggaaaaaaaaggataacgctttcattatggtacaaaagagaatttgacaaactcatccaagaaagcaaccactttttcctccgtcttagttgaacgccttgaaaaacgaacaatcatactgctttcaaggaatttcataagagtaaaatagttaaacttctatagaatttcaataattaagggttacaaatatatttaaaggattttgaagctttaataatcaaaactttataaaaattatgctgcaattattcagggcaaatcaaaatgagaaaaaaccgtggcattttgataagtataaaagttataaaataaaacatattatttgttacaaatgacaatttaatgaaatatagttttgcattgaatctagctaggaaattttagatcatatgttttatggaattgatttgtattgtctgacatctaatttatagctggtcatgaattcaaattcttggcactgcttttttctaactatgtagcttgggaaaatatcttaagttttctaagtttcctaagattcaatttcctcatattctaacttgacctaacacactctatctgccaaaattattgtgaagaattaatgagctaatatctgggacagaaacaaaaaaatcaaagcctagtacctgtcacagaacacacatccacaatgtcattttcctcccattatgtcattagtctcaacaaaaagttaaaaatccaacctcatccaaaatccaatcaaaattaatcagaataagagaagttgggcaaattgatttccattaacttcaagtgcaaagtgttttgcacactcctgggatttacatgatggagaagaacagattcgaatgaactttgcctaacacaaattagataaatatccttttccttgaggacattaacatttagtaaacattaatgaaaaaaaaacaagtaatgcatgcctaatcatgtgctacatatgcctaatctgaattcatctttaaacggggaacggtttgaatggaaaattcatgttttgggttcctacttgtgacatgtaatgataataatttgtgtattccagtaaaattccatgccttttgaaatgtctctgtatgaatatgttgactaaaatgggtcattttagaaagacttatgaagtttgataactggaaaaagtcctaagaatggcctaatttatgtaaataatatacacaatgataatagaaatgtaactaatattagtttgttaataatgcttttatttctgaaaatacaaacaagtctgtagagtcacatgaacaatgggggaaatatttttctgactatgtctgtagaactttccaaaagtggaatctctaagttgcttttttttttttttttttttggtatggacttttaattaatgacacccttgtagaaaaatagaatttaaaaaaggggggtgggggactagggaaggggtagcattaggagaaatacctaatgtggatgacgagttaatgggtgcagcaagccaccatggcaggtgtataactatgtaacaaacctgcaggttctgcacatgtatcccagaactttaagtataataaataaagaaaaatatataagagattttaagacattaaatggccattttgaattaactcctaaaactaaaaatcaatgtcctcagcatttttaaaagaacaactatggcagaaaatgagaaacaaagtaagtggtggagtgagggatgaagatggggctgagtaatagggtgataaattgaaaggttttcagtatggatttgactgaatgacctggggcccaggtcacctgactcctaaccaaattattttccctgtaataaaagtttatattctaagcagagaaaatatggttggatggatggatgaatcgatagatggatggatggatggatggattatagatatgaaaatctttctgaattctattacatactttgtggagaaaattattttcagtattagttattcatctgggttgtaatagagtgagtcatttgagctgagttggaaaattttccttaaacataaattgccccagactgtcattttgttctcaatgtttcattctgcagtgtttggttctctcttgatgtcaaactgtcagaaatcatcctgtggtcagtacacctgccacagcagtcacttcttgtcttcccaggggaaacaggatagtatacttacagagaaaactgaatgaaccttggagttagacaaacctcagctataccctggatctcccattgtgggctagctactcaaactaaatgaagctctctatcttcacctgaaaaatgaggataacaggaagtgcctgttgtgtgaatcaagtaaacaaaattttaaaaatatgtaacagaattcctgaaacacatacatacagtcaatggaacttttctcctttctacattctcccatgctgttgaaggcatgcctttgttgttgttgtgttgttggagagtgctaatctagcttgataaggtgttatatgaaataatggtaaattggctgtgattggatgtctgagaagctcttcaatgtgtttacatttgactgttttggctgcctacatctaagtttttggctgttttctgaataattgagattttttgaacatgtgaaatgtcaccacagtgttgcaaaactctatattctttatgttcctgtgttaagataaaaatctcatgtgtcaaattgataacccgagttttcctacccatgtatgtcataagaaaatcactgaaaaaggtaaatatatcaattaagttatttatcatatagactataaattttcccagattgttggggttttttttttagtactttacctagcatacattttaatttagtcaaactggtttcatgtatattttactaaacatgcttcagacatggtaccagttcaatattctaatttaatttctatagattattaaaaatttttaaattataccagttttactgagttctgtttttaatacattttaggaattctgaaaaatagaattcccacagaaaggaatcctaagaaaattcatgtgaagaatgagatcttatttgggggattaattataatctggaagttttacttataacctcgtatttcatatatattataagatacttacattgaattatagaaatatacaaacaataattgaaaagcttaacttctgcctctgaagatatgattatctcatctcctggcctcttttgtgtttgttttaaggcaataaatacttgcttttctcctcctgatcatgagaaaatgatctttatttaatataaatttgatttatattttatcttttaaaattattattttggttatatctgctcaataatagaaaaaaattatggcttaactgatattgaattatttcaaatattacaacaagaaagcatacagaaatcacagtacagagatataaaatatgtaaaataaaaagttt

SEQ ID NO: 10450 - protein, 130 aa, Homo sapiens
MKVPDMVIPAPGSYDVHKSYEMSQVKHKYMPPRSLVAKRKHASFLSATPRCLEKVTDGPGPAAYNPVLRKSCPIPLFVKASKRFEESKEITPGPATYEMNNTEESPRGLRTYYMEHGGDKTISSGMTRIA

SEQ ID NO: 10451 - DNA, 1652 bp, Homo sapiens
cggcttcctttttctccacacttctagctaccttgtttttatcgttttcggcacctgcccttccccagcgcccccaccaccccgagcactatgtatgatcgggctccccgcctgctcaaattggctgaaggtggcagcactgaggcccatgtgggtcctggatcctaccaggtacctttcctgaagcagcaggcgacaggtagtaatgcaccatttctttctttgactgccagagaaagtacttttaccattgcctctagcattgagaaagctgttccaggtccaggacactataatgtttcagaagcacagaaaatttcaagatcacctacacttaccagaagtgttgatgttccttcaattccttcttgtggaaagtcatatggttatcatattaatgatgatggcagtattataaaatgttttccacctgcttgtgacagtacacttggtccagcatactacaaacctcaatttgatgtttccaatgcaactttgaaatacaaaggtatacattttggcaactcttcaggaagacaagagttacctaaaaagtcaggtcctggtccaggacagtatgatatagtccagaaaaagacatcatattatgaaaatgttaacatcaagagagatcaacaacaaaattattgttcatttatcccacgactatatgaaataatagtattgcaggagaaaaaaaagagatttttacctatgaaatcaatcaccccggctcctggcacatataatgaacctcgaactgctctcaagtctttgaagaaaacatcaggactgaaaaatattccatttggtcaaagtgctgttcgattcacacaggacatcaggacagaggaaatgccaggtcctggattttataatgtcttgaacaatactataattgccagtgttagaaatatctgctcaaagaaacagaagaaaagtgcatttggttcttctgttcctcggactttcttctcggttcagaaagaagcttgtgctacccctggacctgctgattatcaggaattttggcattcacagggtgtgggaatttctgatgaattacctaacttgactaacaaatatgctgctttcttgtcaagagccaaaagaactatgaaagtaccagatatggttattccagcgccaggcagctatgatgttcacaaatcatatgagatgtcccaagttaagcataaatatatgccacctcgtagtttagtggctaaaagaaaacatgcctcttttcttagtgcaactcctcggtgcctagaaaaagtgactgatgggccaggtcctgcagcatacaatcctgttttaaggaaatcttgccccatacccttatttgtgaaagcatcaaagcgctttgaagagtccaaagagattactccaggcccagcaacatatgagatatcccaggagaaaaagaaaggaaatctcattggtgaaatggctgctgatataatgtgacataaatttatggcaaaaacttaaaaaacaacttcatggaagtcagtttatttctttgtcattttaacaaaatttattccaaatataggagtaataaaagcataattttcacttgttcaggcattcgctcaggctttagtgactatatgacacaaccacggagaaataaaccttgttaagac

SEQ ID NO: 10452 - protein, 459 aa, Homo sapiens; identical to SEQ ID NO: 924

SEQ ID NO: 10453 - DNA, 1804 bp, Homo sapiens
aagctatgtaacatatcttaacaaccagggagccacacaggctccttggagtaagagtgtgagaaactggatgaagacagctgtattcttttggaagcgttcgagattggtctgtctctaccaactaaaaacttctagcttaagtgcagagatttaaggagatcaacaaaaactcagtctagacatattatgaggctgggagggtatcaacagacttgagttcttgtcagcaagatcacctgcttttaatattgtcctcagggtctgagcacatctggaagtgaggtcaatcaagttagaccccaaaaacttttgtgacaacagtgaagaggggaaaataaacacaccacaaacatgaacctcaaccccccgacatctgctcttcagatcgagggcaaaggcagccatattatggctagaaatgtaagctgctttctagtcaggcacacccctcatcccagaagagtctgccacatcaaaggcttgaataacattccaatctgtactgtgaatgatgatgagaatgcatttggaacattgtggggagttggccagtctaactacttagagaagaacaggataccatttgccaattgcagttacccctccagcactgcagtccaggagagccctgtaagaggaatgtcgccagccccaaacggtgccaaagtgcctccacggcctcattctgagcccagtagaaaaattaaagagtgcttcaaaacttccagtgagaatcccttagtaattaaaaaggaagaaattaaggccaaaagaccaccatcacctccaaaggcatgctctactcctggctcctgttcttcagggatgacaagtaccaagaatgatgtgaaagcaaacaccatttgcataccaaactatctggatcaggaaataaaagccactcttctgtagggctgctgcagtttgctgggggtctgctccagaccctggttgccttgagttttcccatacctagaggtatcatcagtgagagttgcaagacagcaaaggtgtctgcctgctccttcctctgggatctccatcctaggggggtactgagctgttgctggctcgaatgctcctataggagatcctggcaaagctctgtagcattttgcatactgattctctggcagaagttttacagtggctgcttcatgcaacttcaaaagaaaaagagtgggtctcagctttgattcattctgagcttgccgagataaacctgttaactcatcacagaagaaacacctcaatggaaccagcagcagagactgggaagccacccacagttaaatcaccacccacagttaaattgcccccaaattttactgcaaaatcaaaagtgctgaccagagatacagaaggggatcaaccaaccagagtgtcaagtcaaggatctgaagaaaacaaggaagtaccaaaagaggctgagcacaagcctccactacttataagaagaaataatatgaaaatacctgttgcagaatatttcagcaaaccaaattctcctcccaggcctaacactcaggagagtggatcagcaaaaccagtgtcagcaaggagtatacaagaatacaacctctgtccccaaagagcatgttatccttcaacacaccggaggtagaagttctagactgggtgaattctttcatgaatatgagcttcacatttacatcatcaaattatttttcaaatgaatatttttggtattgaggaatcaagtggtcctctttatggtggcacatgtaaatctaaaaatacctgtatgtaatgctacaaataaatattactggaaatgata

SEQ ID NO: 10454 - protein, 186 aa, Homo sapiens
MNLNPPTSALQIEGKGSHIMARNVSCFLVRHTPHPRRVCHIKGLNNIPICTVNDDENAFGTLWGVGQSNYLEKNRIPFANCSYPSSTAVQESPVRGMSPAPNGAKVPPRPHSEPSRKIKECFKTSSENPLVIKKEEIKAKRPPSPPKACSTPGSCSSGMTSTKNDVKANTICIPNYLDQEIKATLL

SEQ ID NO: 10455 - DNA, 1604 bp, Homo sapiens
aaccagggagccacacaggctccttggagtaagagtgtgagaaactggatgaagacagctgtattcttttggaagcgttcgagattggtctgtctctaccaactaaaaacttctagcttaagtgcagagatttaaggagatcaacaaaaactcagtctagacatattatgaggctgggagggtatcaacagacttgagttcttgtcagcaagatcacctgcttttaatattgtcctcagggtctgagcacatctggaagtgaggtcaatcaagttagaccccaaaaacttttgtgacaacagtgaagaggggaaaataaacacaccacaaacatgaacctcaaccccccgacatctgctcttcagatcgagggcaaaggcagccatattatggctagaaatgtaagctgctttctagtcaggcacacccctcatcccagaagagtctgccacatcaaaggcttgaataacattccaatctgtactgtgaatgatgatgagaatgcatttggaacattgtggggagttggccagtctaactacttagagaagaacaggataccatttgccaattgcagttacccctccagcactgcagtccaggagagccctgtaagaggaatgtcgccagccccaaacggtgccaaagtgcctccacggcctcattctgagcccagtagaaaaattaaagagtgcttcaaaacttccagtgagaatcccttagtaattaaaaaggaagaaattaaggccaaaagaccaccatcacctccaaaggcatgctctactcctggctcctgttcttcagggatgacaagtaccaagaatgatgtgaaagcaaacaccatttgcataccaaactatctggatcaggaaataaaaatcctggcaaagctctgtagcattttgcatactgattctctggcagaagttttacagtggctgcttcatgcaacttcaaaagaaaaagagtgggtctcagctttgattcattctgagcttgccgagataaacctgttaactcatcacagaagaaacacctcaatggaaccagcagcagagactgggaagccacccacagttaaatcaccacccacagttaaattgcccccaaattttactgcaaaatcaaaagtgctgaccagagatacagaaggggatcaaccaaccagagtgtcaagtcaaggatctgaagaaaacaaggaagtaccaaaagaggctgagcacaagcctccactacttataagaagaaataatatgaaaatacctgttgcagaatatttcagcaaaccaaattctcctcccaggcctaacactcaggagagtggatcagcaaaaccagtgtcagcaaggagtatacaagaatacaacctctgtccccaaagagcatgttatccttcaacacaccggaggtagaagttctagactgggtgaattctttcatgaatatgagcttcacatttacatcatcaaattatttttcaaatgaatatttttggtattgaggaatcaagtggtcctctttatggtggcacatgtaaatctaaaaatacctgtatgtaatgctacaaataaatattactggaaatgatatttccatttgtagtt

SEQ ID NO: 10456 - protein, 359 aa, Homo sapiens
MNLNPPTSALQIEGKGSHIMARNVSCFLVRHTPHPRRVCHIKGLNNIPICTVNDDENAFGTLWGVGQSNYLEKNRIPFANCSYPSSTAVQESPVRGMSPAPNGAKVPPRPHSEPSRKIKECFKTSSENPLVIKKEEIKAKRPPSPPKACSTPGSCSSGMTSTKNDVKANTICIPNYLDQEIKILAKLCSILHTDSLAEVLQWLLHATSKEKEWVSALIHSELAEINLLTHHRRNTSMEPAAETGKPPTVKSPPTVKLPPNFTAKSKVLTRDTEGDQPTRVSSQGSEENKEVPKEAEHKPPLLIRRNNMKIPVAEYFSKPNSPPRPNTQESGSAKPVSARSIQEYNLCPQRACYPSTHRR

SEQ ID NO: 10457 - DNA, 772 bp, Homo sapiens
aagaaattaaggccaaaagaccaccatcacctccaaaggcatgctctactcctggctcctgttcttcagggatgacaagtaccaagaatgatgtgaaagcaaacaccatttgcataccaaactatctggatcaggaaataaaaaaaaagagtgggtctcagctttgattcattctgagcttgccgagataaacctgttaactcatcacagaagaaacacctcaatggaaccagcagcagagactgggaagccacccacagttaaatcaccacccacagttaaattgcccccaaattttactgcaaaatcaaaagtgctgaccagagatacagaaggggatcaaccaaccagagtgtcaagtcaaggatctgaagaaaacaaggaagtaccaaaagaggctgagcacaagcctccactacttataagaagaaataatatgaaaatacctgttgcagaatatttcagcaaaccaaattctcctcccaggcctaacactcaggagagtggatcagcaaaaccagtgtcagcaaggagtatacaagaatacaacctctgtccccaaagagcatgttatccttcaacacaccggaggtagaagttctagactgggtgaattctttcatgaatatgagcttcacatttacatcatcaaattatttttcaaatgaatatttttggtattgaggaatcaagtggtcctctttatggtggcacatgtaaatctaaaaatacctgtatgtaatgctacaaataaatattactggaaatgata

SEQ ID NO: 10458 - protein, 123 aa, Homo sapiens
MEPAAETGKPPTVKSPPTVKLPPNFTAKSKVLTRDTEGDQPTRVSSQGSEENKEVPKEAEHKPPLLIRRNNMKIPVAEYFSKPNSPPRPNTQESGSAKPVSARSIQEYNLCPQRACYPSTHRR

SEQ ID NO: 10459 - DNA, 289 bp, Homo sapiens
agagtgtcaagtcaaggatctgaagaaaacaaggaatatacaagaatacaacctctgtccccaaagagcatgttatccttcaacacaccggaggtagaagttctagactgggtgaattctttcatgaatatgagcttcacatttacatcatcaaattatttttcaaatgaatatttttggtattgaggaatcaagtggtcctctttatggtggcacatgtaaatctaaaaatacctgtatgtaatgctacaaataaatattactggaaatgatatttccatttgtagtt

SEQ ID NO: 10460 - protein, 38 aa, Homo sapiens
MLSFNTPEVEVLDWVNSFMNMSFTFTSSNYFSNEYFWY

SEQ ID NO: 10461 - DNA, 3710 bp, Homo sapiens
gtttgctggctgggagcctagaagggatagtgggcgaggctccgccccgtggtggggcgctttccgtcggcgtgtgttttggggttgccatcggcccgtagtatgtgaaaagtgagtttgcaaagaatcagtgggaaatctgtactctaaagggccggaaagcgtgttatggccctgccacttcgtggctagagaccgtgggctttacctctttaaagctgccttacctcatttttcctgcaaagggctgacgtcgctgaactctctgaaatgtagagagcccgaggggaagttgctgcagaggcaccaaataatgtcatctgaaatgttgccagcatttattgaaacttctaatgttgacaaaaagcaaggcataaatgaagatcaagaggagagccagaagccaagattaggtgaagggtgtgaaccaatatctaaacgacaaatgaaaaaactaataaaacagaaacaatgggaagagcaacgggaactccgcaaacaaaagcgaaaagaaaaacgcaagaggaaaaaattagagcgacaatgtcaaatggaaccaaactcagatggacatgacagaaaacgtgttcgaagagatgttgttcatagcacccttcgccttattattgactgtagttttgatcacttgatggtattaaaggacattaagaaacttcataagcagattcaacgatgttacgcagaaaaccgacgggcactgcatcctgtgcagttttacttgacaagccacggaggccagctgaaaaagaacatggatgaaaatgacaaaggatgggtcaactggaaggatatccatatcaaaccagagcactatagtgaactcataaagaaagaagacctgatttaccttacgtcagattcacctaatatactgaaggaattagatgaatcaaaggcctatgtgattggaggattagtagatcacaaccatcacaagggactcacatataaacaagcgtcagattatggaatcaatcatgcacagctcccacttggaaattttgtgaagatgaatagtcgaaaagttttggcagttaatcatgtgtttgaaattattctggaatacctggaaacaagagactggcaagaagcattttttactatcttgccccaacggaaaggagctgttcccacagacaaagcctgtgaaagtgcttctcatgacaatcagtctgtcaggatggaggaaggtggatcggacagtgattccagtgaggaggaatatagcagaaatgaactagattcaccacatgaagaaaagcaggataaggaaaatcacactgaatctacagtgaactctctgccacactaatgttacctggtttccttttagtttaaggaaaaattaggagaaagtgaggtgctatatagaatattgaaattggaagaacattttattttctcttatttctgttgtgatttttaaaaacttttttttggacctaaataataataaaaaaaaaagccctttaaactttgtaaggaaatattttttgattttgcgtaagaagatttaaatgtgtatgtgattttttttgtttttgtttttaaagcctcagtagtttctagataattttactgtattagtatattttcattttctttcattttatattctttagaatgtgccttctgacctttcagttttttaattttatagtcacatcaacatctttatgatctattgcctatatatctgtgagggcacatattcataaatatactgtcaatctatcagcatttgtgtatggtaggttaccctctatttgcagcttttatgtttaaattagttacttgaaagaatgtagtaattttaggaagaagtatcagtttgatagacttaataattcatttcttttggactatggagcgcatatctgttccttctttatgatgcctttttatggttctgaagtaattactgaagagttgagaatctctttaatgcattttcttaattcttacaatggtgataagttacttcaattataaaattgaattttgcagactaaattattttataaggctgttgctattgaaagatcaattttgtctttacctgcatttaaaatggaacagctcttagcagctgtggtttttttttccatattttttttaaatttgttggctcttaagatgaataaagtttataggtgcatctgcctcctcttctctaagaatatgcatactaatgtttgtttctataaatcaaatacacatgtgataatatgcatgtaaatacataactatcctcatcatgtatggctctcagttcttaattgatgataacatgattgaattgccatatatctgtattacttgtgtgaatggttgtgttgaacacgctaagaacaatttgaattttattaagtacaaaaatccttaacgtttgtatgggaacattggcaagaaagaatagtgtgaaagggaactgttttagtttcctatcagtaattgtacatgcagttaaatgtttaaggtaaaatgattggtctctgtcacagctaaaagatttcagtagccttcattgagtttgggtaaaataagttgctgttcttttgtcttctttttaatatataaaagttatatttaaaaagtatataacatactatatatgttacatactaacatatatatacacaacagaaagtttattggatttagtactgatatttactgtctatttttgttactttgttcttagtaatctattatagttacctattttaaggtaaggtctgtaggcaagatatgtaagtaaagacaagccctacaattttaaaataacaaagcttatgtcttaagttgtattttttcaaaggttcatgtttttctgagtaaatgtggtttattagcatgaaatattatgccttttacttaaattattttatgtaaaatagggcactgtttaattatgaaagggggaaaatcattccaaataagagtttaatttttattaattataaaaaactctgtattagtttcctagatgtgctagaacaaattaccacaaactgggtggctttaaacaacagaaatttattctcttaacagttccagagactaaatgtccagactcacaatgtcccagtgccatgcttcctccttaggccctaggaaagaatacttcctagcctcttcctggcttttggtggttgccagcaatccctgctgttccttagcctatagtggcttgactccaatctcagttttgttgtcaagtggtcttctaccctgtcttctatgtttgtatccgtgtccaaactctttttctagggagaccagcactggattagagttcaccatgatccaatatgacctcatcttgactacatccgcaaagaccctgtctccaaataaggtcacatttacagggtaccatgtgttaggatttgacatatcttttgggggacacaattctacccactacaggcccatatcttatctaggatgttggtggcaagaaggtgaagattactacctcttttgatataactagtttctgaggtatttaaaaatttggttttaaaaatattaagctttttgctcatttgcatgtatacttttctctcaacattgttttggtttatttaggttatttgttaaaacttcagtaaatactaaagttacttgtattagaacataataaaagtagagaattaaactacctaaataaatgcatcaaaaaa

SEQ ID NO: 10462 - protein, 339 aa, Homo sapiens; identical to SEQ ID NO: 928

SEQ ID NO: 10463 - DNA, 3509 bp, Homo sapiens
ggaattgaagtttctgtggaaggaagcgtgagccgtaaccaggccaacccagaaaggctttctttctgagatttcacttccctgtcaactcttcagctcgaggcaccaaataatgtcatctgaaatgttgccagcatttattgaaacttctaatgttgacaaaaagcaaggcataaatgaagatcaagaggagagccagaagccaagattaggtgaagggtgtgaaccaatatctaaacgacaaatgaaaaaactaataaaacagaaacaatgggaagagcaacgggaactccgcaaacaaaagcgaaaagaaaaacgcaagaggaaaaaattagagcgacaatgtcaaatggaaccaaactcagatggacatgacagaaaacgtgttcgaagagatgttgttcatagcacccttcgccttattattgactgtagttttgatcacttgatggtattaaaggacattaagaaacttcataagcagattcaacgatgttacgcagaaaaccgacgggcactgcatcctgtgcagttttacttgacaagccacggaggccagctgaaaaagaacatggatgaaaatgacaaaggatgggtcaactggaaggatatccatatcaaaccagagcactatagtgaactcataaagaaagaagacctgatttaccttacgtcagattcacctaatatactgaaggaattagatgaatcaaaggcctatgtgattggaggattagtagatcacaaccatcacaagggactcacatataaacaagcgtcagattatggaatcaatcatgcacagctcccacttggaaattttgtgaagatgaatagtcgaaaagttttggcagttaatcatgtgtttgaaattattctggaatacctggaaacaagagactggcaagaagcattttttactatcttgccccaacggaaaggagctgttcccacagacaaagcctgtgaaagtgcttctcatgacaatcagtctgtcaggatggaggaaggtggatcggacagtgattccagtgaggaggaatatagcagaaatgaactagattcaccacatgaagaaaagcaggataaggaaaatcacactgaatctacagtgaactctctgccacactaatgttacctggtttccttttagtttaaggaaaaattaggagaaagtgaggtgctatatagaatattgaaattggaagaacattttattttctcttatttctgttgtgatttttaaaaacttttttttggacctaaataataataaaaaaaaaagccctttaaactttgtaaggaaatattttttgattttgcgtaagaagatttaaatgtgtatgtgattttttttgtttttgtttttaaagcctcagtagtttctagataattttactgtattagtatattttcattttctttcattttatattctttagaatgtgccttctgacctttcagttttttaattttatagtcacatcaacatctttatgatctattgcctatatatctgtgagggcacatattcataaatatactgtcaatctatcagcatttgtgtatggtaggttaccctctatttgcagcttttatgtttaaattagttacttgaaagaatgtagtaattttaggaagaagtatcagtttgatagacttaataattcatttcttttggactatggagcgcatatctgttccttctttatgatgcctttttatggttctgaagtaattactgaagagttgagaatctctttaatgcattttcttaattcttacaatggtgataagttacttcaattataaaattgaattttgcagactaaattattttataaggctgttgctattgaaagatcaattttgtctttacctgcatttaaaatggaacagctcttagcagctgtggtttttttttccatattttttttaaatttgttggctcttaagatgaataaagtttataggtgcatctgcctcctcttctctaagaatatgcatactaatgtttgtttctataaatcaaatacacatgtgataatatgcatgtaaatacataactatcctcatcatgtatggctctcagttcttaattgatgataacatgattgaattgccatatatctgtattacttgtgtgaatggttgtgttgaacacgctaagaacaatttgaattttattaagtacaaaaatccttaacgtttgtatgggaacattggcaagaaagaatagtgtgaaagggaactgttttagtttcctatcagtaattgtacatgcagttaaatgtttaaggtaaaatgattggtctctgtcacagctaaaagatttcagtagccttcattgagtttgggtaaaataagttgctgttcttttgtcttctttttaatatataaaagttatatttaaaaagtatataacatactatatatgttacatactaacatatatatacacaacagaaagtttattggatttagtactgatatttactgtctatttttgttactttgttcttagtaatctattatagttacctattttaaggtaaggtctgtaggcaagatatgtaagtaaagacaagccctacaattttaaaataacaaagcttatgtcttaagttgtattttttcaaaggttcatgtttttctgagtaaatgtggtttattagcatgaaatattatgccttttacttaaattattttatgtaaaatagggcactgtttaattatgaaagggggaaaatcattccaaataagagtttaatttttattaattataaaaaactctgtattagtttcctagatgtgctagaacaaattaccacaaactgggtggctttaaacaacagaaatttattctcttaacagttccagagactaaatgtccagactcacaatgtcccagtgccatgcttcctccttaggccctaggaaagaatacttcctagcctcttcctggcttttggtggttgccagcaatccctgctgttccttagcctatagtggcttgactccaatctcagttttgttgtcaagtggtcttctaccctgtcttctatgtttgtatccgtgtccaaactctttttctagggagaccagcactggattagagttcaccatgatccaatatgacctcatcttgactacatccgcaaagaccctgtctccaaataaggtcacatttacagggtaccatgtgttaggatttgacatatcttttgggggacacaattctacccactacaggcccatatcttatctaggatgttggtggcaagaaggtgaagattactacctcttttgatataactagtttctgaggtatttaaaaatttggttttaaaaatattaagctttttgctcatttgcatgtatacttttctctcaacattgttttggtttatttaggttatttgttaaaacttcagtaaatactaaagttacttgtattagaacataataaaagtagagaattaaactacctaaataaatgcatcaaaaaa

SEQ ID NO: 10464 - protein, 339 aa, Homo sapiens; identical to SEQ ID NO: 928

SEQ ID NO: 10465 - DNA, 2082 bp, Homo sapiens
ctctgggaattgaagtttctgtggaaggaagcgtgagccgtaaccaggccaacccagaaaggctttctttctgagatttcacttccctgtcaactcttcagctcgaggcaccaaataatgtcatctgaaatgttgccagcatttattgaaacttctaatgttgacaaaaagcaaggcataaatgaagatcaagaggagagccagaagccaagattaggtgaagggtgtgaaccaatatctaaacgacaaatgaaaaaactaataaaacagaaacaatgggaagagcaacgggaactccgcaaacaaaagcgaaaagaaaaacgcaagaggaaaaaattagagcgacaatgtcaaatggaaccaaactcagatggacatgacagaaaacgtgttcgaagagatgttgttcatagcacccttcgccttattattgactgtagttttgatcacttgatggtattaaaggacattaagaaacttcataagcagattcaacgatgttacgcagaaaaccgacgggcactgcatcctgtgcagttttacttgacaagccacggaggccagctgaaaaagaacatggatgaaaatgacaaaggatgggtcaactggaaggatatccatatcaaaccagagcactatagtgaactcataaagaaagaagacctgatttaccttacgtcagattcacctaatatactgaaggaattagatgaatcaaaggcctatgtgattggaggattagtagatcacaaccatcacaagggactcacatataaacaagcgtcagattatggaatcaatcatgcacagctcccacttggaaattttgtgaagatgaatagtcgaaaagttttggcagttaatcatgtgtttgaaattattctggaatacctggaaacaagagactggcaagaagcattttttactatcttgccccaacggaaaggagctgttcccacagacaaagcctgtgaaagtgcttctcatgacaatcagtctgtcaggatggaggaaggtggatcggacagtgattccagtgaggaggaatatagcagaaatgaactagattcaccacatgaagaaaagcaggataaggaaaatcacactgaatctacagtgaactctctgccacactaatgttacctggtttccttttagtttaaggaaaaattaggagaaagtgaggtgctatatagaatattgaaattggaagaacattttattttctcttatttctgttgtgatttttaaaaacttttttttggacctaaataataataaaaaaaaaagccctttaaactttgtaaggaaatattttttgattttgcgtaagaagatttaaatgtgtatgtgattttttttgtttttgtttttaaagcctcagtagtttctagataattttactgtattagtatattttcattttctttcattttatattctttagaatgtgccttctgacctttcagttttttaattttatagtcacatcaacatctttatgatctattgcctatatatctgtgagggcacatattcataaatatactgtcaatctatcagcatttgtgtatggtaggttaccctctatttgcagcttttatgtttaaattagttacttgaaagaatgtagtaattttaggaagaagtatcagtttgatagacttaataattcatttcttttggactatggagcgcatatctgttccttctttatgatgcctttttatggttctgaagtaattactgaagagttgagaatctctttaatgcattttcttaattcttacaatggtgataagttacttcaattataaaattgaattttgcagactaaattattttataaggctgttgctattgaaagatcaattttgtctttacctgcatttaaaatggaacagctcttagcagctgtggtttttttttccatattttttttaaatttgttggctcttaagatgaataaagtttataggtgcatctgcctcctcttctctaagaatatgcatactaatgtttgtttctataaatcaaatacacatgtgataatatgcatgtaaatacataactatcctcatc

SEQ ID NO: 10466 - protein, 339 aa, Homo sapiens; identical to SEQ ID NO: 928

SEQ ID NO: 10467 - DNA, 1291 bp, Homo sapiens
ggaattgaagtttctgtggaaggaagcgtgagccgtaaccaggccaacccagaaaggctttctttctgagatttcacttccctgtcaactcttcagctcgaggcaccaaataatgtcatctgaaatgttgccagcatttattgaaacttctaatgttgacaaaaagcaaggcataaatgaagatcaagaggagagccagaagccaagattaggtgaagggtgtgaaccaatatctaaacgacaaatgaaaaaactaataaaacagaaacaatgggaagagcaacgggaactccgcaaacaaaagcgaaaagaaaaacgcaagaggaaaaaattagagcgacaatgtcaaatggaaccaaactcagatggacatgacagaaaacgtgttcgaagagatgttgttcatagcacccttcgccttattattgactgtagttttgatcacttgatggtattaaaggacattaagaaacttcataagcagattcaacgatgttacgcagaaaaccgacgggcactgcatcctgtgcagttttacttgacaagccacggaggccagctgaaaaagaacatggatgaaaatgacaaaggatgggtcaactggaaggatatccatatcaaaccagagcactatagtgaactcataaagaaagaagacctgatttaccttacgtcagattcacctaatatactgaaggaattagatgaatcaaaggcctatgtgattggaggattagtagatcacaaccatcacaagggactcacatataaacaagcgtcagattatggaatcaatcatgcacagctcccacttggaaattttgtgaagatgaatagtcgaaaagttttggcagttaatcatgtgtttgaaattattctggaatacctggaaacaagagactggcaagaagcattttttactatcttgccccaacggaaaggagctgttcccacagacaaagcctgtgaaagtgcttctcatgacaatcagtctgtcaggatggaggaaggtggatcggacagtgattccagtgaggaggaatatagcagaaatgaactagattcaccacatgaagaaaagcaggataaggaaaatcacactgaatctacagtgaactctctgccacactaatgttacctggtttccttttagtttaaggaaaaattaggagaaagtgaggtgctatatagaatattgaaattggaagaacattttattttctcttatttctgttgtgatttttaaaaacttttttttggacctaaataataataaaaaaaaaagcccttt

SEQ ID NO: 10468 - protein, 339 aa, Homo sapiens; identical to SEQ ID NO: 928

SEQ ID NO: 10469 - DNA, 262 bp, Homo sapiens
aagaaaaattgtatgtatatagtcatcccttctgcttattccattcctttaagatcatagaatggccatagacaattttaataactttgctttaaaaattgaactctgtgataggacattaagaaacttcataagcagattcaacgatgttacgcagaaaaccgacgggcactgcatcctgtgcagttttacttgacaagccacggaggccagctgaaaaagaacatggatgaaaatgacaaaggatgggtcaactggaagg

SEQ ID NO: 10470 - protein, 44 aa, Homo sapiens
MAIDNFNNFALKIELCDRTLRNFISRFNDVTQKTDGHCILCSFT

SEQ ID NO: 10471 - DNA, 906 bp, Homo sapiens
ccgcggcctacccagctgctccctggttcgccagagacagcttaatcccgtctctgaaatgcgtttgctggctgggagcctagaagggatagtgggcgaggctccgccccgtggtggggcgctttccgtcggcgtgtgttttggggttgccatcggcccgtagtatgtgaaaattgtttttcagaggcaccaaataatgtcatctgaaatgttgccagcatttattgaaacttctaatgttgacaaaaagcaaggcataaatgaagatcaagaggagagccagaagccaagattaggtgaagggtgtgaaccaatatctaaacgacaaatgaaaaaactaataaaacagaaacaatgggaagagcaacgggaactccgcaaacaaaagcgaaaagaaaaacgcaagaggaaaaaattagagcgacaatgtcaaatggaaccaaactcagatggacatgacagaaaacgtgttcgaagagatgttgttcatagcacccttcgccttattattgactgtagttttgatcacttgatggtattaaaggtatcatgaatcattgtcagaaaaatcttgtatgtgaattaggtcgaatcatttttgttttaatatgcaatatcccttttatgtaaatttgtgtattgaaatgaatcttcagtttttcaaactttcccctaagttaaattagctagcaaattgcattgatataataaatatgtgtatttatatatgtgtgtatgtgtgtgtgtcagtatgtgtgcagacaggaaagagagacaaacacacactttgtagtctagatgacagaactaaattaactacttattgatcataaagatctgtggggttttaccagtgttgttggtaaaacatgaaaatagtaatagtatggctctaaaagtcttgtt

SEQ ID NO: 10472 - protein, 118 aa, Homo sapiens
MSSEMLPAFIETSNVDKKQGINEDQEESQKPRLGEGCEPISKRQMKKLIKQKQWEEQRELRKQKRKEKRKRKKLERQCQMEPNSDGHDRKRVRRDVVHSTLRLIIDCSFDHLMVLKVS

SEQ ID NO: 10473 - DNA, 403 bp, Homo sapiens
ccgcggcctacccagctgctccctggttcgccagagacagcttaatcccgtctctgaaatgcgtttgctggctgggagcctagaagggatagtgggcgaggctccgccccgtggtggggcgctttccgtcggcgtgtgttttggggttgccatcggcccgtagtatgtgaaaattgtttttcagaggcaccaaataatgtcatctgaaatgttgccagcatttattgaaacttctaatgttgacaaaaagcaaggcataaatgaagatcaagaggagagccagaagccaagattaggtgaagggtgtgaaccaatatctaaacgacaaatgaaaaaactaataaaacagaaacaatgggaagagcaacgggaactccgcaaacaaaagcgtaaagaaaaacgc

SEQ ID NO: 10474 - protein, 68 aa, Homo sapiens
MSSEMLPAFIETSNVDKKQGINEDQEESQKPRLGEGCEPISKRQMKKLIKQKQWEEQRELRKQKRKEK

SEQ ID NO: 10475 - DNA, 258 bp, Homo sapiens
ccagaaaggctttctttctgagatttcacttccctgtcaactcttcagctcgaggcaccaaataatgtcatctgaaatgttgccagcatttattgaaacttctaatgttgacaaaaagcaaggcataaatgaagatcaagaggagagccagaagccaagattaggtgaagggtgtgaaccaatatctaaacgacaaatgaaaaaactaataaaacagaaacaatgggaagagcaacgggaactccgcaaacaaaagcg

SEQ ID NO: 10476 - protein, 63 aa, Homo sapiens
MSSEMLPAFIETSNVDKKQGINEDQEESQKPRLGEGCEPISKRQMKKLIKQKQWEEQRELRKQ

SEQ ID NO: 10477 - DNA, 1153 bp, Homo sapiens
actccctcactggctgccattgaaagagtccacttctcagtgactcctagctgggcactggatgcagttgaggattgctggtcaatatgattcttcttgctgtgctttttctctgcttcatttcctcatattcagcttctgttaaaggtcacacaactggtctctcattaaataatgaccggctgtacaagctcacgtactccactgaagttcttcttgatcggggcaaaggaaaactgcaagacagcgtgggctaccgcatttcctccaacgtggatgtggccttactatggaggaatcctgatggtgatgatgaccagttgatccaaataacgatgaaggatgtaaatgttgaaaatgtgaatcagcagagaggagagaagagcatcttcaaaggaaaaagcccatctaaaataatgggaaaggaaaacttggaagctctgcaaagacctacgctccttcatctaatccatggaaaggtaaaggggcgtttagattccacaactttttctccaacttcatatttttcttcccttcagtagatattattttgaggtaatcacattgtaactacttttatggtaaatggaatttcttcaagaactaaagaacagaggttgtaaattaaatgtttccaaactgaatcaatgccctgagttcccttacatttactagccaatttgtttcctatttttctggaaatctttatagtggaatgaagtatttatttattgatgaaaggcattattaaaaggtaaatttctcatcaaattataagggattacaaacgtaatgtaacaaagcaagtcatcaaagcatgattggatgaattcaggaaaggagacaaattatgagactgaaatgatccaactgagattagtaatattgatttgttatgagattatcgatatctggctaaagtacaaggttaaagattttaaaagggtatgacaagtctaaagtagagtttttttaaagcctttagaaattattttaaaactatgacatggaaaagccttttatatattaaaataatgattgaacactttataatatatatttgaaaatctgttttaaaaattctatgtgtgcattacttatggcttgattctagtcaattgaaatggtctaaataaatttggaattgagaaac

SEQ ID NO: 10478 - protein, 151 aa, Homo sapiens
MILLAVLFLCFISSYSASVKGHTTGLSLNNDRLYKLTYSTEVLLDRGKGKLQDSVGYRISSNVDVALLWRNPDGDDDQLIQITMKDVNVENVNQQRGEKSIFKGKSPSKIMGKENLEALQRPTLLHLIHGKVKGRLDSTTFSPTSYFSSLQ

SEQ ID NO: 10479 - DNA, 3920 bp, Homo sapiens
actccctcactggctgccattgaaagagtccacttctcagtgactcctagctgggcactggatgcagttgaggattgctggtcaatatgattcttcttgctgtgctttttctctgcttcatttcctcatattcagcttctgttaaaggtcacacaactggtctctcattaaataatgaccggctgtacaagctcacgtactccactgaagttcttcttgatcggggcaaaggaaaactgcaagacagcgtgggctaccgcatttcctccaacgtggatgtggccttactatggaggaatcctgatggtgatgatgaccagttgatccaaataacgatgaaggatgtaaatgttgaaaatgtgaatcagcagagaggagagaagagcatcttcaaaggaaaaagcccatctaaaataatgggaaaggaaaacttggaagctctgcaaagacctacgctccttcatctaatccatggaaaggtcaaagagttctactcatatcaaaatgaggcagtggccatagaaaatatcaagagaggtctggctagcctatttcagacacagttaagctctggaaccaccaatgaggtagatatctctggaaattgtaaagtgacctaccaggctcatcaagacaaagtgatcaaaattaaggccttggattcatgcaaaatagcgaggtctggatttacgaccccaaatcaggtcttgggtgtcagttcaaaagctacatctgtcaccacctataagatagaagacagctttgttatagctgtgcttgctgaagaaacacacaattttggactgaatttcctacaaaccattaaggggaaaatagtatcgaagcagaaattagagctgaagacaaccgaagcaggcccaagattgatgtctggaaagcaggctgcagccataatcaaagcagttgattcaaagtacacggccattcccattgtggggcaggtcttccagagccactgtaaaggatgtccttctctctcggagctctggcggtccaccaggaaatacctgcagcctgacaacctttccaaggctgaggctgtcagaaacttcctggccttcattcagcacctcaggactgcgaagaaagaagagatccttcaaatactaaagatggaaaataaggaagtattacctcagctggtggatgctgtcacctctgctcagacctcagactcattagaagccattttggactttttggatttcaaaagtgacagcagcattatcctccaggagaggtttctctatgcctgtggatttgcttctcatcccaatgaagaactcctgagagccctcattagtaagttcaaaggttctattggtagcagtgacatcagagaaactgttatgatcatcactgggacacttgtcagaaagttgtgtcagaatgaaggctgcaaactcaaagcagtagtggaagctaagaagttaatcctgggaggacttgaaaaagcagagaaaaaagaggacaccaggatgtatctgctggctttgaagaatgccctgcttccagaaggcatcccaagtcttctgaagtatgcagaagcaggagaagggcccatcagccacctggctaccactgctctccagagatatgatctccctttcataactgatgaggtgaagaagaccttaaacagaatataccaccaaaaccgtaaagttcatgaaaagactgtgcgcactgctgcagctgctatcattttaaataacaatccatcctacatggacgtcaagaacatcctgctgtctattggggagcttccccaagaaatgaataaatacatgctcgccattgttcaagacatcctacgttttgaaatgcctgcaagcaaaattgtccgtcgagttctgaaggaaatggtcgctcacaattatgaccgtttctccaggagtggatcttcttctgcctacactggctacatagaacgtagtccccgttcggcatctacttacagcctagacattctctactcgggttctggcattctaaggagaagtaacctgaacatctttcagtacattgggaaggctggtcttcacggtagccaggtggttattgaagcccaaggactggaagccttaatcgcagccacccctgacgagggggaggagaaccttgactcctatgctggtatgtcagccatcctctttgatgttcagctcagacctgtcacctttttcaacggatacagtgatttgatgtccaaaatgctgtcagcatctggcgaccctatcagtgtggtgaaaggacttattctgctaatagatcattctcaggaacttcagttacaatctggactaaaagccaatatagaggtccagggtggtctagctattgatatttcaggtgcaatggagtttagcttgtggtatcgtgagtctaaaacccgagtgaaaaatagggtgactgtggtaataaccactgacatcacagtggactcctcttttgtgaaagctggcctggaaaccagtacagaaacagaagcaggcttggagtttatctccacagtgcagttttctcagtacccattcttagtttgcatgcagatggacaaggatgaagctccattcaggcaatttgagaaaaagtacgaaaggctgtccacaggcagaggttatgtctctcagaaaagaaaagaaagcgtattagcaggatgtgaattcccgctccatcaagagaactcagagatgtgcaaagtggtgtttgcccctcagccggatagtacttccagcggatggttttgaaactgacctgtgatattttacttgaatttgtctccccgaaagggacacaatgtggcatgactaagtacttgctctctgagagcacagcgtttacatatttacctgtatttaagatttttgtaaaaagctacaaaaaactgcagtttgatcaaatttgggtatatgcagtatgctacccacagcgtcattttgaatcatcatgtgacgctttcaacaacgttcttagtttacttatacctctctcaaatctcatttggtacagtcagaatagttattctctaagaggaaactagtgtttgttaaaaacaaaaataaaaacaaaaccacacaaggagaacccaattttgtttcaacaatttttgatcaatgtatatgaagctcttgataggacttccttaagcatgacgggaaaaccaaacacgttccctaatcaggaaaaaaaaaaaaaaaaaaagtaagacacaaacaaaccattttttttctctttttttggagttgggggcccagggagaagggacaagacttttaaaagacttgttagccaacttcaagaattaatatttatgtctctgttattgttagttttaagccttaaggtagaaggcacatagaaataacatctcatctttctgctgaccattttagtgaggttgttccaaagacattcaggtctctacctccagccctgcaaaaatattggacctagcacagaggaatcaggaaaattaatttcagaaactccatttgatttttcttttgctgtgtctttttgagactgtaatatggtacactgtcctctaagggacatcctcattttatctcacctttttgggggtgagagctctagttcatttaactgtactctgcacaatagctaggatgactaagagaacattgcttcaagaaactggtggatttggatttccaaaatatgaaataaggaaaaaaatgtttttatttgtatgaattaaaagatccatgttgaacatttgcaaatatttattaataaacagatgtggtgataaacccaaaacaaatgacaggtccttattttccactaaacacagacacatgaaatgaaagtttagctagcccactatttgttgtaaattgaaaacgaagtgtgataaaataaatatgtagaaatca
